United States Patent Application Publication US 2011/0183924 A1 - sequence listing, part 132

SEQ ID NO: 361083 - DNA, 8131 bp, Homo sapiens
tccatacagggacaatatgtggctctggcctgtagtcgccatggcagccgtgtgctagatgccatctggagtggagcagccttgagggcccggaaggaaattgctgctgagcttggggagcagaaccaggagctgataagagaccctttcggccaccatgtggctcgaaatgtggccttgactaccttcctaaagcggcgagaggcttgggaacagcagcagggtgcggtggccaagcggaggcgggcattgaactccatacttgaagactgaggctttggatctgggactgggtgttgatgggggagggcaaaatggggtatccaccccatccctttcctggtttaaattggagtcagaagtcttagtggtaaatatttgatatttttattggaaatgtttttgttagtttgaggggaagggtatgaagacagatctcaaggtaaagtcagagagggctgtcatcagtatgctggggagtttagggacaggaggcattggtaggggattagatgtagcagcagtcaggctgggatcaagatgcctgggggacatcttgatcttggcctttcagggcaagtgggaggctagaaaggtggctaggaaagaacagcattcttcaggtaagggtatagacttgggatgtgaggcgttatgctgaaaggttctgtcacgaggggatcagaggacagtggggaaattgggtgggttatctagcctgtactgtctgcaggtcctgaaatttgatgctgtcatagtctttgcagtgggtcggttggaatgattctgggggcagaagctcagagccccttagtaggaatggaggcggcccttctgctgccactgctcagccccctccactgcatgacgaagggtggaggaaattcccagcaacatatggcccaggccttgcagcagtgtggaggtccaacgaaggagctccctgagtactttctttgggccaagtccttgaaagtcacaactcatagagtagagcccgtagaatgtggctttgacattcaggctgccaaagaggtctcgagggttttgcttgtacacgtcaaaggtgaatcgggcgatgtccttgctgtgcttgggcctctcccgtcccaggccatatgacagcactccactctgtaggacacccttgtcagtgcagtagatcctcataccagacacccaccactaatctccatcagcactgggtcagaccctccctcgcttggactttctgtccactgtgtgacatccttgacaattccacaactcctcctgcacctggtccccaggatcagggttaagctagagaggaagcccgggaaagctctaaaggacaggcattggaagcagccccagtataggcctcttacccttgtagggctccagctctgaccagactgcaacaccatcaggcacgtgtcatcctccagcagctggaagaagtcctcactgtccactgcagttccatcctcctctagcaccagggttagcactccattcagcagtagggtctccaatgcctgcccaatggcaagaagcaagaagggcaggtcttatcccatgccccttccctctttagctgcccaacatccatcagttggctctagacattggtcgatgtcccactttgactttctggcactttgatacctcctaaaggttgcagctctccgtgttcttcagtttttgggggatcctagctagaggctgacctttttcctctttgctcctaccatgtcattggcatctccccttgctcccctccaagtcacttctggtttggaattggaaagcaagccaggttctcacgaagtccacccttctgtcttatctacaatgctgcacctcacttcccacaccctcaagagttctccagaagtgttttcagtaatagtgtttaacctttttgagtccttactctgtgccaggtatgaggactttacctacattatcctcttactcctttcaacaaccctaggaggtgatgtattattattgcctttttatagttgaagaaactgaggttttggtaggttgaacaacttcccaaggtttgacaggcaggaagtggcagaatcagaatttgaacttgatttgtcacacaaatcacctttccatactagcttctgaattccgtccctcgaactctccctatctcctgctaacccctgctcccatagaaaagctcactaggtggaaaatgaacaaattgaccagagctcattaggcccactccgctgcttttagccctcagagggaggggcagctgtgtgacttcagccctctgctccatcatcacaagttgccactgttgtggagccccttggctacccctgctataggaaccgaggaacttggcctacttactttggctagcagctcctggcgggtggcagctgtcaggcctttccggatggtccgcttgtgatcacagacacggaaaggtcgctggggtggtggagctgaggtccagaccctccgtccaaactccgagcttatattagatactgacctggtagttgagaagaaaagtcaagaaggggcgaggaggggcttggtgagtgtaaagggcatgatgagggtagagtggctagagggctagggagggagagatctaggtttatcgattagggatgagggagagaccatggagtgcaggtgggggcgggtggctcaggagcttgacaagcccactgtggagtggggagcaggagaggaaggggtactggttagtctcctaggggctgagtggagtattgttgccctgcctatatcccctaaaggtggagggtagagcggagggttagcagtcacctgagtaagtcactggggttcagagctgagaggtactccatggtggaccggagagttccttccctggaacttctgggctgggtggttctctcctgtgctggggctttagtggtgttttctgttacaaacctgggatctcagcccaggacaaggtgggaatgagtcaagcctggactctggcccccctgcctggccagtaagaagggcaaagtccaaggggagggatgagggaggggccagatggggtcctggaggaagaattgcctggcaaaagccattggagcttgtatgtgtgtctttggtgatgacatgtgttgtgagggtagatgggaaccatgtaaaaggatgaaatgtgacttctggtgtttttttatttctatggagggactttctggggacggtttctggctctcaggctctgagaagctgcagtttatgagtggctctgtgtgtgctgccacctactggagaagccataagctgcagctttaggaaaagggaacccggggcagagtgtggggaagtgggatggcagcatggcagggctttggaaaatgagaggtgagagtgtgtccaggaagggtgtaaggagaggatggatcctgatacatggattcaggatcattagggtcctgtctgggacactggccttcctgcttacctgctctttccttcctccttggtcggaggaggggctggctcactgctctggcttcattttccagagctgcctgctgcagtcacacttaggtcatcttctctcacttttctccttttgccgattagtggacgtgacagagatgtgaatggggcagggatgtcctttgatggcatcaagactttagcttctggtgcgctgtgtcccagctctgatttcagttgcagccgtgatggacagttgcatggaagctgagactctcactgacagtgaaaccctcaaatgaacacaatccctgctttcctgccaaggatccttgtagggtcccccagcttccccactttttttctgtgtcctgacaaagaaacacagagtaacttgattgccctgtgacctggccagttgcatttcccctgcaggcttgagcccaagccagagccttgaaaaggtattcaggttgttgcccaaaacactgaaaaaaactggccctggccctgaaccaaataccttgaaccctcgtaaactccataccctgacccccttgttttggatatacccaggtagaacaactctctctcactgtctgttgtgaggatacgctgtagcccactcattaagtacattctcctaataaatgctttggactgatcaccctgccagtcttttgtcttgggcaatctatacttttctcagaggttcccaaggcctactgaagggacttaacatactcttaatggctttcctctctcttgttttaccttatgccctcacttcctgagttaacctcccaaatacaggatcacctgtacccaagcccttagctcaagaatacaggatcacctgtacccaagcccttagctcaagctctgctttggaagaacccaaactaagacagtgctcctggtgccctccccaagcaacctcaagttctggctgttacttgagcagaggcctttcttttcccttcccccagctctatccatctgccaggcccccctcaaatctcttcatttccaagttttgcttgacttttccaagaggagagggctgcttcttagtatgtccctactcatcctttcctttcttgtcttgtatcctggtgcagcctggtaatggggcctcttcatggttgtgtgtcatgactccctaaccattatgcctccatgcatcccctgttcctcctggaacctagcaccatgccttacatggaaaagctgtcattgacagcccggtgagagccctgagggtggagtgactggggcagggcctgaggcaagaggtgggaggaggtaggaggccaggggctcagccggaccaggagactggaaacaggcaaggataaggcaggtgggggactgagttgtttgggtcacctctgcaggccagagagaccaggcaacatacacactgcagaaggtgggctgggaggattggggccagagctgggggagggatgagaacagaagcaggaccaggattcagcagagtcctcctatttccttccaccaccagggaatcttactgccccacttcagcttgtgctgtttcctggcaaggcaggctctcacatgcctggacgcctgggtgcgttggtgatgggaaggagcagggtgagggaggggccccaggagaggcccaggatgagcctcatcttgtccctccccattcttgtcttaccctctgcaaatgtgataggcacaggacaggagtaggcacctcgcctactgctgcttaacctttcagcttctccaggcccccaatcctgcttgctcccagcttggtaagtagatctgtgcacgtccctttacaccccaccatccagttttgcccagatgtgctagaatggggctggacaaagaaggaggggccagactagaggagtggtggtagagatagtgacagcctggggtgaggactttatgcctgtttaccactgagctctgggaaggaggccaggagtggggcaggtcaactgactgggagcaggggatctgggttccaagaaggagttgtgtttgaggtggggtctgggtcctcgtggaagtcaggactcccaggcagaaaagaggcaggctgcagggaagtaaggaggaggcatggcaccttctcatcgggcatcacaggtggggttttgccccacccctgaacgccctctgtggcgccttccacccacctgtaggcccagaaggatgtcggtctgctaccgtcccccagggaacgagacactgctgagctggaagacttcgcgggccacaggcacagccttcctgctgctggcggcgctgctggggctgcctggcaacggcttcgtggtgtggagcttggcgggctggcggcctgcacgggggcgaccgctggcggccacgcttgtgctgcacctggcgctggccgacggcgcggtgctgctgctcacgccgctctttgtggccttcctgacccggcaggcctggccgctgggccaggcgggctgcaaggcggtgtactacgtgtgcgcgctcagcatgtacgccagcgtgctgctcaccggcctgctcagcctgcagcgctgcctcgcagtcacccgccccttcctggcgcctcggctgcgcagcccggccctggcccgccgcctgctgctggcggtctggctggccgccctgttgctcgccgtcccggccgccgtctaccgccacctgtggagggaccgcgtatgccagctgtgccacccgtcgccggtccacgccgccgcccacctgagcctggagactctgaccgctttcgtgcttcctttcgggctgatgctcggctgctacagcgtgacgctggcacggctgcggggcgcccgctggggctccgggcggcacggggcgcgggtgggccggctggtgagcgccatcgtgcttgccttcggcttgctctgggccccctaccacgcagtcaaccttctgcaggcggtcgcagcgctggctccaccggaaggggccttggcgaagctgggcggagccggccaggcggcgcgagcgggaactacggccttggccttcttcagttctagcgtcaacccggtgctctacgtcttcaccgctggagatctgctgccccgggcaggtccccgtttcctcacgcggctcttcgaaggctctggggaggcccgagggggcggccgctctagggaagggaccatggagctccgaactacccctcagctgaaagtggtggggcagggccgcggcaatggagacccggggggtgggatggagaaggacggtccggaatgggacctttgacagcagaccctacaacctgctgcccttccctgtccctttccaccccccacccaccctccagaggtcctcccgacggccatgaacactacatcttctgcagcacccccctcactaggtgtagagttcatctctctgctggctatcatcctgctgtcagtggcgctggctgtggggcttcccggcaacagctttgtggtgtggagtatcctgaaaaggatgcagaagcgctctgtcactgccctgatggtgctgaacctggccctggccgacctggccgtattgctcactgctccctttttccttcacttcctggcccaaggcacctggagttttggactggctggttgccgcctgtgtcactatgtctgcggagtcagcatgtacgccagcgtcctgcttatcacggccatgagtctagaccgctcactggcggtggcccgcccctttgtgtcccagaagctacgcaccaaggcgatggcccggcgggtgctggcaggcatctgggtgttgtcctttctgctggccacacccgtcctcgcgtaccgcacagtagtgccctggaaaacgaacatgagcctgtgcttcccgcggtaccccagcgaagggcaccgggccttccatctaatcttcgaggctgtcacgggcttcctgctgcccttcctggctgtggtggccagctactcggacatagggcgtcggctacaggcccggcgcttccgccgcagccgccgcaccggccgcctggtggtgctcatcatcctgaccttcgccgccttctggctgccctaccacgtggtgaacctggctgaggcgggccgcgcgctggccggccaggccgccgggttagggctcgtggggaagcggctgagcctggcccgcaacgtgctcatcgcactcgccttcctgagcagcagcgtgaaccccgtgctgtacgcgtgcgccggcggcggcctgctgcgctcggcgggcgtgggcttcgtcgccaagctgctggagggcacgggctccgaggcgtccagcacgcgccgcgggggcagcctgggccagaccgctaggagcggccccgccgctctggagcccggcccttccgagagcctcactgcctccagccctctcaagttaaacgaactgaactaggcctggtggaaggaggcgcactttcctcctggcagaatgctagctctgagccagttcagtacctggaggaggagcaggggcgtggagggcgtggagggcgtgggagcgtgggaggcgggagtggagtggaagaagagggagaggtggagcaaagtgagggccgagtgagagcgtgctccagcctggctcccacaggcagctttaaccattaaaactgaagtctgaaatttggtcaacacaagtgagtggggtacat

SEQ ID NO: 361084 - DNA, 7895 bp, Homo sapiens
tccatacagggacaatatgtggctctggcctgtagtcgccatggcagccgtgtgctagatgccatctggagtggagcagccttgagggcccggaaggaaattgctgctgagcttggggagcagaaccaggagctgataagagaccctttcggccaccatgtggctcgaaatgtggccttgactaccttcctaaagcggcgagaggcttgggaacagcagcagggtgcggtggccaagcggaggcgggcattgaactccatacttgaagactgaggctttggatctgggactgggtgttgatgggggagggcaaaatggggtatccaccccatccctttcctggtttaaattggagtcagaagtcttagtggtaaatatttgatatttttattggaaatgtttttgttagtttgaggggaagggtatgaagacagatctcaaggtaaagtcagagagggctgtcatcagtatgctggggagtttagggacaggaggcattggtaggggattagatgtagcagcagtcaggctgggatcaagatgcctgggggacatcttgatcttggcctttcagggcaagtgggaggctagaaaggtggctaggaaagaacagcattcttcaggtaagggtatagacttgggatgtgaggcgttatgctgaaaggttctgtcacgaggggatcagaggacagtggggaaattgggtgggttatctagcctgtactgtctgcaggtcctgaaatttgatgctgtcatagtctttgcagtgggtcggttggaatgattctgggggcagaagctcagagccccttagtaggaatggaggcggcccttctgctgccactgctcagccccctccactgcatgacgaagggtggaggaaattcccagcaacatatggcccaggccttgcagcagtgtggaggtccaacgaaggagctccctgagtactttctttgggccaagtccttgaaagtcacaactcatagagtagagcccgtagaatgtggctttgacattcaggctgccaaagaggtctcgagggttttgcttgtacacgtcaaaggtgaatcgggcgatgtccttgctgtgcttgggcctctcccgtcccaggccatatgacagcactccactccttgtagggctccagctctgaccagactgcaacaccatcaggcacgtgtcatcctccagcagctggaagaagtcctcactgtccactgcagttccatcctcctctagcaccagggttagcactccattcagcagtagggtctccaatgcctgcccaatggcaagaagcaagaagggcaggtcttatcccatgccccttccctctttagctgcccaacatccatcagttggctctagacattggtcgatgtcccactttgactttctggcactttgatacctcctaaaggttgcagctctccgtgttcttcagtttttgggggatcctagctagaggctgacctttttcctctttgctcctaccatgtcattggcatctccccttgctcccctccaagtcacttctggtttggaattggaaagcaagccaggttctcacgaagtccacccttctgtcttatctacaatgctgcacctcacttcccacaccctcaagagttctccagaagtgttttcagtaatagtgtttaacctttttgagtccttactctgtgccaggtatgaggactttacctacattatcctcttactcctttcaacaaccctaggaggtgatgtattattattgcctttttatagttgaagaaactgaggttttggtaggttgaacaacttcccaaggtttgacaggcaggaagtggcagaatcagaatttgaacttgatttgtcacacaaatcacctttccatactagcttctgaattccgtccctcgaactctccctatctcctgctaacccctgctcccatagaaaagctcactaggtggaaaatgaacaaattgaccagagctcattaggcccactccgctgcttttagccctcagagggaggggcagctgtgtgacttcagccctctgctccatcatcacaagttgccactgttgtggagccccttggctacccctgctataggaaccgaggaacttggcctacttactttggctagcagctcctggcgggtggcagctgtcaggcctttccggatggtccgcttgtgatcacagacacggaaaggtcgctggggtggtggagctgaggtccagaccctccgtccaaactccgagcttatattagatactgacctggtagttgagaagaaaagtcaagaaggggcgaggaggggcttggtgagtgtaaagggcatgatgagggtagagtggctagagggctagggagggagagatctaggtttatcgattagggatgagggagagaccatggagtgcaggtgggggcgggtggctcaggagcttgacaagcccactgtggagtggggagcaggagaggaaggggtactggttagtctcctaggggctgagtggagtattgttgccctgcctatatcccctaaaggtggagggtagagcggagggttagcagtcacctgagtaagtcactggggttcagagctgagaggtactccatggtggaccggagagttccttccctggaacttctgggctgggtggttctctcctgtgctggggctttagtggtgttttctgttacaaacctgggatctcagcccaggacaaggtgggaatgagtcaagcctggactctggcccccctgcctggccagtaagaagggcaaagtccaaggggagggatgagggaggggccagatggggtcctggaggaagaattgcctggcaaaagccattggagcttgtatgtgtgtctttggtgatgacatgtgttgtgagggtagatgggaaccatgtaaaaggatgaaatgtgacttctggtgtttttttatttctatggagggactttctggggacggtttctggctctcaggctctgagaagctgcagtttatgagtggctctgtgtgtgctgccacctactggagaagccataagctgcagctttaggaaaagggaacccggggcagagtgtggggaagtgggatggcagcatggcagggctttggaaaatgagaggtgagagtgtgtccaggaagggtgtaaggagaggatggatcctgatacatggattcaggatcattagggtcctgtctgggacactggccttcctgcttacctgctctttccttcctccttggtcggaggaggggctggctcactgctctggcttcattttccagagctgcctgctgcagtcacacttaggtcatcttctctcacttttctccttttgccgattagtggacgtgacagagatgtgaatggggcagggatgtcctttgatggcatcaagactttagcttctggtgcgctgtgtcccagctctgatttcagttgcagccgtgatggacagttgcatggaagctgagactctcactgacagtgaaaccctcaaatgaacacaatccctgctttcctgccaaggatccttgtagggtcccccagcttccccactttttttctgtgtcctgacaaagaaacacagagtaacttgattgccctgtgacctggccagttgcatttcccctgcaggcttgagcccaagccagagccttgaaaaggtattcaggttgttgcccaaaacactgaaaaaaactggccctggccctgaaccaaataccttgaaccctcgtaaactccataccctgacccccttgttttggatatacccaggtagaacaactctctctcactgtctgttgtgaggatacgctgtagcccactcattaagtacattctcctaataaatgctttggactgatcaccctgccagtcttttgtcttgggcaatctatacttttctcagaggttcccaaggcctactgaagggacttaacatactcttaatggctttcctctctcttgttttaccttatgccctcacttcctgagttaacctcccaaatacaggatcacctgtacccaagcccttagctcaagaatacaggatcacctgtacccaagcccttagctcaagctctgctttggaagaacccaaactaagacagtgctcctggtgccctccccaagcaacctcaagttctggctgttacttgagcagaggcctttcttttcccttcccccagctctatccatctgccaggcccccctcaaatctcttcatttccaagttttgcttgacttttccaagaggagagggctgcttcttagtatgtccctactcatcctttcctttcttgtcttgtatcctggtgcagcctggtaatggggcctcttcatggttgtgtgtcatgactccctaaccattatgcctccatgcatcccctgttcctcctggaacctagcaccatgccttacatggaaaagctgtcattgacagcccggtgagagccctgagggtggagtgactggggcagggcctgaggcaagaggtgggaggaggtaggaggccaggggctcagccggaccaggagactggaaacaggcaaggataaggcaggtgggggactgagttgtttgggtcacctctgcaggccagagagaccaggcaacatacacactgcagaaggtgggctgggaggattggggccagagctgggggagggatgagaacagaagcaggaccaggattcagcagagtcctcctatttccttccaccaccagggaatcttactgccccacttcagcttgtgctgtttcctggcaaggcaggctctcacatgcctggacgcctgggtgcgttggtgatgggaaggagcagggtgagggaggggccccaggagaggcccaggatgagcctcatcttgtccctccccattcttgtcttaccctctgcaaatgtgataggcacaggacaggagtaggcacctcgcctactgctgcttaacctttcagcttctccaggcccccaatcctgcttgctcccagcttggtaagtagatctgtgcacgtccctttacaccccaccatccagttttgcccagatgtgctagaatggggctggacaaagaaggaggggccagactagaggagtggtggtagagatagtgacagcctggggtgaggactttatgcctgtttaccactgagctctgggaaggaggccaggagtggggcaggtcaactgactgggagcaggggatctgggttccaagaaggagttgtgtttgaggtggggtctgggtcctcgtggaagtcaggactcccaggcagaaaagaggcaggctgcagggaagtaaggaggaggcatggcaccttctcatcgggcatcacaggtggggttttgccccacccctgaacgccctctgtggcgccttccacccacctgtaggcccagaaggatgtcggtctgctaccgtcccccagggaacgagacactgctgagctggaagacttcgcgggccacaggcacagccttcctgctgctggcggcgctgctggggctgcctggcaacggcttcgtggtgtggagcttggcgggctggcggcctgcacgggggcgaccgctggcggccacgcttgtgctgcacctggcgctggccgacggcgcggtgctgctgctcacgccgctctttgtggccttcctgacccggcaggcctggccgctgggccaggcgggctgcaaggcggtgtactacgtgtgcgcgctcagcatgtacgccagcgtgctgctcaccggcctgctcagcctgcagcgctgcctcgcagtcacccgccccttcctggcgcctcggctgcgcagcccggccctggcccgccgcctgctgctggcggtctggctggccgccctgttgctcgccgtcccggccgccgtctaccgccacctgtggagggaccgcgtatgccagctgtgccacccgtcgccggtccacgccgccgcccacctgagcctggagactctgaccgctttcgtgcttcctttcgggctgatgctcggctgctacagcgtgacgctggcacggctgcggggcgcccgctggggctccgggcggcacggggcgcgggtgggccggctggtgagcgccatcgtgcttgccttcggcttgctctgggccccctaccacgcagtcaaccttctgcaggcggtcgcagcgctggctccaccggaaggggccttggcgaagctgggcggagccggccaggcggcgcgagcgggaactacggccttggccttcttcagttctagcgtcaacccggtgctctacgtcttcaccgctggagatctgctgccccgggcaggtccccgtttcctcacgcggctcttcgaaggctctggggaggcccgagggggcggccgctctagggaagggaccatggagctccgaactacccctcagctgaaagtggtggggcagggccgcggcaatggagacccggggggtgggatggagaaggacggtccggaatgggacctttgacagcagaccctacaacctgctgcccttccctgtccctttccaccccccacccaccctccagaggtcctcccgacggccatgaacactacatcttctgcagcacccccctcactaggtgtagagttcatctctctgctggctatcatcctgctgtcagtggcgctggctgtggggcttcccggcaacagctttgtggtgtggagtatcctgaaaaggatgcagaagcgctctgtcactgccctgatggtgctgaacctggccctggccgacctggccgtattgctcactgctccctttttccttcacttcctggcccaaggcacctggagttttggactggctggttgccgcctgtgtcactatgtctgcggagtcagcatgtacgccagcgtcctgcttatcacggccatgagtctagaccgctcactggcggtggcccgcccctttgtgtcccagaagctacgcaccaaggcgatggcccggcgggtgctggcaggcatctgggtgttgtcctttctgctggccacacccgtcctcgcgtaccgcacagtagtgccctggaaaacgaacatgagcctgtgcttcccgcggtaccccagcgaagggcaccgggccttccatctaatcttcgaggctgtcacgggcttcctgctgcccttcctggctgtggtggccagctactcggacatagggcgtcggctacaggcccggcgcttccgccgcagccgccgcaccggccgcctggtggtgctcatcatcctgaccttcgccgccttctggctgccctaccacgtggtgaacctggctgaggcgggccgcgcgctggccggccaggccgccgggttagggctcgtggggaagcggctgagcctggcccgcaacgtgctcatcgcactcgccttcctgagcagcagcgtgaaccccgtgctgtacgcgtgcgccggcggcggcctgctgcgctcggcgggcgtgggcttcgtcgccaagctgctggagggcacgggctccgaggcgtccagcacgcgccgcgggggcagcctgggccagaccgctaggagcggccccgccgctctggagcccggcccttccgagagcctcactgcctccagccctctcaagttaaacgaactgaactaggcctggtggaaggaggcgcactttcctcctggcagaatgctagctctgagccagttcagtacctggaggaggagcaggggcgtggagggcgtggagggcgtgggagcgtgggaggcgggagtggagtggaagaagagggagaggtggagcaaagtgagggccgagtgagagcgtgctccagcctggctcccacaggcagctttaaccattaaaactgaagtctgaaatttggtcaacacaagtgagtggggtacat

SEQ ID NO: 361085 - DNA, 7969 bp, Homo sapiens
tccatacagggacaatatgtggctctggcctgtagtcgccatggcagccgtgtgctagatgccatctggagtggagcagccttgagggcccggaaggaaattgctgctgagcttggggagcagaaccaggagctgataagagaccctttcggccaccatgtggctcgaaatgtggccttgactaccttcctaaagcggcgagaggcttgggaacagcagcagggtgcggtggccaagcggaggcgggcattgaactccatacttgaagactgaggctttggatctgggactgggtgttgatgggggagggcaaaatggggtatccaccccatccctttcctggtttaaattggagtcagaagtcttagtggtaaatatttgatatttttattggaaatgtttttgttagtttgaggggaagggtatgaagacagatctcaaggtaaagtcagagagggctgtcatcagtatgctggggagtttagggacaggaggcattggtaggggattagatgtagcagcagtcaggctgggatcaagatgcctgggggacatcttgatcttggcctttcagggcaagtgggaggctagaaaggtggctaggaaagaacagcattcttcaggtaagggtatagacttgggatgtgaggcgttatgctgaaaggttctgtcacgaggggatcagaggacagtggggaaattgggtgggttatctagcctgtactgtctgcaggtcctgaaatttgatgctgtcatagtctttgcagtgggtcggttggaatgattctgggggcagaagctcagagccccttagtaggaatggaggcggcccttctgctgccactgctcagccccctccactgcatgacgaagggtggaggaaattcccagcaacatatggcccaggccttgcagcagtgtggaggtccaacgaaggagctccctgaatggcagagacaagaggaaatcagatgatttggaaaacttgggaggaagccatcaagctgggagatgaggactttccacaagcaagagctaactaggggtaggtgggtgcaagaggacgaattatggggactatccaactgtaggggatggggcagtatgacatgttgatttctgacctgagtactttctttgggccaagtccttgaaagtcacaactcatagagtagagcccgtagaatgtggctttgacattcaggctgccaaagaggtctcgagggttttgcttgtacacgtcaaaggtgaatcgggcgatgtccttgctgtgcttgggcctctcccgtcccaggccatatgacagcactccactctgtaggacacccttgtcagtgcagtagatcctcataccagacacccaccactaatctccatcagcactgggtcagaccctccctcgcttggactttctgtccactgtgtgacatccttgacaattccacaactcctcctgcacctggtccccaggatcagggttaagctagagaggaagcccgggaaagctctaaaggacaggcattggaagcagccccagtataggcctcttacccttgtagggctccagctctgaccagactgcaacaccatcaggcacgtgtcatcctccagcagctggaagaagtcctcactgtccactgcagttccatcctcctctagcaccagggttagcactccattcagcagtagggtctccaatgcctgcccaatggcaagaagcaagaagggcaggtcttatcccatgccccttccctctttagctgcccaacatccatcagttggctctagacattggtcgatgtcccactttgactttctggcactttgatacctcctaaaggttgcagctctccgtgttcttcagtttttgggggatcctagctagaggctgacctttttcctctttgctcctaccatgtcattggcatctccccttgctcccctccaagtcacttctggtttggaattggaaagcaagccaggttctcacgaagtccacccttctgtcttatctacaatgctgcacctcacttcccacaccctcaagagttctccagaagtgttttcagtaatagtgtttaacctttttgagtccttactctgtgccaggtatgaggactttacctacattatcctcttactcctttcaacaaccctaggaggtgatgtattattattgcctttttatagttgaagaaactgaggttttggtaggttgaacaacttcccaaggtttgacaggcaggaagtggcagaatcagaatttgaacttgatttgtcacacaaatcacctttccatactagcttctgaattccgtccctcgaactctccctatctcctgctaacccctgctcccatagaaaagctcactaggtggaaaatgaacaaattgaccagagctcattaggcccactccgctgcttttagccctcagagggaggggcagctgtgtgacttcagccctctgctccatcatcacaagttgccactgttgtggagccccttggctacccctgctataggaaccgaggaacttggcctacttactttggctagcagctcctggcgggtggcagctgtcaggcctttccggatggtccgcttgtgatcacagacacggaaaggtcgctggggtggtggagctgaggtccagaccctccgtccaaactccgagcttatattagatactgacctggtagttgagaagaaaagtcaagaaggggcgaggaggggcttggtgagtgtaaagggcatgatgagggtagagtggctagagggctagggagggagagatctaggtttatcgattagggatgagggagagaccatggagtgcaggtgggggcgggtggctcaggagcttgacaagcccactgtggagtggggagcaggagaggaaggggtactggttagtctcctaggggctgagtggagtattgttgccctgcctatatcccctaaaggtggagggtagagcggagggttagcagtcacctgagtaagtcactggggttcagagctgagaggtactccatggtggaccggagagttccttccctggaacttctgggctgggtggttctctcctgtgctggggctttagtggtgttttctgttacaaacctgggatctcagcccaggacaaggtgggaatgagtcaagcctggactctggcccccctgcctggccagtaagaagggcaaagtccaaggggagggatgagggaggggccagatggggtcctggaggaagaattgcctggcaaaagccattggagcttgtatgtgtgtctttggtgatgacatgtgttgtgagggtagatgggaaccatgtaaaaggatgaaatgtgacttctggtgtttttttatttctatggagggactttctggggacggtttctggctctcaggctctgagaagctgcagtttatgagtggctctgtgtgtgctgccacctactggagaagccataagctgcagctttaggaaaagggaacccggggcagagtgtggggaagtgggatggcagcatggcagggctttggaaaatgagaggtgagagtgtgtccaggaagggtgtaaggagaggatggatcctgatacatggattcaggatcattagggtcctgtctgggacactggccttcctgcttacctgctctttccttcctccttggtcggaggaggggctggctcactgctctggcttcattttccagagctgcctgctgcagtcacacttaggtcatcttctctcacttttctccttttgccgattagtggacgtgacagagatgtgaatggggcagggatgtcctttgatggcatcaagactttagcttctggtgcgctgtgtcccagctctgatttcagttgcagccgtgatggacagttgcatggaagctgagactctcactgacagtgaaaccctcaaatgaacacaatccctgctttcctgccaaggatccttgtagggtcccccagcttccccactttttttctgtgtcctgacaaagaaacacagagtaacttgattgccctgtgacctggccagttgcatttcccctgcaggcttgagcccaagccagagccttgaaaaggtattcaggttgttgcccaaaacactgaaaaaaactggccctggccctgaaccaaataccttgaaccctcgtaaactccataccctgacccccttgttttggatatacccaggtagaacaactctctctcactgtctgttgtgaggatacgctgtagcccactcattaagtacattctcctaataaatgctttggactgatcaccctgccagtcttttgtcttgggcaatctatacttttctcagaggttcccaaggcctactgaagggacttaacatactcttaatggctttcctctctcttgttttaccttatgccctcacttcctgagttaacctcccaaatacaggatcacctgtacccaagcccttagctcaagaatacaggatcacctgtacccaagcccttagctcaagctctgctttggaagaacccaaactaagacagtgctcctggtgccctccccaagcaacctcaagttctggctgttacttgagcagaggcctttcttttcccttcccccagctctatccatctgccaggcccccctcaaatctcttcatttccaagttttgcttgacttttccaagaggagagggctgcttcttagtatgtccctactcatcctttcctttcttgtcttgtatcctggtgcagcctggtaatggggcctcttcatggttgtgtgtcatgactccctaaccattatgcctccatgcatcccctgttcctcctggaacctagcaccatgccttacatggaaaagctgtcattgacagcccggtgagagccctgagggtggagtgactggggcagggcctgaggcaagaggtgggaggaggtaggaggccaggggctcagccggaccaggagactggaaacaggcaaggataaggcaggtgggggactgagttgtttgggtcacctctgcaggccagagagaccaggcaacatacacactgcagaaggtgggctgggaggattggggccagagctgggggagggatgagaacagaagcaggaccaggattcagcagagtcctcctatttccttccaccaccagggaatcttactgccccacttcagcttgtgctgtttcctggcaaggcaggctctcacatgcctggacgcctgggtgcgttggtgatgggaaggagcagggtgagggaggggccccaggagaggcccaggatgagcctcatcttgtccctccccattcttgtcttaccctctgcaaatgtgataggcacaggacaggagtaggcacctcgcctactgctgcttaacctttcagcttctccaggcccccaatcctgcttgctcccagcttggtggggttttgccccacccctgaacgccctctgtggcgccttccacccacctgtaggcccagaaggatgtcggtctgctaccgtcccccagggaacgagacactgctgagctggaagacttcgcgggccacaggcacagccttcctgctgctggcggcgctgctggggctgcctggcaacggcttcgtggtgtggagcttggcgggctggcggcctgcacgggggcgaccgctggcggccacgcttgtgctgcacctggcgctggccgacggcgcggtgctgctgctcacgccgctctttgtggccttcctgacccggcaggcctggccgctgggccaggcgggctgcaaggcggtgtactacgtgtgcgcgctcagcatgtacgccagcgtgctgctcaccggcctgctcagcctgcagcgctgcctcgcagtcacccgccccttcctggcgcctcggctgcgcagcccggccctggcccgccgcctgctgctggcggtctggctggccgccctgttgctcgccgtcccggccgccgtctaccgccacctgtggagggaccgcgtatgccagctgtgccacccgtcgccggtccacgccgccgcccacctgagcctggagactctgaccgctttcgtgcttcctttcgggctgatgctcggctgctacagcgtgacgctggcacggctgcggggcgcccgctggggctccgggcggcacggggcgcgggtgggccggctggtgagcgccatcgtgcttgccttcggcttgctctgggccccctaccacgcagtcaaccttctgcaggcggtcgcagcgctggctccaccggaaggggccttggcgaagctgggcggagccggccaggcggcgcgagcgggaactacggccttggccttcttcagttctagcgtcaacccggtgctctacgtcttcaccgctggagatctgctgccccgggcaggtccccgtttcctcacgcggctcttcgaaggctctggggaggcccgagggggcggccgctctagggaagggaccatggagctccgaactacccctcagctgaaagtggtggggcagggccgcggcaatggagacccggggggtgggatggagaaggacggtccggaatgggacctttgacagcagaccctacaacctgctgcccttccctgtccctttccaccccccacccaccctccagaggtcctcccgacggccatgaacactacatcttctgcagcacccccctcactaggtgtagagttcatctctctgctggctatcatcctgctgtcagtggcgctggctgtggggcttcccggcaacagctttgtggtgtggagtatcctgaaaaggatgcagaagcgctctgtcactgccctgatggtgctgaacctggccctggccgacctggccgtattgctcactgctccctttttccttcacttcctggcccaaggcacctggagttttggactggctggttgccgcctgtgtcactatgtctgcggagtcagcatgtacgccagcgtcctgcttatcacggccatgagtctagaccgctcactggcggtggcccgcccctttgtgtcccagaagctacgcaccaaggcgatggcccggcgggtgctggcaggcatctgggtgttgtcctttctgctggccacacccgtcctcgcgtaccgcacagtagtgccctggaaaacgaacatgagcctgtgcttcccgcggtaccccagcgaagggcaccgggccttccatctaatcttcgaggctgtcacgggcttcctgctgcccttcctggctgtggtggccagctactcggacatagggcgtcggctacaggcccggcgcttccgccgcagccgccgcaccggccgcctggtggtgctcatcatcctgaccttcgccgccttctggctgccctaccacgtggtgaacctggctgaggcgggccgcgcgctggccggccaggccgccgggttagggctcgtggggaagcggctgagcctggcccgcaacgtgctcatcgcactcgccttcctgagcagcagcgtgaaccccgtgctgtacgcgtgcgccggcggcggcctgctgcgctcggcgggcgtgggcttcgtcgccaagctgctggagggcacgggctccgaggcgtccagcacgcgccgcgggggcagcctgggccagaccgctaggagcggccccgccgctctggagcccggcccttccgagagcctcactgcctccagccctctcaagttaaacgaactgaactaggcctggtggaaggaggcgcactttcctcctggcagaatgctagctctgagccagttcagtacctggaggaggagcaggggcgtggagggcgtggagggcgtgggagcgtgggaggcgggagtggagtggaagaagagggagaggtggagcaaagtgagggccgagtgagagcgtgctccagcctggctcccacaggcagctttaaccattaaaactgaagtctgaaatttggtcaacacaagtgagtggggtacat

SEQ ID NO: 361086 - DNA, 6494 bp, Homo sapiens
tccatacagggacaatatgtggctctggcctgtagtcgccatggcagccgtgtgctagatgccatctggagtggagcagccttgagggcccggaaggaaattgctgctgagcttggggagcagaaccaggagctgataagagaccctttcggccaccatgtggctcgaaatgtggccttgactaccttcctaaagcggcgagaggcttgggaacagcagcagggtgcggtggccaagcggaggcgggcattgaactccatacttgaagactgaggctttggatctgggactgggtgttgatgggggagggcaaaatggggtatccaccccatccctttcctggtttaaattggagtcagaagtcttagtggtaaatatttgatatttttattggaaatgtttttgttagtttgaggggaagggtatgaagacagatctcaaggtaaagtcagagagggctgtcatcagtatgctggggagtttagggacaggaggcattggtaggggattagatgtagcagcagtcaggctgggatcaagatgcctgggggacatcttgatcttggcctttcagggcaagtgggaggctagaaaggtggctaggaaagaacagcattcttcaggtaagggtatagacttgggatgtgaggcgttatgctgaaaggttctgtcacgaggggatcagaggacagtggggaaattgggtgggttatctagcctgtactgtctgcaggtcctgaaatttgatgctgtcatagtctttgcagtgggtcggttggaatgattctgggggcagaagctcagagccccttagtaggaatggaggcggcccttctgctgccactgctcagccccctccactgcatgacgaagggtggaggaaattcccagcaacatatggcccaggccttgcagcagtgtggaggtccaacgaaggagctccctgaatggcagagacaagaggaaatcagatgatttggaaaacttgggaggaagccatcaagctgggagatgaggactttccacaagcaagagctaactaggggtaggtgggtgcaagaggacgaattatggggactatccaactgtaggggatggggcagtatgacatgttgatttctgacctgagtactttctttgggccaagtccttgaaagtcacaactcatagagtagagcccgtagaatgtggctttgacattcaggctgccaaagaggtctcgagggttttgcttgtacacgtcaaaggtgaatcgggcgatgtccttgctgtgcttgggcctctcccgtcccaggccatatgacagcactccactctgtaggacacccttgtcagtgcagtagatcctcataccagacacccaccactaatctccatcagcactgggtcagaccctccctcgcttggactttctgtccactgtgtgacatccttgacaattccacaactcctcctgcacctggtccccaggatcagggttaagctagagaggaagcccgggaaagctctaaaggacaggcattggaagcagccccagtataggcctcttacccttgtagggctccagctctgaccagactgcaacaccatcaggcacgtgtcatcctccagcagctggaagaagtcctcactgtccactgcagttccatcctcctctagcaccagggttagcactccattcagcagtagggtctccaatgcctgcccaatggcaagaagcaagaagggcaggtcttatcccatgccccttccctctttagctgcccaacatccatcagttggctctagacattggtcgatgtcccactttgactttctggcactttgatacctcctaaaggttgcagctctccgtgttcttcagtttttgggggatcctagctagaggctgacctttttcctctttgctcctaccatgtcattggcatctccccttgctcccctccaagtcacttctggtttggaattggaaagcaagccaggttctcacgaagtccacccttctgtcttatctacaatgctgcacctcacttcccacaccctcaagagttctccagaagtgttttcagtaatagtgtttaacctttttgagtccttactctgtgccaggtatgaggactttacctacattatcctcttactcctttcaacaaccctaggaggtgatgtattattattgcctttttatagttgaagaaactgaggttttggtaggttgaacaacttcccaaggtttgacaggcaggaagtggcagaatcagaatttgaacttgatttgtcacacaaatcacctttccatactagcttctgaattccgtccctcgaactctccctatctcctgctaacccctgctcccatagaaaagctcactaggtggaaaatgaacaaattgaccagagctcattaggcccactccgctgcttttagccctcagagggaggggcagctgtgtgacttcagccctctgctccatcatcacaagttgccactgttgtggagccccttggctacccctgctataggaaccgaggaacttggcctacttactttggctagcagctcctggcgggtggcagctgtcaggcctttccggatggtccgcttgtgatcacagacacggaaaggtcgctggggtggtggagctgaggtccagaccctccgtccaaactccgagcttatattagatactgacctggtagttgagaagaaaagtcaagaaggggcgaggaggggcttggtgagtgtaaagggcatgatgagggtagagtggctagagggctagggagggagagatctaggtttatcgattagggatgagggagagaccatggagtgcaggtgggggcgggtggctcaggagcttgacaagcccactgtggagtggggagcaggagaggaaggggtactggttagtctcctaggggctgagtggagtattgttgccctgcctatatcccctaaaggtggagggtagagcggagggttagcagtcacctgagtaagtcactggggttcagagctgagaggtactccatggtggaccggagagttccttccctggaacttctgggctgggtggttctctcctgtgctggggctttagtggtgttttctgttacaaacctgggatctcagcccaggacaaggtgggaatgagtcaagcctggactctggcccccctgcctggccagtaagaagggcaaagtccaaggggagggatgagggaggggccagatggggtcctggaggaagaattgcctggcaaaagccattggagcttgtatgtgtgtctttggtgatgacatgtgttgtgagggtagatgggaaccatgtaaaaggatgaaatgtgacttctggtgtttttttatttctatggagggactttctggggacggtttctggctctcaggctctgagaagctgcagtttatgagtggctctgtgtgtgctgccacctactggagaagccataagctgcagctttaggaaaagggaacccggggcagagtgtggggaagtgggatggcagcatggcagggctttggaaaatgagaggtgagagtgtgtccaggaagggtgtaaggagaggatggatcctgatacatggattcaggatcattagggtcctgtctgggacactggccttcctgcttacctgctctttccttcctccttggtcggaggaggggctggctcactgctctggcttcattttccagagctgcctgctgcagtcacacttaggtcatcttctctcacttttctccttttgccgattagtggacgtgacagagatgtgaatggggcagggatgtcctttgatggcatcaagactttagcttctggtgcgctgtgtcccagctctgatttcagttgcagccgtgatggacagttgcatggaagctgagactctcactgacagtgaaaccctcaaatgaacacaatccctgctttcctgccaaggatccttgtagggtcccccagcttccccactttttttctgtgtcctgtaggcccagaaggatgtcggtctgctaccgtcccccagggaacgagacactgctgagctggaagacttcgcgggccacaggcacagccttcctgctgctggcggcgctgctggggctgcctggcaacggcttcgtggtgtggagcttggcgggctggcggcctgcacgggggcgaccgctggcggccacgcttgtgctgcacctggcgctggccgacggcgcggtgctgctgctcacgccgctctttgtggccttcctgacccggcaggcctggccgctgggccaggcgggctgcaaggcggtgtactacgtgtgcgcgctcagcatgtacgccagcgtgctgctcaccggcctgctcagcctgcagcgctgcctcgcagtcacccgccccttcctggcgcctcggctgcgcagcccggccctggcccgccgcctgctgctggcggtctggctggccgccctgttgctcgccgtcccggccgccgtctaccgccacctgtggagggaccgcgtatgccagctgtgccacccgtcgccggtccacgccgccgcccacctgagcctggagactctgaccgctttcgtgcttcctttcgggctgatgctcggctgctacagcgtgacgctggcacggctgcggggcgcccgctggggctccgggcggcacggggcgcgggtgggccggctggtgagcgccatcgtgcttgccttcggcttgctctgggccccctaccacgcagtcaaccttctgcaggcggtcgcagcgctggctccaccggaaggggccttggcgaagctgggcggagccggccaggcggcgcgagcgggaactacggccttggccttcttcagttctagcgtcaacccggtgctctacgtcttcaccgctggagatctgctgccccgggcaggtccccgtttcctcacgcggctcttcgaaggctctggggaggcccgagggggcggccgctctagggaagggaccatggagctccgaactacccctcagctgaaagtggtggggcagggccgcggcaatggagacccggggggtgggatggagaaggacggtccggaatgggacctttgacagcagaccctacaacctgctgcccttccctgtccctttccaccccccacccaccctccagaggtcctcccgacggccatgaacactacatcttctgcagcacccccctcactaggtgtagagttcatctctctgctggctatcatcctgctgtcagtggcgctggctgtggggcttcccggcaacagctttgtggtgtggagtatcctgaaaaggatgcagaagcgctctgtcactgccctgatggtgctgaacctggccctggccgacctggccgtattgctcactgctccctttttccttcacttcctggcccaaggcacctggagttttggactggctggttgccgcctgtgtcactatgtctgcggagtcagcatgtacgccagcgtcctgcttatcacggccatgagtctagaccgctcactggcggtggcccgcccctttgtgtcccagaagctacgcaccaaggcgatggcccggcgggtgctggcaggcatctgggtgttgtcctttctgctggccacacccgtcctcgcgtaccgcacagtagtgccctggaaaacgaacatgagcctgtgcttcccgcggtaccccagcgaagggcaccgggccttccatctaatcttcgaggctgtcacgggcttcctgctgcccttcctggctgtggtggccagctactcggacatagggcgtcggctacaggcccggcgcttccgccgcagccgccgcaccggccgcctggtggtgctcatcatcctgaccttcgccgccttctggctgccctaccacgtggtgaacctggctgaggcgggccgcgcgctggccggccaggccgccgggttagggctcgtggggaagcggctgagcctggcccgcaacgtgctcatcgcactcgccttcctgagcagcagcgtgaaccccgtgctgtacgcgtgcgccggcggcggcctgctgcgctcggcgggcgtgggcttcgtcgccaagctgctggagggcacgggctccgaggcgtccagcacgcgccgcgggggcagcctgggccagaccgctaggagcggccccgccgctctggagcccggcccttccgagagcctcactgcctccagccctctcaagttaaacgaactgaactaggcctggtggaaggaggcgcactttcctcctggcagaatgctagctctgagccagttcagtacctggaggaggagcaggggcgtggagggcgtggagggcgtgggagcgtgggaggcgggagtggagtggaagaagagggagaggtggagcaaagtgagggccgagtgagagcgtgctccagcctggctcccacaggcagctttaaccattaaaactgaagtctgaaatttggtcaacacaagtgagtggggtacat

SEQ ID NO: 361087 - DNA, 6990 bp, Homo sapiens
tccatacagggacaatatgtggctctggcctgtagtcgccatggcagccgtgtgctagatgccatctggagtggagcagccttgagggcccggaaggaaattgctgctgagcttggggagcagaaccaggagctgataagagaccctttcggccaccatgtggctcgaaatgtggccttgactaccttcctaaagcggcgagaggcttgggaacagcagcagggtgcggtggccaagcggaggcgggcattgaactccatacttgaagactgaggctttggatctgggactgggtgttgatgggggagggcaaaatggggtatccaccccatccctttcctggtttaaattggagtcagaagtcttagtggtaaatatttgatatttttattggaaatgtttttgttagtttgaggggaagggtatgaagacagatctcaaggtaaagtcagagagggctgtcatcagtatgctggggagtttagggacaggaggcattggtaggggattagatgtagcagcagtcaggctgggatcaagatgcctgggggacatcttgatcttggcctttcagggcaagtgggaggctagaaaggtggctaggaaagaacagcattcttcaggtaagggtatagacttgggatgtgaggcgttatgctgaaaggttctgtcacgaggggatcagaggacagtggggaaattgggtgggttatctagcctgtactgtctgcaggtcctgaaatttgatgctgtcatagtctttgcagtgggtcggttggaatgattctgggggcagaagctcagagccccttagtaggaatggaggcggcccttctgctgccactgctcagccccctccactgcatgacgaagggtggaggaaattcccagcaacatatggcccaggccttgcagcagtgtggaggtccaacgaaggagctccctgaatggcagagacaagaggaaatcagatgatttggaaaacttgggaggaagccatcaagctgggagatgaggactttccacaagcaagagctaactaggggtaggtgggtgcaagaggacgaattatggggactatccaactgtaggggatggggcagtatgacatgttgatttctgacctgagtactttctttgggccaagtccttgaaagtcacaactcatagagtagagcccgtagaatgtggctttgacattcaggctgccaaagaggtctcgagggttttgcttgtacacgtcaaaggtgaatcgggcgatgtccttgctgtgcttgggcctctcccgtcccaggccatatgacagcactccactctgtaggacacccttgtcagtgcagtagatcctcataccagacacccaccactaatctccatcagcactgggtcagaccctccctcgcttggactttctgtccactgtgtgacatccttgacaattccacaactcctcctgcacctggtccccaggatcagggttaagctagagaggaagcccgggaaagctctaaaggacaggcattggaagcagccccagtataggcctcttacccttgtagggctccagctctgaccagactgcaacaccatcaggcacgtgtcatcctccagcagctggaagaagtcctcactgtccactgcagttccatcctcctctagcaccagggttagcactccattcagcagtagggtctccaatgcctgcccaatggcaagaagcaagaagggcaggtcttatcccatgccccttccctctttagctgcccaacatccatcagttggctctagacattggtcgatgtcccactttgactttctggcactttgatacctcctaaaggttgcagctctccgtgttcttcagtttttgggggatcctagctagaggctgacctttttcctctttgctcctaccatgtcattggcatctccccttgctcccctccaagtcacttctggtttggaattggaaagcaagccaggttctcacgaagtccacccttctgtcttatctacaatgctgcacctcacttcccacaccctcaagagttctccagaagtgttttcagtaatagtgtttaacctttttgagtccttactctgtgccaggtatgaggactttacctacattatcctcttactcctttcaacaaccctaggaggtgatgtattattattgcctttttatagttgaagaaactgaggttttggtaggttgaacaacttcccaaggtttgacaggcaggaagtggcagaatcagaatttgaacttgatttgtcacacaaatcacctttccatactagcttctgaattccgtccctcgaactctccctatctcctgctaacccctgctcccatagaaaagctcactaggtggaaaatgaacaaattgaccagagctcattaggcccactccgctgcttttagccctcagagggaggggcagctgtgtgacttcagccctctgctccatcatcacaagttgccactgttgtggagccccttggctacccctgctataggaaccgaggaacttggcctacttactttggctagcagctcctggcgggtggcagctgtcaggcctttccggatggtccgcttgtgatcacagacacggaaaggtcgctggggtggtggagctgaggtccagaccctccgtccaaactccgagcttatattagatactgacctggtagttgagaagaaaagtcaagaaggggcgaggaggggcttggtgagtgtaaagggcatgatgagggtagagtggctagagggctagggagggagagatctaggtttatcgattagggatgagggagagaccatggagtgcaggtgggggcgggtggctcaggagcttgacaagcccactgtggagtggggagcaggagaggaaggggtactggttagtctcctaggggctgagtggagtattgttgccctgcctatatcccctaaaggtggagggtagagcggagggttagcagtcacctgagtaagtcactggggttcagagctgagaggtactccatggtggaccggagagttccttccctggaacttctgggctgggtggttctctcctgtgctggggctttagtggtgttttctgttacaaacctgggatctcagcccaggacaaggtgggaatgagtcaagcctggactctggcccccctgcctggccagtaagaagggcaaagtccaaggggagggatgagggaggggccagatggggtcctggaggaagaattgcctggcaaaagccattggagcttgtatgtgtgtctttggtgatgacatgtgttgtgagggtagatgggaaccatgtaaaaggatgaaatgtgacttctggtgtttttttatttctatggagggactttctggggacggtttctggctctcaggctctgagaagctgcagtttatgagtggctctgtgtgtgctgccacctactggagaagccataagctgcagctttaggaaaagggaacccggggcagagtgtggggaagtgggatggcagcatggcagggctttggaaaatgagaggtgagagtgtgtccaggaagggtgtaaggagaggatggatcctgatacatggattcaggatcattagggtcctgtctgggacactggccttcctgcttacctgctctttccttcctccttggtcggaggaggggctggctcactgctctggcttcattttccagagctgcctgctgcagtcacacttaggtcatcttctctcacttttctccttttgccgattagtggacgtgacagagatgtgaatggggcagggatgtcctttgatggcatcaagactttagcttctggtgcgctgtgtcccagctctgatttcagttgcagccgtgatggacagttgcatggaagctgagactctcactgacagtgaaaccctcaaatgaacacaatccctgctttcctgccaaggatccttgtagggtcccccagcttccccactttttttctgtgtccctctgcaaatgtgataggcacaggacaggagtaggcacctcgcctactgctgcttaacctttcagcttctccaggcccccaatcctgcttgctcccagcttggtaagtagatctgtgcacgtccctttacaccccaccatccagttttgcccagatgtgctagaatggggctggacaaagaaggaggggccagactagaggagtggtggtagagatagtgacagcctggggtgaggactttatgcctgtttaccactgagctctgggaaggaggccaggagtggggcaggtcaactgactgggagcaggggatctgggttccaagaaggagttgtgtttgaggtggggtctgggtcctcgtggaagtcaggactcccaggcagaaaagaggcaggctgcagggaagtaaggaggaggcatggcaccttctcatcgggcatcacaggtggggttttgccccacccctgaacgccctctgtggcgccttccacccacctgtaggcccagaaggatgtcggtctgctaccgtcccccagggaacgagacactgctgagctggaagacttcgcgggccacaggcacagccttcctgctgctggcggcgctgctggggctgcctggcaacggcttcgtggtgtggagcttggcgggctggcggcctgcacgggggcgaccgctggcggccacgcttgtgctgcacctggcgctggccgacggcgcggtgctgctgctcacgccgctctttgtggccttcctgacccggcaggcctggccgctgggccaggcgggctgcaaggcggtgtactacgtgtgcgcgctcagcatgtacgccagcgtgctgctcaccggcctgctcagcctgcagcgctgcctcgcagtcacccgccccttcctggcgcctcggctgcgcagcccggccctggcccgccgcctgctgctggcggtctggctggccgccctgttgctcgccgtcccggccgccgtctaccgccacctgtggagggaccgcgtatgccagctgtgccacccgtcgccggtccacgccgccgcccacctgagcctggagactctgaccgctttcgtgcttcctttcgggctgatgctcggctgctacagcgtgacgctggcacggctgcggggcgcccgctggggctccgggcggcacggggcgcgggtgggccggctggtgagcgccatcgtgcttgccttcggcttgctctgggccccctaccacgcagtcaaccttctgcaggcggtcgcagcgctggctccaccggaaggggccttggcgaagctgggcggagccggccaggcggcgcgagcgggaactacggccttggccttcttcagttctagcgtcaacccggtgctctacgtcttcaccgctggagatctgctgccccgggcaggtccccgtttcctcacgcggctcttcgaaggctctggggaggcccgagggggcggccgctctagggaagggaccatggagctccgaactacccctcagctgaaagtggtggggcagggccgcggcaatggagacccggggggtgggatggagaaggacggtccggaatgggacctttgacagcagaccctacaacctgctgcccttccctgtccctttccaccccccacccaccctccagaggtcctcccgacggccatgaacactacatcttctgcagcacccccctcactaggtgtagagttcatctctctgctggctatcatcctgctgtcagtggcgctggctgtggggcttcccggcaacagctttgtggtgtggagtatcctgaaaaggatgcagaagcgctctgtcactgccctgatggtgctgaacctggccctggccgacctggccgtattgctcactgctccctttttccttcacttcctggcccaaggcacctggagttttggactggctggttgccgcctgtgtcactatgtctgcggagtcagcatgtacgccagcgtcctgcttatcacggccatgagtctagaccgctcactggcggtggcccgcccctttgtgtcccagaagctacgcaccaaggcgatggcccggcgggtgctggcaggcatctgggtgttgtcctttctgctggccacacccgtcctcgcgtaccgcacagtagtgccctggaaaacgaacatgagcctgtgcttcccgcggtaccccagcgaagggcaccgggccttccatctaatcttcgaggctgtcacgggcttcctgctgcccttcctggctgtggtggccagctactcggacatagggcgtcggctacaggcccggcgcttccgccgcagccgccgcaccggccgcctggtggtgctcatcatcctgaccttcgccgccttctggctgccctaccacgtggtgaacctggctgaggcgggccgcgcgctggccggccaggccgccgggttagggctcgtggggaagcggctgagcctggcccgcaacgtgctcatcgcactcgccttcctgagcagcagcgtgaaccccgtgctgtacgcgtgcgccggcggcggcctgctgcgctcggcgggcgtgggcttcgtcgccaagctgctggagggcacgggctccgaggcgtccagcacgcgccgcgggggcagcctgggccagaccgctaggagcggccccgccgctctggagcccggcccttccgagagcctcactgcctccagccctctcaagttaaacgaactgaactaggcctggtggaaggaggcgcactttcctcctggcagaatgctagctctgagccagttcagtacctggaggaggagcaggggcgtggagggcgtggagggcgtgggagcgtgggaggcgggagtggagtggaagaagagggagaggtggagcaaagtgagggccgagtgagagcgtgctccagcctggctcccacaggcagctttaaccattaaaactgaagtctgaaatttggtcaacacaagtgagtggggtacat

SEQ ID NO: 361088 - DNA, 6747 bp, Homo sapiens
tccatacagggacaatatgtggctctggcctgtagtcgccatggcagccgtgtgctagatgccatctggagtggagcagccttgagggcccggaaggaaattgctgctgagcttggggagcagaaccaggagctgataagagaccctttcggccaccatgtggctcgaaatgtggccttgactaccttcctaaagcggcgagaggcttgggaacagcagcagggtgcggtggccaagcggaggcgggcattgaactccatacttgaagactgaggctttggatctgggactgggtgttgatgggggagggcaaaatggggtatccaccccatccctttcctggtttaaattggagtcagaagtcttagtggtaaatatttgatatttttattggaaatgtttttgttagtttgaggggaagggtatgaagacagatctcaaggtaaagtcagagagggctgtcatcagtatgctggggagtttagggacaggaggcattggtaggggattagatgtagcagcagtcaggctgggatcaagatgcctgggggacatcttgatcttggcctttcagggcaagtgggaggctagaaaggtggctaggaaagaacagcattcttcaggtaagggtatagacttgggatgtgaggcgttatgctgaaaggttctgtcacgaggggatcagaggacagtggggaaattgggtgggttatctagcctgtactgtctgcaggtcctgaaatttgatgctgtcatagtctttgcagtgggtcggttggaatgattctgggggcagaagctcagagccccttagtaggaatggaggcggcccttctgctgccactgctcagccccctccactgcatgacgaagggtggaggaaattcccagcaacatatggcccaggccttgcagcagtgtggaggtccaacgaaggagctccctgagtactttctttgggccaagtccttgaaagtcacaactcatagagtagagcccgtagaatgtggctttgacattcaggctgccaaagaggtctcgagggttttgcttgtacacgtcaaaggtgaatcgggcgatgtccttgctgtgcttgggcctctcccgtcccaggccatatgacagcactccactccttgtagggctccagctctgaccagactgcaacaccatcaggcacgtgtcatcctccagcagctggaagaagtcctcactgtccactgcagttccatcctcctctagcaccagggttagcactccattcagcagtagggtctccaatgcctttggctagcagctcctggcgggtggcagctgtcaggcctttccggatggtccgcttgtgatcacagacacggaaaggtcgctggggtggtggagctgaggtccagaccctccgtccaaactccgagcttatattagatactgacctgagtaagtcactggggttcagagctgagaggtactccatggtggaccggagagttccttccctggaacttctgggctgggtggttctctcctgtgctggggctttagtggtgttttctgttacaaacctgggatctcagcccaggacaaggtgggaatgagtcaagcctggactctggcccccctgcctggccagtaagaagggcaaagtccaaggggagggatgagggaggggccagatggggtcctggaggaagaattgcctggcaaaagccattggagcttgtatgtgtgtctttggtgatgacatgtgttgtgagggtagatgggaaccatgtaaaaggatgaaatgtgacttctggtgtttttttatttctatggagggactttctggggacggtttctggctctcaggctctgagaagctgcagtttatgagtggctctgtgtgtgctgccacctactggagaagccataagctgcagctttaggaaaagggaacccggggcagagtgtggggaagtgggatggcagcatggcagggctttggaaaatgagaggtgagagtgtgtccaggaagggtgtaaggagaggatggatcctgatacatggattcaggatcattagggtcctgtctgggacactggccttcctgcttacctgctctttccttcctccttggtcggaggaggggctggctcactgctctggcttcattttccagagctgcctgctgcagtcacacttaggtcatcttctctcacttttctccttttgccgattagtggacgtgacagagatgtgaatggggcagggatgtcctttgatggcatcaagactttagcttctggtgcgctgtgtcccagctctgatttcagttgcagccgtgatggacagttgcatggaagctgagactctcactgacagtgaaaccctcaaatgaacacaatccctgctttcctgccaaggatccttgtagggtcccccagcttccccactttttttctgtgtcctgacaaagaaacacagagtaacttgattgccctgtgacctggccagttgcatttcccctgcaggcttgagcccaagccagagccttgaaaaggtattcaggttgttgcccaaaacactgaaaaaaactggccctggccctgaaccaaataccttgaaccctcgtaaactccataccctgacccccttgttttggatatacccaggtagaacaactctctctcactgtctgttgtgaggatacgctgtagcccactcattaagtacattctcctaataaatgctttggactgatcaccctgccagtcttttgtcttgggcaatctatacttttctcagaggttcccaaggcctactgaagggacttaacatactcttaatggctttcctctctcttgttttaccttatgccctcacttcctgagttaacctcccaaatacaggatcacctgtacccaagcccttagctcaagaatacaggatcacctgtacccaagcccttagctcaagctctgctttggaagaacccaaactaagacagtgctcctggtgccctccccaagcaacctcaagttctggctgttacttgagcagaggcctttcttttcccttcccccagctctatccatctgccaggcccccctcaaatctcttcatttccaagttttgcttgacttttccaagaggagagggctgcttcttagtatgtccctactcatcctttcctttcttgtcttgtatcctggtgcagcctggtaatggggcctcttcatggttgtgtgtcatgactccctaaccattatgcctccatgcatcccctgttcctcctggaacctagcaccatgccttacatggaaaagctgtcattgacagcccggtgagagccctgagggtggagtgactggggcagggcctgaggcaagaggtgggaggaggtaggaggccaggggctcagccggaccaggagactggaaacaggcaaggataaggcaggtgggggactgagttgtttgggtcacctctgcaggccagagagaccaggcaacatacacactgcagaaggtgggctgggaggattggggccagagctgggggagggatgagaacagaagcaggaccaggattcagcagagtcctcctatttccttccaccaccagggaatcttactgccccacttcagcttgtgctgtttcctggcaaggcaggctctcacatgcctggacgcctgggtgcgttggtgatgggaaggagcagggtgagggaggggccccaggagaggcccaggatgagcctcatcttgtccctccccattcttgtcttaccctctgcaaatgtgataggcacaggacaggagtaggcacctcgcctactgctgcttaacctttcagcttctccaggcccccaatcctgcttgctcccagcttggtaagtagatctgtgcacgtccctttacaccccaccatccagttttgcccagatgtgctagaatggggctggacaaagaaggaggggccagactagaggagtggtggtagagatagtgacagcctggggtgaggactttatgcctgtttaccactgagctctgggaaggaggccaggagtggggcaggtcaactgactgggagcaggggatctgggttccaagaaggagttgtgtttgaggtggggtctgggtcctcgtggaagtcaggactcccaggcagaaaagaggcaggctgcagggaagtaaggaggaggcatggcaccttctcatcgggcatcacaggtggggttttgccccacccctgaacgccctctgtggcgccttccacccacctgtaggcccagaaggatgtcggtctgctaccgtcccccagggaacgagacactgctgagctggaagacttcgcgggccacaggcacagccttcctgctgctggcggcgctgctggggctgcctggcaacggcttcgtggtgtggagcttggcgggctggcggcctgcacgggggcgaccgctggcggccacgcttgtgctgcacctggcgctggccgacggcgcggtgctgctgctcacgccgctctttgtggccttcctgacccggcaggcctggccgctgggccaggcgggctgcaaggcggtgtactacgtgtgcgcgctcagcatgtacgccagcgtgctgctcaccggcctgctcagcctgcagcgctgcctcgcagtcacccgccccttcctggcgcctcggctgcgcagcccggccctggcccgccgcctgctgctggcggtctggctggccgccctgttgctcgccgtcccggccgccgtctaccgccacctgtggagggaccgcgtatgccagctgtgccacccgtcgccggtccacgccgccgcccacctgagcctggagactctgaccgctttcgtgcttcctttcgggctgatgctcggctgctacagcgtgacgctggcacggctgcggggcgcccgctggggctccgggcggcacggggcgcgggtgggccggctggtgagcgccatcgtgcttgccttcggcttgctctgggccccctaccacgcagtcaaccttctgcaggcggtcgcagcgctggctccaccggaaggggccttggcgaagctgggcggagccggccaggcggcgcgagcgggaactacggccttggccttcttcagttctagcgtcaacccggtgctctacgtcttcaccgctggagatctgctgccccgggcaggtccccgtttcctcacgcggctcttcgaaggctctggggaggcccgagggggcggccgctctagggaagggaccatggagctccgaactacccctcagctgaaagtggtggggcagggccgcggcaatggagacccggggggtgggatggagaaggacggtccggaatgggacctttgacagcagaccctacaacctgctgcccttccctgtccctttccaccccccacccaccctccagaggtcctcccgacggccatgaacactacatcttctgcagcacccccctcactaggtgtagagttcatctctctgctggctatcatcctgctgtcagtggcgctggctgtggggcttcccggcaacagctttgtggtgtggagtatcctgaaaaggatgcagaagcgctctgtcactgccctgatggtgctgaacctggccctggccgacctggccgtattgctcactgctccctttttccttcacttcctggcccaaggcacctggagttttggactggctggttgccgcctgtgtcactatgtctgcggagtcagcatgtacgccagcgtcctgcttatcacggccatgagtctagaccgctcactggcggtggcccgcccctttgtgtcccagaagctacgcaccaaggcgatggcccggcgggtgctggcaggcatctgggtgttgtcctttctgctggccacacccgtcctcgcgtaccgcacagtagtgccctggaaaacgaacatgagcctgtgcttcccgcggtaccccagcgaagggcaccgggccttccatctaatcttcgaggctgtcacgggcttcctgctgcccttcctggctgtggtggccagctactcggacatagggcgtcggctacaggcccggcgcttccgccgcagccgccgcaccggccgcctggtggtgctcatcatcctgaccttcgccgccttctggctgccctaccacgtggtgaacctggctgaggcgggccgcgcgctggccggccaggccgccgggttagggctcgtggggaagcggctgagcctggcccgcaacgtgctcatcgcactcgccttcctgagcagcagcgtgaaccccgtgctgtacgcgtgcgccggcggcggcctgctgcgctcggcgggcgtgggcttcgtcgccaagctgctggagggcacgggctccgaggcgtccagcacgcgccgcgggggcagcctgggccagaccgctaggagcggccccgccgctctggagcccggcccttccgagagcctcactgcctccagccctctcaagttaaacgaactgaactaggcctggtggaaggaggcgcactttcctcctggcagaatgctagctctgagccagttcagtacctggaggaggagcaggggcgtggagggcgtggagggcgtgggagcgtgggaggcgggagtggagtggaagaagagggagaggtggagcaaagtgagggccgagtgagagcgtgctccagcctggctcccacaggcagctttaaccattaaaactgaagtctgaaatttggtcaacacaagtgagtggggtacat

SEQ ID NO: 361089 - DNA, 7613 bp, Homo sapiens
tccatacagggacaatatgtggctctggcctgtagtcgccatggcagccgtgtgctagatgccatctggagtggagcagccttgagggcccggaaggaaattgctgctgagcttggggagcagaaccaggagctgataagagaccctttcggccaccatgtggctcgaaatgtggccttgactaccttcctaaagcggcgagaggcttgggaacagcagcagggtgcggtggccaagcggaggcgggcattgaactccatacttgaagactgaggctttggatctgggactgggtgttgatgggggagggcaaaatggggtatccaccccatccctttcctggtttaaattggagtcagaagtcttagtggtaaatatttgatatttttattggaaatgtttttgttagtttgaggggaagggtatgaagacagatctcaaggtaaagtcagagagggctgtcatcagtatgctggggagtttagggacaggaggcattggtaggggattagatgtagcagcagtcaggctgggatcaagatgcctgggggacatcttgatcttggcctttcagggcaagtgggaggctagaaaggtggctaggaaagaacagcattcttcaggtaagggtatagacttgggatgtgaggcgttaatgctgtcatagtctttgcagtgggtcggttggaatgattctgggggcagaagctcagagccccttagtaggaatggaggcggcccttctgctgccactgctcagccccctccactgcatgacgaagggtggaggaaattcccagcaacatatggcccaggccttgcagcagtgtggaggtccaacgaaggagctccccttgtagggctccagctctgaccagactgcaacaccatcaggcacgtgtcatcctccagcagctggaagaagtcctcactgtccactgcagttccatcctcctctagcaccagggttagcactccattcagcagtagggtctccaatgcctgcccaatggcaagaagcaagaagggcaggtcttatcccatgccccttccctctttagctgcccaacatccatcagttggctctagacattggtcgatgtcccactttgactttctggcactttgatacctcctaaaggttgcagctctccgtgttcttcagtttttgggggatcctagctagaggctgacctttttcctctttgctcctaccatgtcattggcatctccccttgctcccctccaagtcacttctggtttggaattggaaagcaagccaggttctcacgaagtccacccttctgtcttatctacaatgctgcacctcacttcccacaccctcaagagttctccagaagtgttttcagtaatagtgtttaacctttttgagtccttactctgtgccaggtatgaggactttacctacattatcctcttactcctttcaacaaccctaggaggtgatgtattattattgcctttttatagttgaagaaactgaggttttggtaggttgaacaacttcccaaggtttgacaggcaggaagtggcagaatcagaatttgaacttgatttgtcacacaaatcacctttccatactagcttctgaattccgtccctcgaactctccctatctcctgctaacccctgctcccatagaaaagctcactaggtggaaaatgaacaaattgaccagagctcattaggcccactccgctgcttttagccctcagagggaggggcagctgtgtgacttcagccctctgctccatcatcacaagttgccactgttgtggagccccttggctacccctgctataggaaccgaggaacttggcctacttactttggctagcagctcctggcgggtggcagctgtcaggcctttccggatggtccgcttgtgatcacagacacggaaaggtcgctggggtggtggagctgaggtccagaccctccgtccaaactccgagcttatattagatactgacctggtagttgagaagaaaagtcaagaaggggcgaggaggggcttggtgagtgtaaagggcatgatgagggtagagtggctagagggctagggagggagagatctaggtttatcgattagggatgagggagagaccatggagtgcaggtgggggcgggtggctcaggagcttgacaagcccactgtggagtggggagcaggagaggaaggggtactggttagtctcctaggggctgagtggagtattgttgccctgcctatatcccctaaaggtggagggtagagcggagggttagcagtcacctgagtaagtcactggggttcagagctgagaggtactccatggtggaccggagagttccttccctggaacttctgggctgggtggttctctcctgtgctggggctttagtggtgttttctgttacaaacctgggatctcagcccaggacaaggtgggaatgagtcaagcctggactctggcccccctgcctggccagtaagaagggcaaagtccaaggggagggatgagggaggggccagatggggtcctggaggaagaattgcctggcaaaagccattggagcttgtatgtgtgtctttggtgatgacatgtgttgtgagggtagatgggaaccatgtaaaaggatgaaatgtgacttctggtgtttttttatttctatggagggactttctggggacggtttctggctctcaggctctgagaagctgcagtttatgagtggctctgtgtgtgctgccacctactggagaagccataagctgcagctttaggaaaagggaacccggggcagagtgtggggaagtgggatggcagcatggcagggctttggaaaatgagaggtgagagtgtgtccaggaagggtgtaaggagaggatggatcctgatacatggattcaggatcattagggtcctgtctgggacactggccttcctgcttacctgctctttccttcctccttggtcggaggaggggctggctcactgctctggcttcattttccagagctgcctgctgcagtcacacttaggtcatcttctctcacttttctccttttgccgattagtggacgtgacagagatgtgaatggggcagggatgtcctttgatggcatcaagactttagcttctggtgcgctgtgtcccagctctgatttcagttgcagccgtgatggacagttgcatggaagctgagactctcactgacagtgaaaccctcaaatgaacacaatccctgctttcctgccaaggatccttgtagggtcccccagcttccccactttttttctgtgtcctgacaaagaaacacagagtaacttgattgccctgtgacctggccagttgcatttcccctgcaggcttgagcccaagccagagccttgaaaaggtattcaggttgttgcccaaaacactgaaaaaaactggccctggccctgaaccaaataccttgaaccctcgtaaactccataccctgacccccttgttttggatatacccaggtagaacaactctctctcactgtctgttgtgaggatacgctgtagcccactcattaagtacattctcctaataaatgctttggactgatcaccctgccagtcttttgtcttgggcaatctatacttttctcagaggttcccaaggcctactgaagggacttaacatactcttaatggctttcctctctcttgttttaccttatgccctcacttcctgagttaacctcccaaatacaggatcacctgtacccaagcccttagctcaagaatacaggatcacctgtacccaagcccttagctcaagctctgctttggaagaacccaaactaagacagtgctcctggtgccctccccaagcaacctcaagttctggctgttacttgagcagaggcctttcttttcccttcccccagctctatccatctgccaggcccccctcaaatctcttcatttccaagttttgcttgacttttccaagaggagagggctgcttcttagtatgtccctactcatcctttcctttcttgtcttgtatcctggtgcagcctggtaatggggcctcttcatggttgtgtgtcatgactccctaaccattatgcctccatgcatcccctgttcctcctggaacctagcaccatgccttacatggaaaagctgtcattgacagcccggtgagagccctgagggtggagtgactggggcagggcctgaggcaagaggtgggaggaggtaggaggccaggggctcagccggaccaggagactggaaacaggcaaggataaggcaggtgggggactgagttgtttgggtcacctctgcaggccagagagaccaggcaacatacacactgcagaaggtgggctgggaggattggggccagagctgggggagggatgagaacagaagcaggaccaggattcagcagagtcctcctatttccttccaccaccagggaatcttactgccccacttcagcttgtgctgtttcctggcaaggcaggctctcacatgcctggacgcctgggtgcgttggtgatgggaaggagcagggtgagggaggggccccaggagaggcccaggatgagcctcatcttgtccctccccattcttgtcttaccctctgcaaatgtgataggcacaggacaggagtaggcacctcgcctactgctgcttaacctttcagcttctccaggcccccaatcctgcttgctcccagcttggtaagtagatctgtgcacgtccctttacaccccaccatccagttttgcccagatgtgctagaatggggctggacaaagaaggaggggccagactagaggagtggtggtagagatagtgacagcctggggtgaggactttatgcctgtttaccactgagctctgggaaggaggccaggagtggggcaggtcaactgactgggagcaggggatctgggttccaagaaggagttgtgtttgaggtggggtctgggtcctcgtggaagtcaggactcccaggcagaaaagaggcaggctgcagggaagtaaggaggaggcatggcaccttctcatcgggcatcacaggtggggttttgccccacccctgaacgccctctgtggcgccttccacccacctgtaggcccagaaggatgtcggtctgctaccgtcccccagggaacgagacactgctgagctggaagacttcgcgggccacaggcacagccttcctgctgctggcggcgctgctggggctgcctggcaacggcttcgtggtgtggagcttggcgggctggcggcctgcacgggggcgaccgctggcggccacgcttgtgctgcacctggcgctggccgacggcgcggtgctgctgctcacgccgctctttgtggccttcctgacccggcaggcctggccgctgggccaggcgggctgcaaggcggtgtactacgtgtgcgcgctcagcatgtacgccagcgtgctgctcaccggcctgctcagcctgcagcgctgcctcgcagtcacccgccccttcctggcgcctcggctgcgcagcccggccctggcccgccgcctgctgctggcggtctggctggccgccctgttgctcgccgtcccggccgccgtctaccgccacctgtggagggaccgcgtatgccagctgtgccacccgtcgccggtccacgccgccgcccacctgagcctggagactctgaccgctttcgtgcttcctttcgggctgatgctcggctgctacagcgtgacgctggcacggctgcggggcgcccgctggggctccgggcggcacggggcgcgggtgggccggctggtgagcgccatcgtgcttgccttcggcttgctctgggccccctaccacgcagtcaaccttctgcaggcggtcgcagcgctggctccaccggaaggggccttggcgaagctgggcggagccggccaggcggcgcgagcgggaactacggccttggccttcttcagttctagcgtcaacccggtgctctacgtcttcaccgctggagatctgctgccccgggcaggtccccgtttcctcacgcggctcttcgaaggctctggggaggcccgagggggcggccgctctagggaagggaccatggagctccgaactacccctcagctgaaagtggtggggcagggccgcggcaatggagacccggggggtgggatggagaaggacggtccggaatgggacctttgacagcagaccctacaacctgctgcccttccctgtccctttccaccccccacccaccctccagaggtcctcccgacggccatgaacactacatcttctgcagcacccccctcactaggtgtagagttcatctctctgctggctatcatcctgctgtcagtggcgctggctgtggggcttcccggcaacagctttgtggtgtggagtatcctgaaaaggatgcagaagcgctctgtcactgccctgatggtgctgaacctggccctggccgacctggccgtattgctcactgctccctttttccttcacttcctggcccaaggcacctggagttttggactggctggttgccgcctgtgtcactatgtctgcggagtcagcatgtacgccagcgtcctgcttatcacggccatgagtctagaccgctcactggcggtggcccgcccctttgtgtcccagaagctacgcaccaaggcgatggcccggcgggtgctggcaggcatctgggtgttgtcctttctgctggccacacccgtcctcgcgtaccgcacagtagtgccctggaaaacgaacatgagcctgtgcttcccgcggtaccccagcgaagggcaccgggccttccatctaatcttcgaggctgtcacgggcttcctgctgcccttcctggctgtggtggccagctactcggacatagggcgtcggctacaggcccggcgcttccgccgcagccgccgcaccggccgcctggtggtgctcatcatcctgaccttcgccgccttctggctgccctaccacgtggtgaacctggctgaggcgggccgcgcgctggccggccaggccgccgggttagggctcgtggggaagcggctgagcctggcccgcaacgtgctcatcgcactcgccttcctgagcagcagcgtgaaccccgtgctgtacgcgtgcgccggcggcggcctgctgcgctcggcgggcgtgggcttcgtcgccaagctgctggagggcacgggctccgaggcgtccagcacgcgccgcgggggcagcctgggccagaccgctaggagcggccccgccgctctggagcccggcccttccgagagcctcactgcctccagccctctcaagttaaacgaactgaactaggcctggtggaaggaggcgcactttcctcctggcagaatgctagctctgagccagttcagtacctggaggaggagcaggggcgtggagggcgtggagggcgtgggagcgtgggaggcgggagtggagtggaagaagagggagaggtggagcaaagtgagggccgagtgagagcgtgctccagcctggctcccacaggcagctttaaccattaaaactgaagtctgaaatttggtcaacacaagtgagtggggtacat

SEQ ID NO: 361090 - DNA, 5934 bp, Homo sapiens
aacttacggctaggtcgaggctgggtgtaggcccactccgctgcttttagccctcagagggaggggcagctgtgtgacttcagccctctgctccatcatcacaagttgccactgttgtggagccccttggctacccctgctataggaaccgaggaacttggcctacttactttggctagcagctcctggcgggtggcagctgtcaggcctttccggatggtccgcttgtgatcacagacacggaaaggtcgctggggtggtggagctgaggtccagaccctccgtccaaactccgagcttatattagatactgacctggtagttgagaagaaaagtcaagaaggggcgaggaggggcttggtgagtgtaaagggcatgatgagggtagagtggctagagggctagggagggagagatctaggtttatcgattagggatgagggagagaccatggagtgcaggtgggggcgggtggctcaggagcttgacaagcccactgtggagtggggagcaggagaggaaggggtactggttagtctcctaggggctgagtggagtattgttgccctgcctatatcccctaaaggtggagggtagagcggagggttagcagtcacctgagtaagtcactggggttcagagctgagaggtactccatggtggaccggagagttccttccctggaacttctgggctgggtggttctctcctgtgctggggctttagtggtgttttctgttacaaacctgggatctcagcccaggacaaggtgggaatgagtcaagcctggactctggcccccctgcctggccagtaagaagggcaaagtccaaggggagggatgagggaggggccagatggggtcctggaggaagaattgcctggcaaaagccattggagcttgtatgtgtgtctttggtgatgacatgtgttgtgagggtagatgggaaccatgtaaaaggatgaaatgtgacttctggtgtttttttatttctatggagggactttctggggacggtttctggctctcaggctctgagaagctgcagtttatgagtggctctgtgtgtgctgccacctactggagaagccataagctgcagctttaggaaaagggaacccggggcagagtgtggggaagtgggatggcagcatggcagggctttggaaaatgagaggtgagagtgtgtccaggaagggtgtaaggagaggatggatcctgatacatggattcaggatcattagggtcctgtctgggacactggccttcctgcttacctgctctttccttcctccttggtcggaggaggggctggctcactgctctggcttcattttccagagctgcctgctgcagtcacacttaggtcatcttctctcacttttctccttttgccgattagtggacgtgacagagatgtgaatggggcagggatgtcctttgatggcatcaagactttagcttctggtgcgctgtgtcccagctctgatttcagttgcagccgtgatggacagttgcatggaagctgagactctcactgacagtgaaaccctcaaatgaacacaatccctgctttcctgccaaggatccttgtagggtcccccagcttccccactttttttctgtgtcctgacaaagaaacacagagtaacttgattgccctgtgacctggccagttgcatttcccctgcaggcttgagcccaagccagagccttgaaaaggtattcaggttgttgcccaaaacactgaaaaaaactggccctggccctgaaccaaataccttgaaccctcgtaaactccataccctgacccccttgttttggatatacccaggtagaacaactctctctcactgtctgttgtgaggatacgctgtagcccactcattaagtacattctcctaataaatgctttggactgatcaccctgccagtcttttgtcttgggcaatctatacttttctcagaggttcccaaggcctactgaagggacttaacatactcttaatggctttcctctctcttgttttaccttatgccctcacttcctgagttaacctcccaaatacaggatcacctgtacccaagcccttagctcaagaatacaggatcacctgtacccaagcccttagctcaagctctgctttggaagaacccaaactaagacagtgctcctggtgccctccccaagcaacctcaagttctggctgttacttgagcagaggcctttcttttcccttcccccagctctatccatctgccaggcccccctcaaatctcttcatttccaagttttgcttgacttttccaagaggagagggctgcttcttagtatgtccctactcatcctttcctttcttgtcttgtatcctggtgcagcctggtaatggggcctcttcatggttgtgtgtcatgactccctaaccattatgcctccatgcatcccctgttcctcctggaacctagcaccatgccttacatggaaaagctgtcattgacagcccggtgagagccctgagggtggagtgactggggcagggcctgaggcaagaggtgggaggaggtaggaggccaggggctcagccggaccaggagactggaaacaggcaaggataaggcaggtgggggactgagttgtttgggtcacctctgcaggccagagagaccaggcaacatacacactgcagaaggtgggctgggaggattggggccagagctgggggagggatgagaacagaagcaggaccaggattcagcagagtcctcctatttccttccaccaccagggaatcttactgccccacttcagcttgtgctgtttcctggcaaggcaggctctcacatgcctggacgcctgggtgcgttggtgatgggaaggagcagggtgagggaggggccccaggagaggcccaggatgagcctcatcttgtccctccccattcttgtcttaccctctgcaaatgtgataggcacaggacaggagtaggcacctcgcctactgctgcttaacctttcagcttctccaggcccccaatcctgcttgctcccagcttggtaagtagatctgtgcacgtccctttacaccccaccatccagttttgcccagatgtgctagaatggggctggacaaagaaggaggggccagactagaggagtggtggtagagatagtgacagcctggggtgaggactttatgcctgtttaccactgagctctgggaaggaggccaggagtggggcaggtcaactgactgggagcaggggatctgggttccaagaaggagttgtgtttgaggtggggtctgggtcctcgtggaagtcaggactcccaggcagaaaagaggcaggctgcagggaagtaaggaggaggcatggcaccttctcatcgggcatcacaggtggggttttgccccacccctgaacgccctctgtggcgccttccacccacctgtaggcccagaaggatgtcggtctgctaccgtcccccagggaacgagacactgctgagctggaagacttcgcgggccacaggcacagccttcctgctgctggcggcgctgctggggctgcctggcaacggcttcgtggtgtggagcttggcgggctggcggcctgcacgggggcgaccgctggcggccacgcttgtgctgcacctggcgctggccgacggcgcggtgctgctgctcacgccgctctttgtggccttcctgacccggcaggcctggccgctgggccaggcgggctgcaaggcggtgtactacgtgtgcgcgctcagcatgtacgccagcgtgctgctcaccggcctgctcagcctgcagcgctgcctcgcagtcacccgccccttcctggcgcctcggctgcgcagcccggccctggcccgccgcctgctgctggcggtctggctggccgccctgttgctcgccgtcccggccgccgtctaccgccacctgtggagggaccgcgtatgccagctgtgccacccgtcgccggtccacgccgccgcccacctgagcctggagactctgaccgctttcgtgcttcctttcgggctgatgctcggctgctacagcgtgacgctggcacggctgcggggcgcccgctggggctccgggcggcacggggcgcgggtgggccggctggtgagcgccatcgtgcttgccttcggcttgctctgggccccctaccacgcagtcaaccttctgcaggcggtcgcagcgctggctccaccggaaggggccttggcgaagctgggcggagccggccaggcggcgcgagcgggaactacggccttggccttcttcagttctagcgtcaacccggtgctctacgtcttcaccgctggagatctgctgccccgggcaggtccccgtttcctcacgcggctcttcgaaggctctggggaggcccgagggggcggccgctctagggaagggaccatggagctccgaactacccctcagctgaaagtggtggggcagggccgcggcaatggagacccggggggtgggatggagaaggacggtccggaatgggacctttgacagcagaccctacaacctgctgcccttccctgtccctttccaccccccacccaccctccagaggtcctcccgacggccatgaacactacatcttctgcagcacccccctcactaggtgtagagttcatctctctgctggctatcatcctgctgtcagtggcgctggctgtggggcttcccggcaacagctttgtggtgtggagtatcctgaaaaggatgcagaagcgctctgtcactgccctgatggtgctgaacctggccctggccgacctggccgtattgctcactgctccctttttccttcacttcctggcccaaggcacctggagttttggactggctggttgccgcctgtgtcactatgtctgcggagtcagcatgtacgccagcgtcctgcttatcacggccatgagtctagaccgctcactggcggtggcccgcccctttgtgtcccagaagctacgcaccaaggcgatggcccggcgggtgctggcaggcatctgggtgttgtcctttctgctggccacacccgtcctcgcgtaccgcacagtagtgccctggaaaacgaacatgagcctgtgcttcccgcggtaccccagcgaagggcaccgggccttccatctaatcttcgaggctgtcacgggcttcctgctgcccttcctggctgtggtggccagctactcggacatagggcgtcggctacaggcccggcgcttccgccgcagccgccgcaccggccgcctggtggtgctcatcatcctgaccttcgccgccttctggctgccctaccacgtggtgaacctggctgaggcgggccgcgcgctggccggccaggccgccgggttagggctcgtggggaagcggctgagcctggcccgcaacgtgctcatcgcactcgccttcctgagcagcagcgtgaaccccgtgctgtacgcgtgcgccggcggcggcctgctgcgctcggcgggcgtgggcttcgtcgccaagctgctggagggcacgggctccgaggcgtccagcacgcgccgcgggggcagcctgggccagaccgctaggagcggccccgccgctctggagcccggcccttccgagagcctcactgcctccagccctctcaagttaaacgaactgaactaggcctggtggaaggaggcgcactttcctcctggcagaatgctagctctgagccagttcagtacctggaggaggagcaggggcgtggagggcgtggagggcgtgggagcgtgggaggcgggagtggagtggaagaagagggagaggtggagcaaagtgagggccgagtgagagcgtgctccagcctggctcccacaggcagctttaaccattaaaactgaagtctgaaatttggtcaacacaagtgagtggggtacat

SEQ ID NO: 361091 - DNA, 4371 bp, Homo sapiens
tccatacagggacaatatgtggctctggcctgtagtcgccatggcagccgtgtgctagatgccatctggagtggagcagccttgagggcccggaaggaaattgctgctgagcttggggagcagaaccaggagctgataagagaccctttcggccaccatgtggctcgaaatgtggccttgactaccttcctaaagcggcgagaggcttgggaacagcagcagggtgcggtggccaagcggaggcgggcattgaactccatacttgaagactgaggctttggatctgggactgggtgttgatgggggagggcaaaatggggtatccaccccatccctttcctggtttaaattggagtcagaagtcttagtggtaaatatttgatatttttattggaaatgtttttgttagtttgaggggaagggtatgaagacagatctcaaggtaaagtcagagagggctgtcatcagtatgctggggagtttagggacaggaggcattggtaggggattagatgtagcagcagtcaggctgggatcaagatgcctgggggacatcttgatcttggcctttcagggcaagtgggaggctagaaaggtggctaggaaagaacagcattcttcaggtaagggtatagacttgggatgtgaggcgttatgctgaaaggttctgtcacgaggggatcagaggacagtggggaaattgggtgggttatctagcctgtactgtctgcaggtcctgaaatttgatgctgtcatagtctttgcagtgggtcggttggaatgattctgggggcagaagctcagagccccttagtaggaatggaggcggcccttctgctgccactgctcagccccctccactgcatgacgaagggtggaggaaattcccagcaacatatggcccaggccttgcagcagtgtggaggtccaacgaaggagctccctgagtactttctttgggccaagtccttgaaagtcacaactcatagagtagagcccgtagaatgtggctttgacattcaggctgccaaagaggtctcgagggttttgcttgtacacgtcaaaggtgaatcgggcgatgtccttgctgtgcttgggcctctcccgtcccaggccatatgacagcactccactccttgtagggctccagctctgaccagactgcaacaccatcaggcacgtgtcatcctccagcagctggaagaagtcctcactgtccactgcagttccatcctcctctagcaccagggttagcactccattcagcagtagggtctccaatgcctttggctagcagctcctggcgggtggcagctgtcaggcctttccggatggtccgcttgtgatcacagacacggaaaggtcgctggggtggtggagctgaggtccagaccctccgtccaaactccgagcttatattagatactgacctgagtaagtcactggggttcagagctgagaggtactccatggtggaccggagagttccttccctggaacttctgggctgggtggttctctcctgtgctggggctgctctttccttcctccttggtcggaggaggggctggctcactgctctggcttcattttccagagctgcctgctgcagtcacacttaggtcatcttctctcacttttctccttttgccgattagtggacgtgacagagatgtgaatggggcagggatgtcctttgatggcatcaagactttagcttctggtgcgctgtgtcccagctctgatttcagttgcagccgtgatggacagttgcatggaagctgagactctcactgacagtgaaaccctcaaatgaacacaatccctgctttcctgccaaggatccttgtagggtcccccagcttccccactttttttctgtgtcctgtaggcccagaaggatgtcggtctgctaccgtcccccagggaacgagacactgctgagctggaagacttcgcgggccacaggcacagccttcctgctgctggcggcgctgctggggctgcctggcaacggcttcgtggtgtggagcttggcgggctggcggcctgcacgggggcgaccgctggcggccacgcttgtgctgcacctggcgctggccgacggcgcggtgctgctgctcacgccgctctttgtggccttcctgacccggcaggcctggccgctgggccaggcgggctgcaaggcggtgtactacgtgtgcgcgctcagcatgtacgccagcgtgctgctcaccggcctgctcagcctgcagcgctgcctcgcagtcacccgccccttcctggcgcctcggctgcgcagcccggccctggcccgccgcctgctgctggcggtctggctggccgccctgttgctcgccgtcccggccgccgtctaccgccacctgtggagggaccgcgtatgccagctgtgccacccgtcgccggtccacgccgccgcccacctgagcctggagactctgaccgctttcgtgcttcctttcgggctgatgctcggctgctacagcgtgacgctggcacggctgcggggcgcccgctggggctccgggcggcacggggcgcgggtgggccggctggtgagcgccatcgtgcttgccttcggcttgctctgggccccctaccacgcagtcaaccttctgcaggcggtcgcagcgctggctccaccggaaggggccttggcgaagctgggcggagccggccaggcggcgcgagcgggaactacggccttggccttcttcagttctagcgtcaacccggtgctctacgtcttcaccgctggagatctgctgccccgggcaggtccccgtttcctcacgcggctcttcgaaggctctggggaggcccgagggggcggccgctctagggaagggaccatggagctccgaactacccctcagctgaaagtggtggggcagggccgcggcaatggagacccggggggtgggatggagaaggacggtccggaatgggacctttgacagcagaccctacaacctgctgcccttccctgtccctttccaccccccacccaccctccagaggtcctcccgacggccatgaacactacatcttctgcagcacccccctcactaggtgtagagttcatctctctgctggctatcatcctgctgtcagtggcgctggctgtggggcttcccggcaacagctttgtggtgtggagtatcctgaaaaggatgcagaagcgctctgtcactgccctgatggtgctgaacctggccctggccgacctggccgtattgctcactgctccctttttccttcacttcctggcccaaggcacctggagttttggactggctggttgccgcctgtgtcactatgtctgcggagtcagcatgtacgccagcgtcctgcttatcacggccatgagtctagaccgctcactggcggtggcccgcccctttgtgtcccagaagctacgcaccaaggcgatggcccggcgggtgctggcaggcatctgggtgttgtcctttctgctggccacacccgtcctcgcgtaccgcacagtagtgccctggaaaacgaacatgagcctgtgcttcccgcggtaccccagcgaagggcaccgggccttccatctaatcttcgaggctgtcacgggcttcctgctgcccttcctggctgtggtggccagctactcggacatagggcgtcggctacaggcccggcgcttccgccgcagccgccgcaccggccgcctggtggtgctcatcatcctgaccttcgccgccttctggctgccctaccacgtggtgaacctggctgaggcgggccgcgcgctggccggccaggccgccgggttagggctcgtggggaagcggctgagcctggcccgcaacgtgctcatcgcactcgccttcctgagcagcagcgtgaaccccgtgctgtacgcgtgcgccggcggcggcctgctgcgctcggcgggcgtgggcttcgtcgccaagctgctggagggcacgggctccgaggcgtccagcacgcgccgcgggggcagcctgggccagaccgctaggagcggccccgccgctctggagcccggcccttccgagagcctcactgcctccagccctctcaagttaaacgaactgaactaggcctggtggaaggaggcgcactttcctcctggcagaatgctagctctgagccagttcagtacctggaggaggagcaggggcgtggagggcgtggagggcgtgggagcgtgggaggcgggagtggagtggaagaagagggagaggtggagcaaagtgagggccgagtgagagcgtgctccagcctggctcccacaggcagctttaaccattaaaactgaagtctgaaatttggtcaacacaagtgagtggggtacat

SEQ ID NO: 361092 - DNA, 5973 bp, Homo sapiens
tccatacagggacaatatgtggctctggcctgtagtcgccatggcagccgtgtgctagatgccatctggagtggagcagccttgagggcccggaaggaaattgctgctgagcttggggagcagaaccaggagctgataagagaccctttcggccaccatgtggctcgaaatgtggccttgactaccttcctaaagcggcgagaggcttgggaacagcagcagggtgcggtggccaagcggaggcgggcattgaactccatacttgaagactgaggctttggatctgggactgggtgttgatgggggagggcaaaatggggtatccaccccatccctttcctggtttaaattggagtcagaagtcttagtggtaaatatttgatatttttattggaaatgtttttgttagtttgaggggaagggtatgaagacagatctcaaggtaaagtcagagagggctgtcatcagtatgctggggagtttagggacaggaggcattggtaggggattagatgtagcagcagtcaggctgggatcaagatgcctgggggacatcttgatcttggcctttcagggcaagtgggaggctagaaaggtggctaggaaagaacagcattcttcaggtaagggtatagacttgggatgtgaggcgttatgctgaaaggttctgtcacgaggggatcagaggacagtggggaaattgggtgggttatctagcctgtactgtctgcaggtcctgaaatttgatgctgtcatagtctttgcagtgggtcggttggaatgattctgggggcagaagctcagagccccttagtaggaatggaggcggcccttctgctgccactgctcagccccctccactgcatgacgaagggtggaggaaattcccagcaacatatggcccaggccttgcagcagtgtggaggtccaacgaaggagctccctgaatggcagagacaagaggaaatcagatgatttggaaaacttgggaggaagccatcaagctgggagatgaggactttccacaagcaagagctaactaggggtaggtgggtgcaagaggacgaattatggggactatccaactgtaggggatggggcagtatgacatgttgatttctgacctgagtactttctttgggccaagtccttgaaagtcacaactcatagagtagagcccgtagaatgtggctttgacattcaggctgccaaagaggtctcgagggttttgcttgtacacgtcaaaggtgaatcgggcgatgtccttgctgtgcttgggcctctcccgtcccaggccatatgacagcactccactctgtaggacacccttgtcagtgcagtagatcctcataccagacacccaccactaatctccatcagcactgggtcagaccctccctcgcttggactttctgtccactgtgtgacatccttgacaattccacaactcctcctgcacctggtccccaggatcagggttaagctagagaggaagcccgggaaagctctaaaggacaggcattggaagcagccccagtataggcctcttacccttgtagggctccagctctgaccagactgcaacaccatcaggcacgtgtcatcctccagcagctggaagaagtcctcactgtccactgcagttccatcctcctctagcaccagggttagcactccattcagcagtagggtctccaatgcctgcccaatggcaagaagcaagaagggcaggtcttatcccatgccccttccctctttagctgcccaacatccatcagttggctctagacattggtcgatgtcccactttgactttctggcactttgatacctcctaaaggttgcagctctccgtgttcttcagtttttgggggatcctagctagaggctgacctttttcctctttgctcctaccatgtcattggcatctccccttgctcccctccaagtcacttctggtttggaattggaaagcaagccaggttctcacgaagtccacccttctgtcttatctacaatgctgcacctcacttcccacaccctcaagagttctccagaagtgttttcagtaatagtgtttaacctttttgagtccttactctgtgccaggtatgaggactttacctacattatcctcttactcctttcaacaaccctaggaggtgatgtattattattgcctttttatagttgaagaaactgaggttttggtaggttgaacaacttcccaaggtttgacaggcaggaagtggcagaatcagaatttgaacttgatttgtcacacaaatcacctttccatactagcttctgaattccgtccctcgaactctccctatctcctgctaacccctgctcccatagaaaagctcactaggtggaaaatgaacaaattgaccagagctcattaggcccactccgctgcttttagccctcagagggaggggcagctgtgtgacttcagccctctgctccatcatcacaagttgccactgttgtggagccccttggctacccctgctataggaaccgaggaacttggcctacttactttggctagcagctcctggcgggtggcagctgtcaggcctttccggatggtccgcttgtgatcacagacacggaaaggtcgctggggtggtggagctgaggtccagaccctccgtccaaactccgagcttatattagatactgacctggtagttgagaagaaaagtcaagaaggggcgaggaggggcttggtgagtgtaaagggcatgatgagggtagagtggctagagggctagggagggagagatctaggtttatcgattagggatgagggagagaccatggagtgcaggtgggggcgggtggctcaggagcttgacaagcccactgtggagtggggagcaggagaggaaggggtactggttagtctcctaggggctgagtggagtattgttgccctgcctatatcccctaaaggtggagggtagagcggagggttagcagtcacctgagtaagtcactggggttcagagctgagaggtactccatggtggaccggagagttccttccctggaacttctgggctgggtggttctctcctgtgctggggctttagtggtgttttctgttacaaacctgggatctcactgctctttccttcctccttggtcggaggaggggctggctcactgctctggcttcattttccagagctgcctgctgcagtcacacttaggtcatcttctctcacttttctccttttgccgattagtggacgtgacagagatgtgaatggggcagggatgtcctttgatggcatcaagactttagcttctggtgcgctgtgtcccagctctgatttcagttgcagccgtgatggacagttgcatggaagctgagactctcactgacagtgaaaccctcaaatgaacacaatccctgctttcctgccaaggatccttgtagggtcccccagcttccccactttttttctgtgtcctgtaggcccagaaggatgtcggtctgctaccgtcccccagggaacgagacactgctgagctggaagacttcgcgggccacaggcacagccttcctgctgctggcggcgctgctggggctgcctggcaacggcttcgtggtgtggagcttggcgggctggcggcctgcacgggggcgaccgctggcggccacgcttgtgctgcacctggcgctggccgacggcgcggtgctgctgctcacgccgctctttgtggccttcctgacccggcaggcctggccgctgggccaggcgggctgcaaggcggtgtactacgtgtgcgcgctcagcatgtacgccagcgtgctgctcaccggcctgctcagcctgcagcgctgcctcgcagtcacccgccccttcctggcgcctcggctgcgcagcccggccctggcccgccgcctgctgctggcggtctggctggccgccctgttgctcgccgtcccggccgccgtctaccgccacctgtggagggaccgcgtatgccagctgtgccacccgtcgccggtccacgccgccgcccacctgagcctggagactctgaccgctttcgtgcttcctttcgggctgatgctcggctgctacagcgtgacgctggcacggctgcggggcgcccgctggggctccgggcggcacggggcgcgggtgggccggctggtgagcgccatcgtgcttgccttcggcttgctctgggccccctaccacgcagtcaaccttctgcaggcggtcgcagcgctggctccaccggaaggggccttggcgaagctgggcggagccggccaggcggcgcgagcgggaactacggccttggccttcttcagttctagcgtcaacccggtgctctacgtcttcaccgctggagatctgctgccccgggcaggtccccgtttcctcacgcggctcttcgaaggctctggggaggcccgagggggcggccgctctagggaagggaccatggagctccgaactacccctcagctgaaagtggtggggcagggccgcggcaatggagacccggggggtgggatggagaaggacggtccggaatgggacctttgacagcagaccctacaacctgctgcccttccctgtccctttccaccccccacccaccctccagaggtcctcccgacggccatgaacactacatcttctgcagcacccccctcactaggtgtagagttcatctctctgctggctatcatcctgctgtcagtggcgctggctgtggggcttcccggcaacagctttgtggtgtggagtatcctgaaaaggatgcagaagcgctctgtcactgccctgatggtgctgaacctggccctggccgacctggccgtattgctcactgctccctttttccttcacttcctggcccaaggcacctggagttttggactggctggttgccgcctgtgtcactatgtctgcggagtcagcatgtacgccagcgtcctgcttatcacggccatgagtctagaccgctcactggcggtggcccgcccctttgtgtcccagaagctacgcaccaaggcgatggcccggcgggtgctggcaggcatctgggtgttgtcctttctgctggccacacccgtcctcgcgtaccgcacagtagtgccctggaaaacgaacatgagcctgtgcttcccgcggtaccccagcgaagggcaccgggccttccatctaatcttcgaggctgtcacgggcttcctgctgcccttcctggctgtggtggccagctactcggacatagggcgtcggctacaggcccggcgcttccgccgcagccgccgcaccggccgcctggtggtgctcatcatcctgaccttcgccgccttctggctgccctaccacgtggtgaacctggctgaggcgggccgcgcgctggccggccaggccgccgggttagggctcgtggggaagcggctgagcctggcccgcaacgtgctcatcgcactcgccttcctgagcagcagcgtgaaccccgtgctgtacgcgtgcgccggcggcggcctgctgcgctcggcgggcgtgggcttcgtcgccaagctgctggagggcacgggctccgaggcgtccagcacgcgccgcgggggcagcctgggccagaccgctaggagcggccccgccgctctggagcccggcccttccgagagcctcactgcctccagccctctcaagttaaacgaactgaactaggcctggtggaaggaggcgcactttcctcctggcagaatgctagctctgagccagttcagtacctggaggaggagcaggggcgtggagggcgtggagggcgtgggagcgtgggaggcgggagtggagtggaagaagagggagaggtggagcaaagtgagggccgagtgagagcgtgctccagcctggctcccacaggcagctttaaccattaaaactgaagtctgaaatttggtcaacacaagtgagtggggtacat

SEQ ID NO: 361093 - DNA, 3645 bp, Homo sapiens
tccatacagggacaatatgtggctctggcctgtagtcgccatggcagccgtgtgctagatgccatctggagtggagcagccttgagggcccggaaggaaattgctgctgagcttggggagcagaaccaggagctgataagagaccctttcggccaccatgtggctcgaaatgtggccttgactaccttcctaaagcggcgagaggcttgggaacagcagcagggtgcggtggccaagcggaggcgggcattgaactccatacttgaagactgaggctttggatctgggactgggtgttgatgggggagggcaaaatggggtatccaccccatccctttcctggtttaaattggagtcagaagtcttagtggtaaatatttgatatttttattggaaatgtttttgttagtttgaggggaagggtatgaagacagatctcaaggtaaagtcagagagggctgtcatcagtatgctggggagtttagggacaggaggcattggtaggggattagatgtagcagcagtcaggctgggatcaagatgcctgggggacatcttgatcttggcctttcagggcaagtgggaggctagaaaggtggctaggaaagaacagcattcttcaggtaagggtatagacttgggatgtgaggcgttatgctgaaaggttctgtcacgaggggatcagaggacagtggggaaattgggtgggttatctagcctgtactgtctgcaggtcctgaaatttgatgctgtcatagtctttgcagtgggtcggttggaatgattctgggggcagaagctcagagccccttagtaggaatggaggcggcccttctgctgccactgctcagccccctccactgcatgacgaagggtggaggaaattcccagcaacatatggcccaggccttgcagcagtgtggaggtccaacgaaggagctccctgaatggcagagacaagaggaaatcagatgatttggaaaacttgggaggaagccatcaagctgggagatgaggactttccacaagcaagagctaactaggggtaggtgggtgcaagaggacgaattatggggactatccaactgtaggggatggggcagtatgacatgttgatttctgacctgagtactttctttgggccaagtccttgaaagtcacaactcatagagtagagcccgtagaatgtggctttgacattcaggctgccaaagaggtctcgagggttttgcttgtacacgtcaaaggtgaatcgggcgatgtccttgctgtgcttgggcctctcccgtcccaggccatatgacagcactccactctgtaggacacccttgtcagtgcagtagatcctcataccagacacccaccactaatctccatcagcactgggtcagaccctccctcgcttggactttctgtccactgtgtgacatccttgacaattccacaactcctcctgcacctggtccccaggatcagggttaagctagagaggaagcccgggaaagctctaaaggacaggcattggaagcagccccagtataggcctcttacccttgtagggctccagctctgaccagactgcaacaccatcaggcacgtgtcatcctccagcagctggaagaagtcctcactgtccactgcagttccatcctcctctagcaccagggttagcactccattcagcagtagggtctccaatgcctgcccaatggcaagaagcaagaagggcaggtcttatcccatgccccttccctctttagctgcccaacatccatcagttggctctagacattggtcgatgtcccactttgactttctggcactttgatacctcctaaaggttgcagctctccgtgttcttcagtttttgggggatcctagctagaggctgacctttttcctctttgctcctaccatgtcattggcatctccccttgctcccctccaagtcacttctggtttggaattggaaagcaagccaggttctcacgaagtccacccttctgtcttatctacaatgctgcacctcacttcccacaccctcaagagttctccagaagtgttttcagtaatagtgtttaacctttttgagtccttactctgtgccaggtatgaggactttacctacattatcctcttactcctttcaacaaccctaggaggtgatgtattattattgcctttttatagttgaagaaactgaggttttggtaggttgaacaacttcccaaggtttgacaggcaggaagtggcagaatcagaatttgaacttgatttgtcacacaaatcacctttccatactagcttctgaattccgtccctcgaactctccctatctcctgctaacccctgctcccatagaaaagctcactaggtggaaaatgaacaaattgaccagagctcattaggcccactccgctgcttttagccctcagagggaggggcagctgtgtgacttcagccctctgctccatcatcacaagttgccactgttgtggagccccttggctacccctgctataggaaccgaggaacttggcctacttactttggctagcagctcctggcgggtggcagctgtcaggcctttccggatggtccgcttgtgatcacagacacggaaaggtcgctggggtggtggagctgaggtccagaccctccgtccaaactccgagcttatattagatactgacctggtagttgagaagaaaagtcaagaaggggcgaggaggggcttggtgagtgtaaagggcatgatgagggtagagtggctagagggctagggagggagagatctaggtttatcgattagggatgagggagagaccatggagtgcaggtgggggcgggtggctcaggagcttgacaagcccactgtggagtggggagcaggagaggaaggggtactggttagtctcctaggggctgagtggagtattgttgccctgcctatatcccctaaaggtggagggtagagcggagggttagcagtcacctgagtaagtcactggggttcagagctgagaggtactccatggtggaccggagagttccttccctggaacttctgggctgggtggttctctcctgtgctggggctttagtggtgttttctgttacaaacctgggatctcagcccaggacaaggtgggaatgagtcaagcctggactctggcccccctgcctggccagtaagaagggcaaagtccaaggggagggatgagggaggggccagatggggtcctggaggaagaattgcctggcaaaagccattggagcttgtatgtgtgtctttggtgatgacatgtgttgtgagggtagatgggaaccatgtaaaaggatgaaatgtgaaaaaaaaaaaagaaagaaaaaagaaacgacaacgcgaagctgctggaacagaggagtgacagacaacagcaacgggagaagagaagcagcgagaagccgatacaaaagcaacggggggggggacgtaacaacacgacggaagacccgacacaccgcagaaagcaaagacgcgcccagatggattagaagcgaggcaacgctcgacagcaaggagaagggcggctagagaagccagggggggaaaagcacccacacgagacgggaaaacgcgggtcgacgtcgcgcaggaggaat

SEQ ID NO: 361094 - DNA, 3738 bp, Homo sapiens
tccatacagggacaatatgtggctctggcctgtagtcgccatggcagccgtgtgctagatgccatctggagtggagcagccttgagggcccggaaggaaattgctgctgagcttggggagcagaaccaggagctgataagagaccctttcggccaccatgtggctcgaaatgtggccttgactaccttcctaaagcggcgagaggcttgggaacagcagcagggtgcggtggccaagcggaggcgggcattgaactccatacttgaagactgaggctttggatctgggactgggtgttgatgggggagggcaaaatggggtatccaccccatccctttcctggtttaaattggagtcagaagtcttagtggtaaatatttgatatttttattggaaatgtttttgttagtttgaggggaagggtatgaagacagatctcaaggtaaagtcagagagggctgtcatcagtatgctggggagtttagggacaggaggcattggtaggggattagatgtagcagcagtcaggctgggatcaagatgcctgggggacatcttgatcttggcctttcagggcaagtgggaggctagaaaggtggctaggaaagaacagcattcttcaggtaagggtatagacttgggatgtgaggcgttatgctgaaaggttctgtcacgaggggatcagaggacagtggggaaattgggtgggttatctagcctgtactgtctgcaggtcctgaaatttgatgctgtcatagtctttgcagtgggtcggttggaatgattctgggggcagaagctcagagccccttagtaggaatggaggcggcccttctgctgccactgctcagccccctccactgcatgacgaagggtggaggaaattcccagcaacatatggcccaggccttgcagcagtgtggaggtccaacgaaggagctccctgaatggcagagacaagaggaaatcagatgatttggaaaacttgggaggaagccatcaagctgggagatgaggactttccacaagcaagagctaactagggggaatcttactgccccacttcagcttgtgctgtttcctggcaaggcaggctctcacatgcctggacgcctgggcacaggacaggagtaggcacctcgcctactgctgcttaacctttcagcttctccaggcccccaatcctgcttgctcccagcttggtggggttttgccccacccctgaacgccctctgtggcgccttccacccacctgtaggcccagaaggatgtcggtctgctaccgtcccccagggaacgagacactgctgagctggaagacttcgcgggccacaggcacagccttcctgctgctggcggcgctgctggggctgcctggcaacggcttcgtggtgtggagcttggcgggctggcggcctgcacgggggcgaccgctggcggccacgcttgtgctgcacctggcgctggccgacggcgcggtgctgctgctcacgccgctctttgtggccttcctgacccggcaggcctggccgctgggccaggcgggctgcaaggcggtgtactacgtgtgcgcgctcagcatgtacgccagcgtgctgctcaccggcctgctcagcctgcagcgctgcctcgcagtcacccgccccttcctggcgcctcggctgcgcagcccggccctggcccgccgcctgctgctggcggtctggctggccgccctgttgctcgccgtcccggccgccgtctaccgccacctgtggagggaccgcgtatgccagctgtgccacccgtcgccggtccacgccgccgcccacctgagcctggagactctgaccgctttcgtgcttcctttcgggctgatgctcggctgctacagcgtgacgctggcacggctgcggggcgcccgctggggctccgggcggcacggggcgcgggtgggccggctggtgagcgccatcgtgcttgccttcggcttgctctgggccccctaccacgcagtcaaccttctgcaggcggtcgcagcgctggctccaccggaaggggccttggcgaagctgggcggagccggccaggcggcgcgagcgggaactacggccttggccttcttcagttctagcgtcaacccggtgctctacgtcttcaccgctggagatctgctgccccgggcaggtccccgtttcctcacgcggctcttcgaaggctctggggaggcccgagggggcggccgctctagggaagggaccatggagctccgaactacccctcagctgaaagtggtggggcagggccgcggcaatggagacccggggggtgggatggagaaggacggtccggaatgggacctttgacagcagaccctacaacctgctgcccttccctgtccctttccaccccccacccaccctccagaggtcctcccgacggccatgaacactacatcttctgcagcacccccctcactaggtgtagagttcatctctctgctggctatcatcctgctgtcagtggcgctggctgtggggcttcccggcaacagctttgtggtgtggagtatcctgaaaaggatgcagaagcgctctgtcactgccctgatggtgctgaacctggccctggccgacctggccgtattgctcactgctccctttttccttcacttcctggcccaaggcacctggagttttggactggctggttgccgcctgtgtcactatgtctgcggagtcagcatgtacgccagcgtcctgcttatcacggccatgagtctagaccgctcactggcggtggcccgcccctttgtgtcccagaagctacgcaccaaggcgatggcccggcgggtgctggcaggcatctgggtgttgtcctttctgctggccacacccgtcctcgcgtaccgcacagtagtgccctggaaaacgaacatgagcctgtgcttcccgcggtaccccagcgaagggcaccgggccttccatctaatcttcgaggctgtcacgggcttcctgctgcccttcctggctgtggtggccagctactcggacatagggcgtcggctacaggcccggcgcttccgccgcagccgccgcaccggccgcctggtggtgctcatcatcctgaccttcgccgccttctggctgccctaccacgtggtgaacctggctgaggcgggccgcgcgctggccggccaggccgccgggttagggctcgtggggaagcggctgagcctggcccgcaacgtgctcatcgcactcgccttcctgagcagcagcgtgaaccccgtgctgtacgcgtgcgccggcggcggcctgctgcgctcggcgggcgtgggcttcgtcgccaagctgctggagggcacgggctccgaggcgtccagcacgcgccgcgggggcagcctgggccagaccgctaggagcggccccgccgctctggagcccggcccttccgagagcctcactgcctccagccctctcaagttaaacgaactgaactaggcctggtggaaggaggcgcactttcctcctggcagaatgctagctctgagccagttcagtacctggaggaggagcaggggcgtggagggcgtggagggcgtgggagcgtgggaggcgggagtggagtggaagaagagggagaggtggagcaaagtgagggccgagtgagagcgtgctccagcctggctcccacaggcagctttaaccattaaaactgaagtctgaaatttggtcaacacaagtgagtggggtacat

SEQ ID NO: 361095 - DNA, 3744 bp, Homo sapiens
gaccctggagtttctgtccccaaacacaggcctcacgggattctttctgtcctcatgcactgggcagaggttccttaacttcctttgttgcacattgccattctctcacatcccgtgcggtcaggaagcccttcctgaactctgacttcagttcttgctgcggtttctgcccatttttttcatatcctctgacagctgcgaggtcatctctgctctggcttttctccaagcagaacaagtgggggctctggaaaggttaagggacctcagtggccaccattatactttgcatctttcctgagaagtgagagttgaaagggaagcaggaaggcccatggtcagattgaaggaaggactttttagtttcttttttttttttttgaaatggagtctcgctctgtcattcaggctggagtgcagtggtgcgatctcagctcactgcagcctccacttcctgggttcacatgattctcctgcctcagcctcccaagtagctgagactacaggcacatgccactacacccagctaacttttgtatttttagtagagacggggtttcaccatgttggccaggctggtctcaaactgctaacatcaagtgatctgctcccctcagcctcccaaagtgctgggattaccggtatgaaccaccacaacctgccaggaatttttagtttttagcttttgcaggagacttcaaggaaaggagacattcctctgtccaggaaacgggtaaggggaccatttctgcattgctggtttcccctcttggcagggtgggcatgaggcatcactgttcctgctccctcactcctgctcctcatgctcagcctgccagctcggcctcaactttgtgtgtctaaagtggaactgaatagtaggctgtgagaagataggaaagaggtagtgccaatctccttgcccagatcataaatccagactcagcagggtaaccacatgggcaagcacaaggtaggtgcttggggaaaggggaagtaattggcattctgtgtgataccaaggagaccatttggattttggcttctaccaaagagaatggagaattggttgacctaaatggaaccagtccctttaagtaaggggaggaaagggggtgctggaagatggccctcttcccaccacctagatcatagcttgaactgaagccaaggacagagtgctgcccccttcggcatttactgatgtgccctctttaaatcatgatgttatctaacccaaacccagacccaggacctagtcacagctccaacctacacttcctattaatcttaaaacaaagcaaaacaaaacaaaaagatatcagcattgtagcctccaatctgagcccatttcccttctctggctaccatacctccttctcctatatgataccattcactactttgttcaattatccagtctagacctgcatcttgaggccacacccagccttctcactccccacacccctctttcctctctcactgctccttcctggtctcttctcatctggccccacctctaaggagtcctcctgccttctgggttgccctggaaaacagactatcccccctcctagtgaagggagtgggtaggggtttcagccccaccctcaggaagatgcgtcttccctgtcctctgctctgtggtacttcctctctggctgatttagcaaacagcacctagacctggggccaggcctttggcagtgggacagatccagggataggctacaccaccctgccctgaccctgggattggcatcagcttccaaccagttcctgccaaagcttgtaagtaagtttcctgggagcggccgtggttgtggtggtggtgggacagtgtgcagccatgaaagaaggtgcaaaggaatctccaaagaaagcctgaccagcgtaaaaagttgggaggctttgtccttgtcacttgtccactaaactcctcccctccctgttattcctggttgaccctgggcatctctggggacagtaggcaggtgattgggaaagttaatgggattgaggggctgagggcctggcagggggcaaaaagactggcctttcaaggggtgcagcattggtaggaactctgtttggttctgggctttagggtctcctaaggggaggagactgaaaaggtctggaaatgctgctgctgctgtggtcactgtatattttgcaattgggtctgtggacaggaaggggccgcatgacccagttaggaaactagtctttgtactcaaccagatccctttaagttgtcagtctgcagcgatgggggcagtatatttcagggggacctctgatgctgctgaccctggagatagactagagttctcagcctaggtgtgtccatggcgtcaggaaacccttggtcctctactctcatgcgtgtgtccgccctcactctccaggtcctcccgacggccatgaacactacatcttctgcagcacccccctcactaggtgtagagttcatctctctgctggctatcatcctgctgtcagtggcgctggctgtggggcttcccggcaacagctttgtggtgtggagtatcctgaaaaggatgcagaagcgctctgtcactgccctgatggtgctgaacctggccctggccgacctggccgtattgctcactgctccctttttccttcacttcctggcccaaggcacctggagttttggactggctggttgccgcctgtgtcactatgtctgcggagtcagcatgtacgccagcgtcctgcttatcacggccatgagtctagaccgctcactggcggtggcccgcccctttgtgtcccagaagctacgcaccaaggcgatggcccggcgggtgctggcaggcatctgggtgttgtcctttctgctggccacacccgtcctcgcgtaccgcacagtagtgccctggaaaacgaacatgagcctgtgcttcccgcggtaccccagcgaagggcaccgggccttccatctaatcttcgaggctgtcacgggcttcctgctgcccttcctggctgtggtggccagctactcggacatagggcgtcggctacaggcccggcgcttccgccgcagccgccgcaccggccgcctggtggtgctcatcatcctgaccttcgccgccttctggctgccctaccacgtggtgaacctggctgaggcgggccgcgcgctggccggccaggccgccgggttagggctcgtggggaagcggctgagcctggcccgcaacgtgctcatcgcactcgccttcctgagcagcagcgtgaaccccgtgctgtacgcgtgcgccggcggcggcctgctgcgctcggcgggcgtgggcttcgtcgccaagctgctggagggcacgggctccgaggcgtccagcacgcgccgcgggggcagcctgggccagaccgctaggagcggccccgccgctctggagcccggcccttccgagagcctcactgcctccagccctctcaagttaaacgaactgaactaggcctggtggaaggaggcgcactttcctcctggcagaatgctagctctgagccagttcagtacctggaggaggagcaggggcgtggagggcgtggagggcgtgggagcgtgggaggcgggagtggagtggaagaagagggagaggtggagcaaagtgagggccgagtgagagcgtgctccagcctggctcccacaggcagctttaaccattaaaactgaagtctgaaatttggtcaacacaagtgagtggggtacat

SEQ ID NO: 361096 - DNA, 1807 bp, Homo sapiens
gaccctggagtttctgtccccaaacacaggcctcacgggattctttctgtcctcatgcactgggcagaggttccttaacttcctttgttgcacattgccattctctcacatcccgtgcggtcaggaagcccttcctgaactctgacttcagttcttgctgcggtttctgcccatttttttcatatcctctgacagctgcgaggtcatctctgctctggcttttctccaagcagaacaagtgggggctctggaaaggttaagggacctcagtggccaccattatactttgcatctttcctgagaagtgagagttgaaagggaagcaggaaggcccatggtcagattgaaggaaggactttttagtttcttttttttttttttgaaatggagtctcgctctgtcattcaggctggagtgcagtggtgcgatctcagctcactgcagcctccacttcctgggttcacatgattctcctgcctcagcctcccaagtagctgagactacaggcacatgccactacacccagctaacttttgtatttttagtagagacggggtttcaccatgttggccaggctggtctcaaactgctaacatcaagtgatctgctcccctcagcctcccaaagtgctgggattaccggtatgaaccaccacaacctgccaggaatttttagtttttagcttttgcaggagacttcaaggaaaggagacattcctctgtccaggaaacgggcacctggagttttggactggctggttgccgcctgtgtcactatgtctgcggagtcagcatgtacgccagcgtcctgcttatcacggccatgagtctagaccgctcactggcggtggcccgcccctttgtgtcccagaagctacgcaccaaggcgatggcccggcgggtgctggcaggcatctgggtgttgtcctttctgctggccacacccgtcctcgcgtaccgcacagtagtgccctggaaaacgaacatgagcctgtgcttcccgcggtaccccagcgaagggcaccgggccttccatctaatcttcgaggctgtcacgggcttcctgctgcccttcctggctgtggtggccagctactcggacatagggcgtcggctacaggcccggcgcttccgccgcagccgccgcaccggccgcctggtggtgctcatcatcctgaccttcgccgccttctggctgccctaccacgtggtgaacctggctgaggcgggccgcgcgctggccggccaggccgccgggttagggctcgtggggaagcggctgagcctggcccgcaacgtgctcatcgcactcgccttcctgagcagcagcgtgaaccccgtgctgtacgcgtgcgccggcggcggcctgctgcgctcggcgggcgtgggcttcgtcgccaagctgctggagggcacgggctccgaggcgtccagcacgcgccgcgggggcagcctgggccagaccgctaggagcggccccgccgctctggagcccggcccttccgagagcctcactgcctccagccctctcaagttaaacgaactgaactaggcctggtggaaggaggcgcactttcctcctggcagaatgctagctctgagccagttcagtacctggaggaggagcaggggcgtggagggcgtggagggcgtgggagcgtgggaggcgggagtggagtggaagaagagggagaggtggagcaaagtgagggccgagtgagagcgtgctccagcctggctcccacaggcagctttaaccattaaaactgaagtctgaaatttggtcaacacaagtgagtggggtacat

SEQ ID NO: 361097 - DNA, 2622 bp, Homo sapiens
gaccctggagtttctgtccccaaacacaggcctcacgggattctttctgtcctcatgcactgggcagaggttccttaacttcctttgttgcacattgccattctctcacatcccgtgcggtcaggaagcccttcctgaactctgacttcagttcttgctgcggtttctgcccatttttttcatatcctctgacagctgcgaggtcatctctgctctggcttttctccaagcagaacaagtgggggctctggaaaggttaagggacctcagtggccaccattatactttgcatctttcctgagaagtgagagttgaaagggaagcaggaaggcccatggtcagattgaaggaaggactttttagtttcttttttttttttttgaaatggagtctcgctctgtcattcaggctggagtgcagtggtgcgatctcagctcactgcagcctccacttcctgggttcacatgattctcctgcctcagcctcccaagtagctgagactacaggcacatgccactacacccagctaacttttgtatttttagtagagacggggtttcaccatgttggccaggctggtctcaaactgctaacatcaagtgatctgctcccctcagcctcccaaagtgctgggattaccggtatgaaccaccacaacctgccaggaatttttagtttttagcttttgcaggagacttcaaggaaaggagacattcctctgtccaggaaacgggtaaggggaccatttctgcattgctggtttcccctcttggcagggtgggcatgaggcatcactgttcctgctccctcactcctgctcctcatgctcagcctgccagctcggcctcaactttgtgtgtctaaagtggaactgaatagtaggctgtgagaagataggaaagaggtagtgccaatctccttgcccagatcataaatccagactcagcagggtaaccacatgggcaagcacaaggtaggtgcttggggaaaggggaagtaattggcattctgtgtgataccaaggagaccatttggattttggcttctaccaaagagaatggagaattggttgacctaaatggaaccagtccctttaagtaaggggaggaaagggggtgctggaagatggccctcttcccaccacctagatcatagcttgaactgaagccaaggacagagtgctgcccccttcggcatttactgatgtgccctctttaaatcatgatgttatctaacccaaacccagacccaggacctagtcacagctccaacctacacttcctattaatcttaaaacaaagcaaaacaaaacaaaaagatatcagcattgtagcctccaatctgagcccatttcccttctctggctaccatacctccttctcctatatgataccattcactactttgttcaattatccagtctagacctgcatcttgaggccacacccagccttctcactccccacacccctctttcctctctcactgctccttcctggtctcttctcatctggccccacctctaaggagtcctcctgccttctgggttgccctggaaaacagactatcccccctcctagtgaagggagtgggtaggggtttcagccccaccctcaggaagatgcgtcttccctgtcctctgctctgtggtacttcctctctggctgatttagcaaacagcacctagacctggggccaggcctttggcagtgggacagatccagggataggctacaccaccctgccctgaccctgggattggcatcagcttccaaccagttcctgccaaagcttgtaagtaagtttcctgggagcggccgtggttgtggtggtggtgggacagtgtgcagccatgaaagaaggtgcaaaggaatctccaaagaaagcctgaccagcgtaaaaagttgggaggctttgtccttgtcacttgtccactaaactcctcccctccctgttattcctggttgaccctgggcatctctggggacagtaggcaggtgattgggaaagttaatgggattgaggggctgagggcctggcagggggcaaaaagactggcctttcaaggggtgcagcattggtaggaactctgtttggttctgggctttagggtctcctaaggggaggagactgaaaaggtctggaaatgctgctgctgctgtggtcactgtatattttgcaattgggtctgtggacaggaaggggccgcatgacccagttaggaaactagtctttgtactcaaccagatccctttaagttgtcagtctgcagcgatgggggcagtatatttcagggggacctctgatgctgctgaccctggagatagactagagttctcagcctaggtgtgtccatggcgtcaggaaacccttggtcctactacatcttctgcagcacccccctcactaggtgtagagttcatctctctgctggctatcatcctgctgtcagtggcgctggctgtggggcttcccggcaacagcttttggagtggaagaagagggagaggtggagcaaagtgagggccgagtgagagcgtgctccagcctggctcccacaggcagctttaaccattaaaactgaagtctgaaatttggtcaacacaagtgagtggggtacat

SEQ ID NO: 361098 - DNA, 6279 bp, Homo sapiens
tccatacagggacaatatgtggctctggcctgtagtcgccatggcagccgtgtgctagatgccatctggagtggagcagccttgagggcccggaaggaaattgctgctgagcttggggagcagaaccaggagctgataagagaccctttcggccaccatgtggctcgaaatgtggccttgactaccttcctaaagcggcgagaggcttgggaacagcagcagggtgcggtggccaagcggaggcgggcattgaactccatacttgaagactgaggctttggatctgggactgggtgttgatgggggagggcaaaatggggtatccaccccatccctttcctggtttaaattggagtcagaagtcttagtggtaaatatttgatatttttattggaaatgtttttgttagtttgaggggaagggtatgaagacagatctcaaggtaaagtcagagagggctgtcatcagtatgctggggagtttagggacaggaggcattggtaggggattagatctttggctagcagctcctggcgggtggcagctgtcaggcctttccggatggtccgcttgtgatcacagacacggaaaggtcgctggggtggtggagctgaggtccagaccctccgtccaaactccgagcttatattagatactgacctggtagttgagaagaaaagtcaagaaggggcgaggaggggcttggtgagtgtaaagggcatgatgagggtagagtggctagagggctagggagggagagatctaggtttatcgattagggatgagggagagaccatggagtgcaggtgggggcgggtggctcaggagcttgacaagcccactgtggagtggggagcaggagaggaaggggtactggttagtctcctaggggctgagtggagtattgttgccctgcctatatcccctaaaggtggagggtagagcggagggttagcagtcacctgagtaagtcactggggttcagagctgagaggtactccatggtggaccggagagttccttccctggaacttctgggctgggtggttctctcctgtgctggggctttagtggtgttttctgttacaaacctgggatctcagcccaggacaaggtgggaatgagtcaagcctggactctggcccccctgcctggccagtaagaagggcaaagtccaaggggagggatgagggaggggccagatggggtcctggaggaagaattgcctggcaaaagccattggagcttgtatgtgtgtctttggtgatgacatgtgttgtgagggtagatgggaaccatgtaaaaggatgaaatgtgacttctggtgtttttttatttctatggagggactttctggggacggtttctggctctcaggctctgagaagctgcagtttatgagtggctctgtgtgtgctgccacctactggagaagccataagctgcagctttaggaaaagggaacccggggcagagtgtggggaagtgggatggcagcatggcagggctttggaaaatgagaggtgagagtgtgtccaggaagggtgtaaggagaggatggatcctgatacatggattcaggatcattagggtcctgtctgggacactggccttcctgcttacctgctctttccttcctccttggtcggaggaggggctggctcactgctctggcttcattttccagagctgcctgctgcagtcacacttaggtcatcttctctcacttttctccttttgccgattagtggacgtgacagagatgtgaatggggcagggatgtcctttgatggcatcaagactttagcttctggtgcgctgtgtcccagctctgatttcagttgcagccgtgatggacagttgcatggaagctgagactctcactgacagtgaaaccctcaaatgaacacaatccctgctttcctgccaaggatccttgtagggtcccccagcttccccactttttttctgtgtcctgacaaagaaacacagagtaacttgattgccctgtgacctggccagttgcatttcccctgcaggcttgagcccaagccagagccttgaaaaggtattcaggttgttgcccaaaacactgaaaaaaactggccctggccctgaaccaaataccttgaaccctcgtaaactccataccctgacccccttgttttggatatacccaggtagaacaactctctctcactgtctgttgtgaggatacgctgtagcccactcattaagtacattctcctaataaatgctttggactgatcaccctgccagtcttttgtcttgggcaatctatacttttctcagaggttcccaaggcctactgaagggacttaacatactcttaatggctttcctctctcttgttttaccttatgccctcacttcctgagttaacctcccaaatacaggatcacctgtacccaagcccttagctcaagaatacaggatcacctgtacccaagcccttagctcaagctctgctttggaagaacccaaactaagacagtgctcctggtgccctccccaagcaacctcaagttctggctgttacttgagcagaggcctttcttttcccttcccccagctctatccatctgccaggcccccctcaaatctcttcatttccaagttttgcttgacttttccaagaggagagggctgcttcttagtatgtccctactcatcctttcctttcttgtcttgtatcctggtgcagcctggtaatggggcctcttcatggttgtgtgtcatgactccctaaccattatgcctccatgcatcccctgttcctcctggaacctagcaccatgccttacatggaaaagctgtcattgacagcccggtgagagccctgagggtggagtgactggggcagggcctgaggcaagaggtgggaggaggtaggaggccaggggctcagccggaccaggagactggaaacaggcaaggataaggcaggtgggggactgagttgtttgggtcacctctgcaggccagagagaccaggcaacatacacactgcagaaggtgggctgggaggattggggccagagctgggggagggatgagaacagaagcaggaccaggattcagcagagtcctcctatttccttccaccaccagggaatcttactgccccacttcagcttgtgctgtttcctggcaaggcaggctctcacatgcctggacgcctgggtgcgttggtgatgggaaggagcagggtgagggaggggccccaggagaggcccaggatgagcctcatcttgtccctccccattcttgtcttaccctctgcaaatgtgataggcacaggacaggagtaggcacctcgcctactgctgcttaacctttcagcttctccaggcccccaatcctgcttgctcccagcttggtaagtagatctgtgcacgtccctttacaccccaccatccagttttgcccagatgtgctagaatggggctggacaaagaaggaggggccagactagaggagtggtggtagagatagtgacagcctggggtgaggactttatgcctgtttaccactgagctctgggaaggaggccaggagtggggcaggtcaactgactgggagcaggggatctgggttccaagaaggagttgtgtttgaggtggggtctgggtcctcgtggaagtcaggactcccaggcagaaaagaggcaggctgcagggaagtaaggaggaggcatggcaccttctcatcgggcatcacaggtggggttttgccccacccctgaacgccctctgtggcgccttccacccacctgtaggcccagaaggatgtcggtctgctaccgtcccccagggaacgagacactgctgagctggaagacttcgcgggccacaggcacagccttcctgctgctggcggcgctgctggggctgcctggcaacggcttcgtggtgtggagcttggcgggctggcggcctgcacgggggcgaccgctggcggccacgcttgtgctgcacctggcgctggccgacggcgcggtgctgctgctcacgccgctctttgtggccttcctgacccggcaggcctggccgctgggccaggcgggctgcaaggcggtgtactacgtgtgcgcgctcagcatgtacgccagcgtgctgctcaccggcctgctcagcctgcagcgctgcctcgcagtcacccgccccttcctggcgcctcggctgcgcagcccggccctggcccgccgcctgctgctggcggtctggctggccgccctgttgctcgccgtcccggccgccgtctaccgccacctgtggagggaccgcgtatgccagctgtgccacccgtcgccggtccacgccgccgcccacctgagcctggagactctgaccgctttcgtgcttcctttcgggctgatgctcggctgctacagcgtgacgctggcacggctgcggggcgcccgctggggctccgggcggcacggggcgcgggtgggccggctggtgagcgccatcgtgcttgccttcggcttgctctgggccccctaccacgcagtcaaccttctgcaggcggtcgcagcgctggctccaccggaaggggccttggcgaagctgggcggagccggccaggcggcgcgagcgggaactacggccttggccttcttcagttctagcgtcaacccggtgctctacgtcttcaccgctggagatctgctgccccgggcaggtccccgtttcctcacgcggctcttcgaaggctctggggaggcccgagggggcggccgctctagggaagggaccatggagctccgaactacccctcagctgaaagtggtggggcagggccgcggcaatggagacccggggggtgggatggagaaggacggtccggaatgggacctttgacagcagaccctacaacctgctgcccttccctgtccctttccaccccccacccaccctccagaggtcctcccgacggccatgaacactacatcttctgcagcacccccctcactaggtgtagagttcatctctctgctggctatcatcctgctgtcagtggcgctggctgtggggcttcccggcaacagctttgtggtgtggagtatcctgaaaaggatgcagaagcgctctgtcactgccctgatggtgctgaacctggccctggccgacctggccgtattgctcactgctccctttttccttcacttcctggcccaaggcacctggagttttggactggctggttgccgcctgtgtcactatgtctgcggagtcagcatgtacgccagcgtcctgcttatcacggccatgagtctagaccgctcactggcggtggcccgcccctttgtgtcccagaagctacgcaccaaggcgatggcccggcgggtgctggcaggcatctgggtgttgtcctttctgctggccacacccgtcctcgcgtaccgcacagtagtgccctggaaaacgaacatgagcctgtgcttcccgcggtaccccagcgaagggcaccgggccttccatctaatcttcgaggctgtcacgggcttcctgctgcccttcctggctgtggtggccagctactcggacatagggcgtcggctacaggcccggcgcttccgccgcagccgccgcaccggccgcctggtggtgctcatcatcctgaccttcgccgccttctggctgccctaccacgtggtgaacctggctgaggcgggccgcgcgctggccggccaggccgccgggttagggctcgtggggaagcggctgagcctggcccgcaacgtgctcatcgcactcgccttcctgagcagcagcgtgaaccccgtgctgtacgcgtgcgccggcggcggcctgctgcgctcggcgggcgtgggcttcgtcgccaagctgctggagggcacgggctccgaggcgtccagcacgcgccgcgggggcagcctgggccagaccgctaggagcggccccgccgctctggagcccggcccttccgagagcctcactgcctccagccctctcaagttaaacgaactgaactaggcctggtggaaggaggcgcactttcctcctggcagaatgctagctctgagccagttcagtacctggaggaggagcaggggcgtggagggcgtggagggcgtgggagcgtgggaggcgggagtggagtggaagaagagggagaggtggagcaaagtgagggccgagtgagagcgtgctccagcctggctcccacaggcagctttaaccattaaaactgaagtctgaaatttggtcaacacaagtgagtggggtacat

SEQ ID NO: 361099 - DNA, 4302 bp, Homo sapiens
tccatacagggacaatatgtggctctggcctgtagtcgccatggcagccgtgtgctagatgccatctggagtggagcagccttgagggcccggaaggaaattgctgctgagcttggggagcagaaccaggagctgataagagaccctttcggccaccatgtggctcgaaatgtggccttgactaccttcctaaagcggcgagaggcttgggaacagcagcagggtgcggtggccaagcggaggcgggcattgaactccatacttgaagactgaggctttggatctgggactgggtgttgatgggggagggcaaaatggggtatccaccccatccctttcctggtttaaattggagtcagaagtcttagtggtaaatatttgatatttttattggaaatgtttttgttagtttgaggggaagggtatgaagacagatctcaaggtaaagtcagagagggctgtcatcagtatgctggggagtttagggacaggaggcattggtaggggattagatgtagcagcagtcaggctgggatcaagatgcctgggggacatcttgatcttggcctttcagggcaagtgggaggctagaaaggtggctaggaaagaacagcattcttcaggtaagggtatagacttgggatgtgaggcgttatgctgaaaggttctgtcacgaggggatcagaggacagtggggaaattgggtgggttatctagcctgtactgtctgcaggtcctgaaatttgatgctgtcatagtctttgcagtgggtcggttggaatgattctgggggcagaagctcagagccccttagtaggaatggaggcggcccttctgctgccactgctcagccccctccactgcatgacgaagggtggaggaaattcccagcaacatatggcccaggccttgcagcagtgtggaggtccaacgaaggagctccctgaatggcagagacaagaggaaatcagatgatttggaaaacttgggaggaagccatcaagctgggagatgaggactttccacaagcaagagctaactaggggtaggtgggtgcaagaggacgaattatggggactatccaactgtaggggatggggcagtatgacatgttgatttctgacctgagtactttctttgggccaagtccttgaaagtcacaactcatagagtagagcccgtagaatgtggctttgacattcaggctgccaaagaggtctcgagggttttgcttgtacacgtcaaaggtgaatcgggcgatgtccttgctgtgcttgggcctctcccgtcccaggccatatgacagcactccactctgtaggacacccttgtcagtgcagtagatcctcataccagacacccaccactaatctccatcagcactgggtcagaccctccctcgcttggactttctgtccactgtgtgacatccttgacaattccacaactcctcctgcacctggtccccaggatcagggttaagctagagaggaagcccgggaaagctctaaaggacaggcattggaagcagccccagtataggcctcttacccttgtagggctccagctctgaccagactgcaacaccatcaggcacgtgtcatcctccagcagctggaagaagtcctcactgtccactgcagttccatcctcctctagcaccagggttagcactccattcagcagtagggtctccaatgcctgcccaatggcaagaagcaagaagggcaggtcttatcccatgccccttccctctttagctgcccaacatccatcagttggctctagacattggtcgatgtcccactttgactttctggcactttgatacctcctaaaggttgcagctctccgtgttcttcagtttttgggggatcctagctagaggctgacctttttcctctttgctcctaccatgtcattggcatctccccttgctcccctccaagtcacttctggtttggaattggaaagcaagccaggttctcacgaagtccacccttctgtcttatctacaatgctgcacctcacttcccacaccctcaagagttctccagaagtgttttcagtaatagtgtttaacctttttgagtccttactctgtgccaggtatgaggactttacctacattatcctcttactcctttcaacaaccctaggaggtgatgtattattattgcctttttatagttgaagaaactgaggttttggtaggttgaacaacttcccaaggtttgacaggcaggaagtggcagaatcagaatttgaacttgatttgtcacacaaatcacctttccatactagcttctgaattccgtccctcgaactctccctatctcctgctaacccctgctcccatagaaaagctcactaggtggaaaatgaacaaattgaccagagctcattaggcccactccgctgcttttagccctcagagggaggggcagctgtgtgacttcagccctctgctccatcatcacaagttgccactgttgtggagccccttggctacccctgctataggaaccgaggaacttggcctacttactttggctagcagctcctggcgggtggcagctgtcaggcctttccggatggtccgcttgtgatcacagacacggaaaggtcgctggggtggtggagctgaggtccagaccctccgtccaaactccgagcttatattagatactgacctggtagttgagaagaaaagtcaagaaggggcgaggaggggcttggtgagtgtaaagggcatgatgagggtagagtggctagagggctagggagggagagatctaggtttatcgattagggatgagggagagaccatggagtgcaggtgggggcgggtggctcaggagcttgacaagcccactgtggagtggggagcaggagaggaaggggtactggttagtctcctaggggctgagtggagtattgttgccctgcctatatcccctaaaggtggagggtagagcggagggttagcagtcacctgagtaagtcactggggttcagagctgagaggtactccatggtggaccggagagttccttccctggaacttctgggctgggtggttctctcctgtgctggggctttagtggtgttttctgttacaaacctgggatctcagcccaggacaaggtgggaatgagtcaagcctggactctggcccccctgcctggccagtaagaagggcaaagtccaaggggagggatgagggaggggccagatggggtcctggaggaagaattgcctggcaaaagccattggagcttgtatgtgtgtctttggtgatgacatgtgttgtgagggtagatgggaaccatgtaaaaggatgaaatgtgacttctggtgtttttttatttctatggagggactttctggggacggtttctggctctcaggctctgagaagctgcagtttatgagtggctctgtgtgtgctgccacctactggagaagccataagctgcagctttaggaaaagggaacccggggcagagtgtggggaagtgggatggcagcatggcagggctttggaaaatgagaggtgagagtgtgtccaggaagggtgtaaggagaggatggatcctgatacatggattcaggatcattagggtcctgtctgggacactggccttcctgcttacctgctctttccttcctccttggtcggaggaggggctggctcactgctctggcttcattttccagagctgcctgctgcagtcacacttaggtcatcttctctcacttttctccttttgccgattagtggacgtgacagagatgtgaatggggcagggatgtcctttgatggcatcaagactttagcttctggtgcgctgtgtcccagctctgatttcagttgcagccgtgatggacagttgcatggaagctgagactctcactgacagtgaaaccctcaaatgaacacaatccctgctttcctgccaaggatccttgtagggtcccccagcttccccactttttttctgtgtcctgacaaagaaacacagagtaacttgattgccctgtgacctggccagttgcatttcccctgcaggcttgagcccaagccagagccttgaaaaggtattcaggttgttgcccaaaacactgaaaaaaactggccctggccctgaaccaaataccttgaaccctcgtaaactccataccctgacccccttgttttggatatacccaggtagaacaactctctctcactgtctgttgtgaggatacgctgtagcccactcattaagtacattctcctaataaatgctttggactgat

SEQ ID NO: 361100 - DNA, 728 bp, Homo sapiens
tccatacagggacaatatgtggctctggcctgtagtcgccatggcagccgtgtgctagatgccatctggagtggagcagccttgagggcccggaaggaaattgctgctgagcttggggagcagaaccaggagctgataagagaccctttcggccaccatgtggctcgaaatgtggccttgactaccttcctaaagcggcgagaggcttgggaacagcagcagggtgcggtggccaagcggaggcgggcattgaactccatacttgaagactgaggctttggatctgggactgggtgttgatgggggagggcaaaatggggtatccaccccatccctttcctggtttaaattggagtcagaagtcttagtggtaaatatttgatatttttattggaaatgtttttgttagtttgaggggaagggtatgaagacagatctcaaggtaaagtcagagagggctgtcatcagtatgctggggagtttagggacaggaggcattggtaggggattagatgtagcagcagtcaggctgggatcaagatgcctgggggacatcttgatcttggcctttcagggcaagtgggaggctagaaaggtgggagtcctagttttatggccagggccagggttattattgttattgctactgggttaaatatttttgtaatggtccattggccagaatataggagttgatgatgatggctattattatatcgtatcgtgtg

SEQ ID NO: 361101 - DNA, 3130 bp, Homo sapiens
ctgtatttcaaaaaaaaagaataaacaggaacacaaaaagccagcagcctggagcagtttagctaaggggttgctgtcctgcacagtcagtaggctctgaaggccatgtctgaaccacagccctgcctgcgaatgaatctcaaggatagtcattggcttactttatttttaaaacctcctctttaaagatttcctcttgaagagacagctcactttctacatagtcccgtatggaagtggactgctgaagaaattagtgtttccattcccctccaccgtctcccccattttttccgaacatttctttgtctttgtccattttcatcgctgagctgaagagcatgctttatcagaaacccttttgtccctttccttttccatgcttagagggaagtttctgacttgggagaacgccttagagttcttggggtctgaactcctctgatgccttccaaagtcacgtagctgtaagacccagcgggtgccagccgggagggtgactccagctcagcagcatgtatggaagtgcattgtgaccatgaaggagtctgccagtggccaagccacctagtgagctccctaccaaggaacctgggtgtcacctgcaggtggccaagagccagtttttatgccaggcaggggactggttggactctattgaggcttcttcctgtctgtggggagcactcctgtccccctcgtggtagggatacctgtcaccccacaaagaggcagggtgacaggtgttggccccattttaggcagacttgggtgtcatgacttctagttcacttgttttaaacctacctgtgatggcagctgcaccatgctgccctcttgacacactgctggagcccagagcacaggccagagtctcagcctgagccccttccccaggcagtacctgacaaggatacctgggattggggccagctttccagtcagatgccacgtttcctttgcccactgccacggggcactagggcctgccgcaggctctcccatgagggagaacgacctctgcaggcccctctgccttcctgcttcctaattgaccctttctctggcaggtgaggtgataaagcacggggacctgagatgcgtgcgcgatgaaggaatgcccatctacaaagcacccctggaaaaagggattctgatcatacagtttttagtaatctttcctgaaaaacactggctttctctggaaaagcttcctcagctggaagctttactccctcctcgacagaaagtgaggattacagatgacatggatcaggtggagctgaaggagttttgtcccaatgagcagaactggcgtcagcacagggaggcctacgaggaggacgaagacgggccccaggctggagtgcagtgccagacggcatgacgtggtgcggggcagcgtggccccaccggactagcacatgatgaatgtaaagttggcacaatgaaaatgacatcgctttaatggccttgtgtttgggatgtcctgtgtatgtgttcagcattcttaattgctgagtgtctttttggcttttcttttggttgtaacttaagttatagcttaatttatatttaaatgttttaagtataaatcacctctagtctgcatatggaatctgttcatttctattttcaggatatacttttgagatgtcagtgattgcaccaacactttgtgcttctagtggctttgccataattcagtgtcaccaataaggcacagcccagttagcagcttagcccccctagcaaaccccaaggcacaaagtgggcatcctgactcatctctaggtctgtggtttctcccctcttcccttggcagagttattgagggcatgatctcagggctgctaagataacatttctgaggattctagatgatcctcttaaagaataaaagcacatccgtggatcggacatggctgcatgtgcctgcttaacagggccaacttagttcctactgttctgtgcccttcagtggatggaacgtgagtgtctgatcatctctcttggaagttttctgaaccttccaagctctgtggtgaggacaaaccagtgtttgaatcatatgctgataactgtttgcctgtgaccctcacaccttgttcttcagggttttaatgattttctgttgacaacttttgcaatgctttcccaccaaagtgcttacttgtaaagaaaactaaatccttctgtgtccccggcagcctcagtgcagcaacagaagccaagggagaatgctgctggtttggcccatggcacagccagcttctctgaccagtaatccggggtgacttgagggtctgcaaaggcatagaactccccagtgttttccacctcattctcccagattgagctcccttccaaaggatcgttcctctcattgcacagccatattacaaagggtttcctgctcaagtgatgttttggtaagaacttcgctgagttccactgtggattacagtttgtatggactactactgtaaattatagcttgtttggagggatattagtcattattttattcatgacaggtagactacaattcgaacttagggttacctcagtctttagccattactgcttatttcttttccccaagtcacaaaaaacttgtaagctgctgggttaaagcagaggccacctgtcagatctaccctacccttatttggttacatggcacctgagagtttcactcagaccagggatcttccttaggagggtcaaagtgcagatcagaccatgcaggtaaggtgaaccagctgcacggaccaggttcccgcaaaacattgccagctagtgaggcataatttgctcaaagtatagaaacagcccacctgtgcccactttgaccattggtgaggatagatataaaatcacttcttccaacgaagcctaggtgaaaatctatttataaatggaccacaactctggggtgtcgtttttgtgctgtgacttcctaattattgctaaagaactactgtttagttggtaatggtgtaaaattacattcagctccttcttgtcatataaaaggaatttggagggtgtcgcttaaaattttattccacctgtacatttgtcactttaaaattaaaattgagctggtatgagagaaaaaaaaaaa

SEQ ID NO: 361102 - DNA, 2006 bp, Homo sapiens
ggtttgtatccaatgtctggcacgtggttagatgctcacagatgcctgtagttgaatttcattctagtaaactagtgaaatgattcccatgaggaggtgagccagtggtaatgcccagagtcctggctctatctggttagaggttcacccctggcactgtctcatggtatcctagctggtctcgacttcctgtctggtgcagccggattagtgagaaactttccctctctactggcttctctcccttattcttatcgtgtccctaccaccagtcccttaatatgtttgccctgtgtttcccactttaccaaaggagtaggtagacaggcaagtcagattccaggtagaggatgtatagactggctagttcaagggtttgggggcagaatacctctattactttgtatgtttatatggcaggtttgcttaacaaaacaactgaaacttctctaaaaatctctctctctctctcttttaaagtttaaactcatatcccaggcatatgaagtgctttcagatccaaagaaaagggatgtttatgaccaaggcggagagcaggcaattaaagaaggaggctcaggcagccccagcttctcttcacccatggacatctttgacatgttctttggtggtggtggacggatggctagagagagaagaggcaagaatgttgtacaccagttatctgtaactcttgaagatctatataatggagtcacgaagaaattggccctccagaaaaatgtaatttgtgagaaatgtgaaggtgttggtgggaagaagggatcggtggagaagtgcccgctgtgcaaggggcgggggatgcagatccacatccagcagatcgggccgggcatggtacagcagatccagaccgtgtgcatcgagtgcaagggccagggtgagcgcatcaaccccaaggaccgctgcgagagctgcagcggggccaaggtgatccgtgagaagaagattatcgaggtacatgttgaaaaaggtgaggctgcgcagagctggtgctccacacgggctggaaatgctgtctgggtgctaatcgtgagatacacagactagatgtcagggaagtgagctgtatcacaacatgtattgggtgtgccatgaattcctcttgtttcccagtcttctcttcacccttcctggccttatttccattccatgtcacctgccaaagtgttcttgctgaggtttacttccttgagatcacagacagcctctttatgaggttttctaacgctctgaaagtcttacctggccttggtttgggttagttgccatctcctgacattctcaagccattcctctagaatctttcggagtgtcttcctggtcgcttctgatgctcattggccataagggcttgtgtaagtgtttgtggctgcatgttccctttctccacatttccccatgtgctgcatcagattcccccaaatacagcaccttctcctgctattcattttgcctgatgccatcattttaaggcctttttccattttagctgtcctccaagtattccgatgattctgtggctttccaatccagtaaatatatcctagatcagagatgagaccaaaagtaaaagaatcaacagccaaaccgacacaggtgttattaaaggacttactgtttaaacatgcctaaaccctgtgccttgagtgtgcaagctgacttattagaaaaggacagggctggctgacctgtccctatcagtcccaagtcatgcaccctgtgccccgggaagtgggcggtgaccctatgctggtggtgtggcatcacaggcccggggcagggagtgctgtgtaaacctgggatgtagagccgcattcccccactccctgtgcatgctgggcttggccccacattatgccaagggaagcgggacctcttttgtcattggccatcctagccacccctccctgccttgtgcctgcatgaggttgggagacttgatgaataaagaatccctgaaggactctgttccttcttcaaaa

SEQ ID NO: 361103 - DNA, 881 bp, Homo sapiens
ggtttgtatccaatgtctggcacgtggttagatgctcacagatgcctgtagttgaatttcattctagtaaactagtgaaatgattcccatgaggaggtgagccagtggtaatgcccagagtcctggctctatctggttagaggttcacccctggcactgtctcatggtatcctagctggtctcgacttcctgtctggtgcagccggattagtgagaaactttccctctctactggcttctctcccttattcttatcgtgtccctaccaccagtcccttaatatgtttgccctgtgtttcccactttaccaaaggagtaggtagacaggcaagtcagattccaggtagaggatgtatagactggctagttcaagggtttgggggcagaatacctctattactttgtatgtttatatggcaggtttgcttaacaaaacaactgaaacttctctaaaaatctctctctctctctcttttaaagtttaaactcatatcccaggcatatgaagtgctttcagatccaaagaaaagggatgtttatgaccaaggcggagagcaggcaattaaagaaggaggctcaggcagccccagcttctcttcacccatggacatctttgacatgttctttggtggtggtggacggatggctagagagagaagaggtaaatgcttttaaagaaacataaataagttgtatggtttccacaattatacgtgttgttggaatcaggatagatcatgctttaaaaggatatgattgggccaggcgcggtggttcatgtctgtaatttcagcactttgggaggccaaggtgggagaattgttttaggccaggatttcaagaccaaccggggcaacatagtgatactccccatctcaaaa

SEQ ID NO: 361104 - DNA, 957 bp, Homo sapiens
agcggagtcccacccttcggcgcagggctccggccaacacagccctccaggccgcctactctccagccagccggctccacggacccacggaagggcaagggggcggcgtcggggcggcgggacagttgtcggagggcgccctccaggcccaagccgccttctccggcccccgccatggcccggggcggcagtcagagctggagctccggggaatcagacgggcagccaaaggagcagacgcccgagaagcccagacacaagatggtgaaggagacccagtactatgacatcctgggcgtgaagcccagcgcgtccccggaggagatcaagaaggcctatcggaagctggcgctcaagtaccacccggacaagaacccggatgagggcgagaagggacacggacatctgcaacctgacatcagcttgtactcatattctgggttttcggtgacaagtgacacacagttgatcataagtaccaatcatagactgaaaatgctctgcattttagagacagaagttaaaagcttttccatcctgtttacagaaagtttgctttttatctctaaagaggctcatgacccacctgaataggtgaattgaaggatgaggcattgcaaggaaaggctgctaaccctcccgttcctcctttcacttcttgccattttcttacaaaactttggttgttccgcatgggtcttgagaggtggggccgttatagtagctgatagcagtgtcacttgggccacgtttgaaaccacaccaatcacccatgtagcatttaagacctgtggaaacgacgctggaatcaaaatacctgtctgtgttagttgttccaagctggagaaagctacttcaggacggttggctgaatggcaacagtgatggaatatttatatttagccacatgtgctgaatgtggctgtcacaagtttaaaatgctttcctgtaagacca

SEQ ID NO: 361105 - DNA, 866 bp, Homo sapiens
ggtttgtatccaatgtctggcacgtggttagatgctcacagatgcctgtagttgaatttcattctagtaaactagtgaaatgattcccatgaggaggtgagccagtggtaatgcccagagtcctggctctatctggttagaggttcacccctggcactgtctcatggtatcctagctggtctcgacttcctgtctggtgcagccggattagtgagaaactttccctctctactggcttctctcccttattcttatcgtgtccctaccaccagtcccttaatatgtttgccctgtgtttcccactttaccaaaggagtaggtagacaggcaagtcagattccaggtagaggatgtatagactggctagttcaagggtttgggggcagaatacctctattactttgtatgtttatatggcaggtttgcttaacaaaacaactgaaacttctctaaaaatctctctctctctctcttttaaagtttaaactcatatcccaggcatatgaagtgctttcagatccaaagaaaagggatgtttatgaccaaggcggagagcaggcaattaaagaaggaggctcaggcagccccagcttctcttcacccatggacatctttgacatgttctttggtggtggtggacggatggctagagagagaagaggcaagaatgttgtacaccagttatctgtaactcttgaagatctatataatggagtcacgaagaaattggccctccagaaaaatgtaatttgtgagaaatgtgaagccatgtagttagggaagaagggatcggtggacgaaattgcctacatgcgcgatgtagcgaggggatacagatccacatgccttcagatccatatcgcagc

SEQ ID NO: 361106 - DNA, 371 bp, Homo sapiens
acagtctcctttaaggagagcttgtaggcttctaatttcacatttcagcaagctggctaaagacatgtgggaaagcctgaccctggattcaggtcaaatctcagcactcacaagagtaagttcatgcctctgtgtatacagttagagctgaatatgcttttgttctgaagcttttatttttaaaaaattagacttgacctgtactacatatgtgtaggtttcaccctgtctatacctgtctgggcaggttgtttggtttgttttaaactaatatttattcatagccaggcactgagttagtgtcacataaatgaggcccttggcagtgaggtctggcaggcccatcagcttggagggaagggttctgtgat

SEQ ID NO: 361107 - DNA, 2321 bp, Homo sapiens
ctgtatttcaaaaaaaaagaataaacaggaacacaaaaagccagcagcctggagcagtttagctaaggggttgctgtcctgcacagtcagtaggctctgaaggccatgtctgaaccacagccctgcctgcgaatgaatctcaaggatagtcattggcttactttatttttaaaacctcctctttaaagatttcctcttgaagagacagctcactttctacatagtcccgtatggaagtggactgctgaagaaattagtgtttccattcccctccaccgtctcccccattttttccgaacatttctttgtctttgtccattttcatcgctgagctgaagagcatgctttatcagaaacccttttgtccctttccttttccatgcttagagggaagtttctgacttgggagaacgccttagagttcttggggtctgaactcctctgatgccttccaaagtcacgtagctgtaagacccagcgggtgccagccgggagggtgactccagctcagcagcatgtatggaagtgcattgtgaccatgaaggagtctgccagtggccaagccacctagtgagctccctaccaaggaacctgggtgtcacctgcaggtggccaagagccagtttttatgccaggcaggggactggttggactctattgaggcttcttcctgtctgtggggagcactcctgtccccctcgtggtagggatacctgtcaccccacaaagaggcagggtgacaggtgttggccccattttaggcagacttgggtgtcatgacttctagttcacttgttttaaacctacctgtgatggcagctgcaccatgctgccctcttgacacactgctggagcccagagcacaggccagagtctcagcctgagccccttccccaggcagtacctgacaaggatacctgggattggggccagctttccagtcagatgccacgtttcctttgcccactgccacggggcactagggcctgccgcaggctctcccatgagggagaacgacctctgcaggcccctctgccttcctgcttcctaattgaccctttctctggcaggtgaggtgataaagcacggggacctgagatgcgtgcgcgatgaaggaatgcccatctacaaagcacccctggaaaaagggattctgatcatacagtttttagtaatctttcctgaaaaacactggctttctctggaaaagcttcctcagctggaagctttactccctcctcgacagaaagtgaggattacagatgacatggatcaggtggagctgaaggagttttgtcccaatgagcagaactggcgtcagcacagggaggcctacgaggaggacgaagacgggccccaggctggagtgcagtgccagacggcatgacgtggtgcggggcagcgtggccccaccggactagcacatgatgaatgtaaagttggcacaatgaaaatgacatcgctttaatggccttgtgtttgggatgtcctgtgtatgtgttcagcattcttaattgctgagtgtctttttggcttttcttttggttgtaacttaagttatagcttaatttatatttaaatgttttaagtataaatcacctctagtctgcatatggaatctgttcatttctattttcaggatatacttttgagatgtcagtgattgcaccaacactttgtgcttctagtggctttgccataattcagtgtcaccaataaggcacagcccagttagcagcttagcccccctagcaaaccccaaggcacaaagtgggcatcctgactcatctctaggtctgtggtttctcccctcttcccttggcagagttattgagggcatgatctcagggctgctaagataacatttctgaggattctagatgatcctcttaaagaataaaagcacatccgtggatcggacatggctgcatgtgcctgcttaacagggccaacttagttcctactgttctgtgcccttcagtggatggaacgtgagtgtctgatcatctctcttggaagttttctgaaccttccaagctctgtggtgaggacaaaccagtgtttgaatcatatgctgataactgtttgcctgtgaccctcacaccttgttcttcagggttttaatgattttctgttgacaacttttgcaatgctttcccaccaaagtgcttacttgtaaagaaaactaaatccttctgtgtccccggcagcctcagtgcagcaacagaagccaagggagaatgaaggtggaaaacactggggagttctattgcctttgcagaccactcaagtcaccccggattactggttagagaagctgc

SEQ ID NO: 361108 - DNA, 2258 bp, Homo sapiens
ctgtatttcaaaaaaaaagaataaacaggaacacaaaaagccagcagcctggagcagtttagctaaggggttgctgtcctgcacagtcagtaggctctgaaggccatgtctgaaccacagccctgcctgcgaatgaatctcaaggatagtcattggcttactttatttttaaaacctcctctttaaagatttcctcttgaagagacagctcactttctacatagtcccgtatggaagtggactgctgaagaaattagtgtttccattcccctccaccgtctcccccattttttccgaacatttctttgtctttgtccattttcatcgctgagctgaagagcatgctttatcagaaacccttttgtccctttccttttccatgcttagagggaagtttctgacttgggagaacgccttagagttcttggggtctgaactcctctgatgccttccaaagtcacgtagctgtaagacccagcgggtgccagccgggagggtgactccagctcagcagcatgtatggaagtgcattgtgaccatgaaggagtctgccagtggccaagccacctagtgagctccctaccaaggaacctgggtgtcacctgcaggtggccaagagccagtttttatgccaggcaggggactggttggactctattgaggcttcttcctgtctgtggggagcactcctgtccccctcgtggtagggatacctgtcaccccacaaagaggcagggtgacaggtgttggccccattttaggcagacttgggtgtcatgacttctagttcacttgttttaaacctacctgtgatggcagctgcaccatgctgccctcttgacacactgctggagcccagagcacaggccagagtctcagcctgagccccttccccaggcagtacctgacaaggatacctgggattggggccagctttccagtcagatgccacgtttcctttgcccactgccacggggcactagggcctgccgcaggctctcccatgagggagaacgacctctgcaggcccctctgccttcctgcttcctaattgaccctttctctggcaggtgaggtgataaagcacggggacctgagatgcgtgcgcgatgaaggaatgcccatctacaaagcacccctggaaaaagggattctgatcatacagtttttagtaatctttcctgaaaaacactggctttctctggaaaagcttcctcagctggaagctttactccctcctcgacagaaagtgaggattacagatgacatggatcaggtggagctgaaggagttttgtcccaatgagcagaactggcgtcagcacagggaggcctacgaggaggacgaagacgggccccaggctggagtgcagtgccagacggcatgacgtggtgcggggcagcgtggccccaccggactagcacatgatgaatgtaaagttggcacaatgaaaatgacatcgctttaatggccttgtgtttgggatgtcctgtgtatgtgttcagcattcttaattgctgagtgtctttttggcttttcttttggttgtaacttaagttatagcttaatttatatttaaatgttttaagtataaatcacctctagtctgcatatggaatctgttcatttctattttcaggatatacttttgagatgtcagtgattgcaccaacactttgtgcttctagtggctttgccataattcagtgtcaccaataaggcacagcccagttagcagcttagcccccctagcaaaccccaaggcacaaagtgggcatcctgactcatctctaggtctgtggtttctcccctcttcccttggcagagttattgagggcatgatctcagggctgctaagataacatttctgaggattctagatgatcctcttaaagaataaaagcacatccgtggatcggacatggctgcatgtgcctgcttaacagggccaacttagttcctactgttctgtgcccactttgaccattggtgaggatagatataaaatcacttcttccaacgaagcctaggtgaaaatctatttataaatggaccacaactctggggtgtcgtttttgtgctgtgacttcctaattattgctaaagaactactgtttagttggtaatggtgtaaaattacattcagctccttcttgtcatataaaaggaatttggagggtgtcgcttaaaattttattccacctgtacatttgtcactttaaaattaaaattgagctggtatgagagaaaaaaaaaaa

SEQ ID NO: 361109 - DNA, 2335 bp, Homo sapiens
agcggagtcccacccttcggcgcagggctccggccaacacagccctccaggccgcctactctccagccagccggctccacggacccacggaagggcaagggggcggcgtcggggcggcgggacagttgtcggagggcgccctccaggcccaagccgccttctccggcccccgccatggcccggggcggcagtcagagctggagctccggggaatcagacgggcagccaaaggagcagacgcccgagaagcccagacacaagatggtgaaggagacccagtactatgacatcctgggcgtgaagcccagcgcgtccccggaggagatcaagaaggcctatcggaagctggcgctcaagtaccacccggacaagaacccggatgagggcgagaagtttaaactcatatcccaggcatatgaagtgctttcagatccaaagaaaagggatgtttatgaccaaggcggagagcaggcaattaaagaaggaggctcaggcagccccagcttctcttcacccatggacatctttgacatgttctttggtggtggtggacggatggctagagagagaagaggcaagaatgttgtacaccagttatctgtaactcttgaagatctatataatggagtcacgaagaaattggccctccagaaaaatgtaatttgtgagaaatgtgaaggtgttggtgggaagaagggatcggtggagaagtgcccgctgtgcaaggggcgggggatgcagatccacatccagcagatcgggccgggcatggtacagcagatccagaccgtgtgcatcgagtgcaagggccagggtgagcgcatcaaccccaaggaccgctgcgagagctgcagcggggccaaggtgatccgtgagaagaagattatcgaggtacatgttgaaaaagacaggtcatgcacaagcatgggcaacaagcatactcatttccatggcagcacaggcaccatccagcgcagcctagagcatggcagccgtggctgcatgtccatccatctgtcgcttgcatcccgacaggcatcacatagtagtacttatccagcagcacgcaggccgatagacttagactccatgcacacactgcaccacattcaagcttatctgcaagctccttccgatcggcttcacagcaagcacgataacaaaaacgatttgggagcaatcgcacttcgtcgcttccttagcatccagaagcagcgtgacggtcgataacagcaacggaggacctgacgcatgcgtgcgacgatgacacggaatgcccatactaccaacgcacccctggaaacaaagcgggacttccttgcactccataacaggatatcacaagaggatacactctaatacaccatgaaaaaaacaacatgagactaagcatcatggaaaaacagcattcacacaagacatgagcacgactctatacatcacgtccctacgacccgacacagtgaagggatataacacggaagtgacccagtagacactcacagtaaggacgacgcaagcaacgagaaacattaccgacacacaaagatgaagccagcaaacatgagcgggtcaaagcgccggaggaacaggcccaaagaagagacacgagacccaaagaacagggacacaccaaaggcaagaggagcagcacagagaaccgcacaggacctgcacgtcaggaatgcccgagaccacagagaaggacacacgcacacggaaaagcaacgcagcaatgaaagaaaaagaacacagatgaggccacacatgcacagaacgaaaccacaacaataacaaagacaacagatagcgataaaaggaaatagacccaaagcagacaagacaataaacgacacataaaactacgaacatcgaaccacaacgtacgcagtaaaggcagcagcaagaataaagaagacagttaatagcaacctacaaaccaacatgcaccacatacaacaacctaactagtatacaacgtcaaatataacggactaagagatctcagaactcgaaagcactgtagcacaagcacacaaagacgacacacatcagatcgaacctgcggcacaaccagacgcgacacacgcagcccagaacggaaaactcaaagacagagagacgacagagccatagacacaaaccacgagcagcacagacgacgacacagcgagaactgacgacacgtgacacgcggacggacgaacagtgacagccagagaagagagcactgaaagaagaaagagagacaaggacgaaagagacaagaagcaccaagtagaacggcaacgaagacgccatagagactcgttgccgggaagcaagaaaaacgaaa

SEQ ID NO: 361110 - DNA, 1865 bp, Homo sapiens
agcggagtcccacccttcggcgcagggctccggccaacacagccctccaggccgcctactctccagccagccggctccacggacccacggaagggcaagggggcggcgtcggggcggcgggacagttgtcggagggcgccctccaggcccaagccgccttctccggcccccgccatggcccggggcggcagtcagagctggagctccggggaatcagacgggcagccaaaggagcagacgcccgagaagcccagacacaagatggtgaaggagacccagtactatgacatcctgggcgtgaagcccagcgcgtccccggaggagatcaagaaggcctatcggaagctggcgctcaagtaccacccggacaagaacccggatgagggcgagaagtttaaactcatatcccaggcatatgaagtgctttcagatccaaagaaaagggatgtttatgaccaaggcggagagcaggcaattaaagaaggaggctcaggcagccccagcttctcttcacccatggacatctttgacatgttctttggtggtggtggacggatggctagagagagaagaggcaagaatgttgtacaccagttatctgtaactcttgaagatctatataatggagtcacgaagaaattggccctccagaaaaatgtaatttgtgagaaatgtgaaggtgttggtgggaagaagggatcggtggagaagtgcccgctgtgcaaggggcgggggatgcagatccacatccagcagatcgggccgggcatggtacagcagatccagaccgtgtgcatcgagtgcaagggccagggtgagcgcatcaaccccaaggaccgctgcgagagctgcagcggggccaaggtgatccgtgagaagaagattatcgaggtacatgttgaaaaaggtgaggctgcgcagagctggtgctccacacgggctggaaatgctgtctgggtgctaatcgtgagatacacagactagatgtcagggaagtgagctgtatcacaacatgtattgggtgtgccatgaattcctcttgtttcccagtcttctcttcacccttcctggccttatttccattccatgtcacctgccaaagtgttcttgctgaggtttacttccttgagatcacagacagcctctttatgaggttttctaacgctctgaaagtcttacctggccttggtttgggttagttgccatctcctgacattctcaagccattcctctagaatctttcggagtgtcttcctggtcgcttctgatgctcattggccataagggcttgtgtaagtgtttgtggctgcatgttccctttctccacatttccccatgtgctgcatcagattcccccaaatacagcaccttctcctgctattcattttgcctgatgccatcattttaaggcctttttccattttagctgtcctccaagtattccgatgattctgtggctttccaatccagtaaatatatcctagatcagagatgagaccaaaagtaaaagaatcaacagccaaaccgacacaggtgttattaaaggacttactgtttaaacatgcctaaaccctgtgccttgagtgtgcaagctgacttattaggccccgggaagtgggcggtgaccctatgctggtggtgtggcatcacaggcccggggcagggagtgctgtgtaaacctgggatgtagagccgcattcccccactccctgtgcatgctgggcttggccccacattatgccaagggaagcgggacctcttttgtcattggccatcctagccacccctccctgccttgtgcctgcatgaggttgggagacttgatgaataaagaatccctgaaggactctgttccttcttcaaaa

SEQ ID NO: 361111 - DNA, 1295 bp, Homo sapiens
agcggagtcccacccttcggcgcagggctccggccaacacagccctccaggccgcctactctccagccagccggctccacggacccacggaagggcaagggggcggcgtcggggcggcgggacagttgtcggagggcgccctccaggcccaagccgccttctccggcccccgccatggcccggggcggcagtcagagctggagctccggggaatcagacgggcagccaaaggagcagacgcccgagaagcccagacacaagatggtgaaggagacccagtactatgacatcctgggcgtgaagcccagcgcgtccccggaggagatcaagaaggcctatcggaagctggcgctcaagtaccacccggacaagaacccggatgagggcgagaagtttaaactcatatcccaggcatatgaagtgctttcagatccaaagaaaagggatgtttatgaccaaggcggagagcaggcaattaaagaaggaggctcaggcagccccagcttctcttcacccatggacatctttgacatgttctttggtggtggtggacggatggctagagagagaagaggcaagaatgttgtacaccagttatctgtaactcttgaagatctatataatggagtcacgaagaaattggccctccagaaaaatgtaatttgtgagaaatgtgaaggtgttggtgggaagaagggatcggtggagaagtgcccgctgtgcaaggggcgggggatgcagatccacatccagcagatcgggccgggcatggtacagcagatccagaccgtgtgcatcgagtgcaagggccagggtgagcgcatcaaccccaaggaccgctgcgagagctgcagcggggccaaggtgatccgtgagaagaagattatcgaggtacatgttgaaaaaggtatgaaagatgggcaaaagatactatttcatggagaaggagatcaggagcctgagctggagcctggtgatgtcataattgtgcttgatcagaaggatcatagtgtctttcagagacgaggccatgacttgatcatgaaaatgaaaattcagctttctgaagctctttgtggcttcaagaagacgataaaaacattggacaatcgaattcttgttattacatccaaagcaggtgaggtgataaagcacggggacctgagatgcgtgcgcgatgaaggaatgcccatctacaaagcacccctggaaaaagggattctgatcatacagtttttagtaatctttcctgaagaacactgcacgtggatcacaatgcacttgataagatcctg

SEQ ID NO: 361112 - DNA, 415 bp, Homo sapiens
gaatcgggaaactgaggcacacacaaacagttgtttacttgctgggaacgactggctcatattctctgttgatgcataaaccctagggatgagtgtctttaatctgagctggtaccttggacaaacgccgtgcctctcttgagaatgactagctggatttgttctgtgcacctactgcctacctgataaaagcgtcagatagtgaataatcccattttctttattaaacagggacacggacatctgcaacctgacatcagcttgtactcatattctgggttttcggtgacaagtgacacacagttgatcataagtaccaatcatagactgaaaatgctctgcattttagagacagaagttaaaagcttttccatcctgtttacagaaagtttgctttttatctctaaagaggctc

SEQ ID NO: 361113 - DNA, 3198 bp, Homo sapiens
agcggagtcccacccttcggcgcagggctccggccaacacagccctccaggccgcctactctccagccagccggctccacggacccacggaagggcaagggggcggcgtcggggcggcgggacagttgtcggagggcgccctccaggcccaagccgccttctccggcccccgccatggcccggggcggcagtcagagctggagctccggggaatcagacgggcagccaaaggagcagacgcccgagaagcccagacacaagatggtgaaggagacccagtactatgacatcctgggcgtgaagcccagcgcgtccccggaggagatcaagaaggcctatcggaagctggcgctcaagtaccacccggacaagaacccggatgagggcgagaagtttaaactcatatcccaggcatatgaagtgctttcagatccaaagaaaagggatgtttatgaccaaggcggagagcaggcaattaaagaaggaggctcaggcagccccagcttctcttcacccatggacatctttgacatgttctttggtggtggtggacggatggctagagagagaagaggcaagaatgttgtacaccagttatctgtaactcttgaagatctatataatggagtcacgaagaaattggccctccagaaaaatgtaatttgtgagaaatgtgaaggtgttggtgggaagaagggatcggtggagaagtgcccgctgtgcaaggggcgggggatgcagatccacatccagcagatcgggccgggcatggtacagcagatccagaccgtgtgcatcgagtgcaagggccagggtgagcgcatcaaccccaaggaccgctgcgagagctgcagcggggccaaggtgatccgtgagaagaagattatcgaggtacatgttgaaaaaggtatgaaagatgggcaaaagatactatttcatggagaaggagatcaggagcctgagctggagcctggtgatgtcataattgtgcttgatcagaaggatcatagtgtctttcagagacgaggccatgacttgatcatgaaaatgaaaattcagctttctgaagctctttgtggcttcaagaagacgataaaaacattggacaatcgaattcttgttattacatccaaagcaggtgaggtgataaagcacggggacctgagatgcgtgcgcgatgaaggaatgcccatctacaaagcacccctggaaaaagggattctgatcatacagtttttagtaatctttcctgaaaaacactggctttctctggaaaagcttcctcagctggaagctttactccctcctcgacagaaagtgaggattacagatgacatggatcaggtggagctgaaggagttttgtcccaatgagcagaactggcgtcagcacagggaggcctacgaggaggacgaagacgggccccaggctggagtgcagtgccagacggcatgacgtggtgcggggcagcgtggccccaccggactagcacatgatgaatgtaaagttggcacaatgaaaatgacatcgctttaatggccttgtgtttgggatgtcctgtgtatgtgttcagcattcttaattgctgagtgtctttttggcttttcttttggttgtaacttaagttatagcttaatttatatttaaatgttttaagtataaatcacctctagtctgcatatggaatctgttcatttctattttcaggatatacttttgagatgtcagtgattgcaccaacactttgtgcttctagtggctttgccataattcagtgtcaccaataaggcacagcccagttagcagcttagcccccctagcaaaccccaaggcacaaagtgggcatcctgactcatctctaggtctgtggtttctcccctcttcccttggcagagttattgagggcatgatctcagggctgctaagataacatttctgaggattctagatgatcctcttaaagaataaaagcacatccgtggatcggacatggctgcatgtgcctgcttaacagggccaacttagttcctactgttctgtgcccttcagtggatggaacgtgagtgtctgatcatctctcttggaagttttctgaaccttccaagctctgtggtgaggacaaaccagtgtttgaatcatatgctgataactgtttgcctgtgaccctcacaccttgttcttcagggttttaatgattttctgttgacaacttttgcaatgctttcccaccaaagtgcttacttgtaaagaaaactaaatccttctgtgtccccggcagcctcagtgcagcaacagaagccaagggagaatgctgctggtttggcccatggcacagccagcttctctgaccagtaatccggggtgacttgagggtctgcaaaggcatagaactccccagtgttttccacctcattctcccagattgagctcccttccaaaggatcgttcctctcattgcacagccatattacaaagggtttcctgctcaagtgatgttttggtaagaacttcgctgagttccactgtggattacagtttgtatggactactactgtaaattatagcttgtttggagggatattagtcattattttattcatgacaggtagactacaattcgaacttagggttacctcagtctttagccattactgcttatttcttttccccaagtcacaaaaaacttgtaagctgctgggttaaagcagaggccacctgtcagatctaccctacccttatttggttacatggcacctgagagtttcactcagaccagggatcttccttaggagggtcaaagtgcagatcagaccatgcaggtaaggtgaaccagctgcacggaccaggttcccgcaaaacattgccagctagtgaggcataatttgctcaaagtatagaaacagcccacctgtgcccactttgaccattggtgaggatagatataaaatcacttcttccaacgaagcctaggtgaaaatctatttataaatggaccacaactctggggtgtcgtttttgtgctgtgacttcctaattattgctaaagaactactgtttagttggtaatggtgtaaaattacattcagctccttcttgtcatataaaaggaatttggagggtgtcgcttaaaattttattccacctgtacatttgtcactttaaaattaaaattgagctggtatgagagaaaaaaaaaaa

SEQ ID NO: 361114 - DNA, 3117 bp, Homo sapiens
gaagtcggtccggcgcggggcggggggcgggcgggagctacaagcggcggcggcggcggcgaccgtgaccgtgacgcgcgagcgggcggcgggggcgcgggccaggggcgcgggccagggtgccggcaggggcgtccggggcgctctgaccggcctcgcccgcccccccgcagacacaagatggtgaaggagacccagtactatgacatcctgggcgtgaagcccagcgcgtccccggaggagatcaagaaggcctatcggaagctggcgctcaagtaccacccggacaagaacccggatgagggcgagaagtttaaactcatatcccaggcatatgaagtgctttcagatccaaagaaaagggatgtttatgaccaaggcggagagcaggcaattaaagaaggaggctcaggcagccccagcttctcttcacccatggacatctttgacatgttctttggtggtggtggacggatggctagagagagaagaggcaagaatgttgtacaccagttatctgtaactcttgaagatctatataatggagtcacgaagaaattggccctccagaaaaatgtaatttgtgagaaatgtgaaggtgttggtgggaagaagggatcggtggagaagtgcccgctgtgcaaggggcgggggatgcagatccacatccagcagatcgggccgggcatggtacagcagatccagaccgtgtgcatcgagtgcaagggccagggtgagcgcatcaaccccaaggaccgctgcgagagctgcagcggggccaaggtgatccgtgagaagaagattatcgaggtacatgttgaaaaaggtatgaaagatgggcaaaagatactatttcatggagaaggagatcaggagcctgagctggagcctggtgatgtcataattgtgcttgatcagaaggatcatagtgtctttcagagacgaggccatgacttgatcatgaaaatgaaaattcagctttctgaagctctttgtggcttcaagaagacgataaaaacattggacaatcgaattcttgttattacatccaaagcaggtgaggtgataaagcacggggacctgagatgcgtgcgcgatgaaggaatgcccatctacaaagcacccctggaaaaagggattctgatcatacagtttttagtaatctttcctgaaaaacactggctttctctggaaaagcttcctcagctggaagctttactccctcctcgacagaaagtgaggattacagatgacatggatcaggtggagctgaaggagttttgtcccaatgagcagaactggcgtcagcacagggaggcctacgaggaggacgaagacgggccccaggctggagtgcagtgccagacggcatgacgtggtgcggggcagcgtggccccaccggactagcacatgatgaatgtaaagttggcacaatgaaaatgacatcgctttaatggccttgtgtttgggatgtcctgtgtatgtgttcagcattcttaattgctgagtgtctttttggcttttcttttggttgtaacttaagttatagcttaatttatatttaaatgttttaagtataaatcacctctagtctgcatatggaatctgttcatttctattttcaggatatacttttgagatgtcagtgattgcaccaacactttgtgcttctagtggctttgccataattcagtgtcaccaataaggcacagcccagttagcagcttagcccccctagcaaaccccaaggcacaaagtgggcatcctgactcatctctaggtctgtggtttctcccctcttcccttggcagagttattgagggcatgatctcagggctgctaagataacatttctgaggattctagatgatcctcttaaagaataaaagcacatccgtggatcggacatggctgcatgtgcctgcttaacagggccaacttagttcctactgttctgtgcccttcagtggatggaacgtgagtgtctgatcatctctcttggaagttttctgaaccttccaagctctgtggtgaggacaaaccagtgtttgaatcatatgctgataactgtttgcctgtgaccctcacaccttgttcttcagggttttaatgattttctgttgacaacttttgcaatgctttcccaccaaagtgcttacttgtaaagaaaactaaatccttctgtgtccccggcagcctcagtgcagcaacagaagccaagggagaatgctgctggtttggcccatggcacagccagcttctctgaccagtaatccggggtgacttgagggtctgcaaaggcatagaactccccagtgttttccacctcattctcccagattgagctcccttccaaaggatcgttcctctcattgcacagccatattacaaagggtttcctgctcaagtgatgttttggtaagaacttcgctgagttccactgtggattacagtttgtatggactactactgtaaattatagcttgtttggagggatattagtcattattttattcatgacaggtagactacaattcgaacttagggttacctcagtctttagccattactgcttatttcttttccccaagtcacaaaaaacttgtaagctgctgggttaaagcagaggccacctgtcagatctaccctacccttatttggttacatggcacctgagagtttcactcagaccagggatcttccttaggagggtcaaagtgcagatcagaccatgcaggtaaggtgaaccagctgcacggaccaggttcccgcaaaacattgccagctagtgaggcataatttgctcaaagtatagaaacagcccacctgtgcccactttgaccattggtgaggatagatataaaatcacttcttccaacgaagcctaggtgaaaatctatttataaatggaccacaactctggggtgtcgtttttgtgctgtgacttcctaattattgctaaagaactactgtttagttggtaatggtgtaaaattacattcagctccttcttgtcatataaaaggaatttggagggtgtcgcttaaaattttattccacctgtacatttgtcactttaaaattaaaattgagctggtatgagagaaaaaaaaaaa

SEQ ID NO: 361115 - DNA, 2920 bp, Homo sapiens
acagtctcctttaaggagagcttgtaggcttctaatttcacatttcagcaagctggctaaagacatgtgggaaagcctgaccctggattcaggtcaaatctcagcactcacaagatttaaactcatatcccaggcatatgaagtgctttcagatccaaagaaaagggatgtttatgaccaaggcggagagcaggcaattaaagaaggaggctcaggcagccccagcttctcttcacccatggacatctttgacatgttctttggtggtggtggacggatggctagagagagaagaggcaagaatgttgtacaccagttatctgtaactcttgaagatctatataatggagtcacgaagaaattggccctccagaaaaatgtaatttgtgagaaatgtgaaggtgttggtgggaagaagggatcggtggagaagtgcccgctgtgcaaggggcgggggatgcagatccacatccagcagatcgggccgggcatggtacagcagatccagaccgtgtgcatcgagtgcaagggccagggtgagcgcatcaaccccaaggaccgctgcgagagctgcagcggggccaaggtgatccgtgagaagaagattatcgaggtacatgttgaaaaaggtatgaaagatgggcaaaagatactatttcatggagaaggagatcaggagcctgagctggagcctggtgatgtcataattgtgcttgatcagaaggatcatagtgtctttcagagacgaggccatgacttgatcatgaaaatgaaaattcagctttctgaagctctttgtggcttcaagaagacgataaaaacattggacaatcgaattcttgttattacatccaaagcaggtgaggtgataaagcacggggacctgagatgcgtgcgcgatgaaggaatgcccatctacaaagcacccctggaaaaagggattctgatcatacagtttttagtaatctttcctgaaaaacactggctttctctggaaaagcttcctcagctggaagctttactccctcctcgacagaaagtgaggattacagatgacatggatcaggtggagctgaaggagttttgtcccaatgagcagaactggcgtcagcacagggaggcctacgaggaggacgaagacgggccccaggctggagtgcagtgccagacggcatgacgtggtgcggggcagcgtggccccaccggactagcacatgatgaatgtaaagttggcacaatgaaaatgacatcgctttaatggccttgtgtttgggatgtcctgtgtatgtgttcagcattcttaattgctgagtgtctttttggcttttcttttggttgtaacttaagttatagcttaatttatatttaaatgttttaagtataaatcacctctagtctgcatatggaatctgttcatttctattttcaggatatacttttgagatgtcagtgattgcaccaacactttgtgcttctagtggctttgccataattcagtgtcaccaataaggcacagcccagttagcagcttagcccccctagcaaaccccaaggcacaaagtgggcatcctgactcatctctaggtctgtggtttctcccctcttcccttggcagagttattgagggcatgatctcagggctgctaagataacatttctgaggattctagatgatcctcttaaagaataaaagcacatccgtggatcggacatggctgcatgtgcctgcttaacagggccaacttagttcctactgttctgtgcccttcagtggatggaacgtgagtgtctgatcatctctcttggaagttttctgaaccttccaagctctgtggtgaggacaaaccagtgtttgaatcatatgctgataactgtttgcctgtgaccctcacaccttgttcttcagggttttaatgattttctgttgacaacttttgcaatgctttcccaccaaagtgcttacttgtaaagaaaactaaatccttctgtgtccccggcagcctcagtgcagcaacagaagccaagggagaatgctgctggtttggcccatggcacagccagcttctctgaccagtaatccggggtgacttgagggtctgcaaaggcatagaactccccagtgttttccacctcattctcccagattgagctcccttccaaaggatcgttcctctcattgcacagccatattacaaagggtttcctgctcaagtgatgttttggtaagaacttcgctgagttccactgtggattacagtttgtatggactactactgtaaattatagcttgtttggagggatattagtcattattttattcatgacaggtagactacaattcgaacttagggttacctcagtctttagccattactgcttatttcttttccccaagtcacaaaaaacttgtaagctgctgggttaaagcagaggccacctgtcagatctaccctacccttatttggttacatggcacctgagagtttcactcagaccagggatcttccttaggagggtcaaagtgcagatcagaccatgcaggtaaggtgaaccagctgcacggaccaggttcccgcaaaacattgccagctagtgaggcataatttgctcaaagtatagaaacagcccacctgtgcccactttgaccattggtgaggatagatataaaatcacttcttccaacgaagcctaggtgaaaatctatttataaatggaccacaactctggggtgtcgtttttgtgctgtgacttcctaattattgctaaagaactactgtttagttggtaatggtgtaaaattacattcagctccttcttgtcatataaaaggaatttggagggtgtcgcttaaaattttattccacctgtacatttgtcactttaaaattaaaattgagctggtatgagagaaaaaaaaaaa

SEQ ID NO: 361116 - DNA, 3285 bp, Homo sapiens
ggtttgtatccaatgtctggcacgtggttagatgctcacagatgcctgtagttgaatttcattctagtaaactagtgaaatgattcccatgaggaggtgagccagtggtaatgcccagagtcctggctctatctggttagaggttcacccctggcactgtctcatggtatcctagctggtctcgacttcctgtctggtgcagccggattagtgagaaactttccctctctactggcttctctcccttattcttatcgtgtccctaccaccagtcccttaatatgtttgccctgtgtttcccactttaccaaaggagtaggtagacaggcaagtcagattccaggtagaggatgtatagactggctagttcaagggtttgggggcagaatacctctattactttgtatgtttatatggcaggtttgcttaacaaaacaactgaaacttctctaaaaatctctctctctctctcttttaaagtttaaactcatatcccaggcatatgaagtgctttcagatccaaagaaaagggatgtttatgaccaaggcggagagcaggcaattaaagaaggaggctcaggcagccccagcttctcttcacccatggacatctttgacatgttctttggtggtggtggacggatggctagagagagaagaggcaagaatgttgtacaccagttatctgtaactcttgaagatctatataatggagtcacgaagaaattggccctccagaaaaatgtaatttgtgagaaatgtgaaggtgttggtgggaagaagggatcggtggagaagtgcccgctgtgcaaggggcgggggatgcagatccacatccagcagatcgggccgggcatggtacagcagatccagaccgtgtgcatcgagtgcaagggccagggtgagcgcatcaaccccaaggaccgctgcgagagctgcagcggggccaaggtgatccgtgagaagaagattatcgaggtacatgttgaaaaaggtatgaaagatgggcaaaagatactatttcatggagaaggagatcaggagcctgagctggagcctggtgatgtcataattgtgcttgatcagaaggatcatagtgtctttcagagacgaggccatgacttgatcatgaaaatgaaaattcagctttctgaagctctttgtggcttcaagaagacgataaaaacattggacaatcgaattcttgttattacatccaaagcaggtgaggtgataaagcacggggacctgagatgcgtgcgcgatgaaggaatgcccatctacaaagcacccctggaaaaagggattctgatcatacagtttttagtaatctttcctgaaaaacactggctttctctggaaaagcttcctcagctggaagctttactccctcctcgacagaaagtgaggattacagatgacatggatcaggtggagctgaaggagttttgtcccaatgagcagaactggcgtcagcacagggaggcctacgaggaggacgaagacgggccccaggctggagtgcagtgccagacggcatgacgtggtgcggggcagcgtggccccaccggactagcacatgatgaatgtaaagttggcacaatgaaaatgacatcgctttaatggccttgtgtttgggatgtcctgtgtatgtgttcagcattcttaattgctgagtgtctttttggcttttcttttggttgtaacttaagttatagcttaatttatatttaaatgttttaagtataaatcacctctagtctgcatatggaatctgttcatttctattttcaggatatacttttgagatgtcagtgattgcaccaacactttgtgcttctagtggctttgccataattcagtgtcaccaataaggcacagcccagttagcagcttagcccccctagcaaaccccaaggcacaaagtgggcatcctgactcatctctaggtctgtggtttctcccctcttcccttggcagagttattgagggcatgatctcagggctgctaagataacatttctgaggattctagatgatcctcttaaagaataaaagcacatccgtggatcggacatggctgcatgtgcctgcttaacagggccaacttagttcctactgttctgtgcccttcagtggatggaacgtgagtgtctgatcatctctcttggaagttttctgaaccttccaagctctgtggtgaggacaaaccagtgtttgaatcatatgctgataactgtttgcctgtgaccctcacaccttgttcttcagggttttaatgattttctgttgacaacttttgcaatgctttcccaccaaagtgcttacttgtaaagaaaactaaatccttctgtgtccccggcagcctcagtgcagcaacagaagccaagggagaatgctgctggtttggcccatggcacagccagcttctctgaccagtaatccggggtgacttgagggtctgcaaaggcatagaactccccagtgttttccacctcattctcccagattgagctcccttccaaaggatcgttcctctcattgcacagccatattacaaagggtttcctgctcaagtgatgttttggtaagaacttcgctgagttccactgtggattacagtttgtatggactactactgtaaattatagcttgtttggagggatattagtcattattttattcatgacaggtagactacaattcgaacttagggttacctcagtctttagccattactgcttatttcttttccccaagtcacaaaaaacttgtaagctgctgggttaaagcagaggccacctgtcagatctaccctacccttatttggttacatggcacctgagagtttcactcagaccagggatcttccttaggagggtcaaagtgcagatcagaccatgcaggtaaggtgaaccagctgcacggaccaggttcccgcaaaacattgccagctagtgaggcataatttgctcaaagtatagaaacagcccacctgtgcccactttgaccattggtgaggatagatataaaatcacttcttccaacgaagcctaggtgaaaatctatttataaatggaccacaactctggggtgtcgtttttgtgctgtgacttcctaattattgctaaagaactactgtttagttggtaatggtgtaaaattacattcagctccttcttgtcatataaaaggaatttggagggtgtcgcttaaaattttattccacctgtacatttgtcactttaaaattaaaattgagctggtatgagagaaaaaaaaaaa

SEQ ID NO: 361117 - DNA, 1780 bp, Homo sapiens
agcggagtcccacccttcggcgcagggctccggccaacacagccctccaggccgcctactctccagccagccggctccacggacccacggaagggcaagggggcggcgtcggggcggcgggacagttgtcggagggcgccctccaggcccaagccgccttctccggcccccgccatggcccggggcggcagtcagagctggagctccggggaatcagacgggcagccaaaggagcagacgcccgagaagcccagacacaagatggtgaaggagacccagtactatgacatcctgggcgtgaagcccagcgcgtccccggaggagatcaagaaggcctatcggaagctggcgctcaagtaccacccggacaagaacccggatgagggcgagaagtttaaactcatatcccaggcatatgaagtgctttcagatccaaagaaaagggatgtttatgaccaaggcggagagcaggcaattaaagaaggaggctcaggcagccccagcttctcttcacccatggacatctttgacatgttctttggtggtggtggacggatggctagagagagaagaggcaagaatgttgtacaccagttatctgtaactcttgaagatctatataatggagtcacgaagaaattggccctccagaaaaatgtaatttgtgagaaatgtgaaggtgttggtgggaagaagggatcggtggagaagtgcccgctgtgcaaggggcgggggatgcagatccacatccagcagatcgggccgggcatggtacagcagatccagaccgtgtgcatcgagtgcaagggccagggtgagcgcatcaaccccaaggaccgctgcgagagctgcagcggggccaaggtgatccgtgagaagaagattatcgaggtacatgttgaaaaaggtatgaaagatgggcaaaagatactatttcatggagaaggagatcaggagcctgagctggagcctggtgatgtcataattgtgcttgatcagaaggatcatagtgtctttcagagacgaggccatgacttgatcatgaaaatgaaaattcagctttctgaagctctttgtggcttcaagaagacgataaaaacattggacaatcgaattcttgttattacatccaaagcaggtgaggtgataaagcacggggacctgagatgcgtgcgcgatgaaggaatgcccatctacaaagcacccctggaaaaagggattctgatcatacagtttttagtaatctttcctgaaaaacactggctttctctggaaaagcttcctcagctggaagctttactccctcctcgacagaaagtgaggattacagatgacatggatcaggtggagctgaaggagttttgtcccaatgagcagaactggcgtcagcacagggaggcctacgaggaggacgaagacgggccccaggttcccgcaaaacattgccagctagtgaggcataatttgctcaaagtatagaaacagcccacctgtgcccactttgaccattggtgaggatagatataaaatcacttcttccaacgaagcctaggtgaaaatctatttataaatggaccacaactctggggtgtcgtttttgtgctgtgacttcctaattattgctaaagaactactgtttagttggtaatggtgtaaaattacattcagctccttcttgtcatataaaaggaatttggagggtgtcgcttaaaattttattccacctgtacatttgtcactttaaaattaaaattgagctggtatgagagaaaaaaaaaaa

SEQ ID NO: 361118 - DNA, 570 bp, Homo sapiens
  misc_feature (22)..(22): n is a, c, g, or t
tacgatcgagctcggtaccganctcgacagtgtgcaggtggtggatgaaaaattgcctggcctacttggcaactttcctggcccttttgaagaggaaatgaagggtattgccgctgttactgatatacctttaggtaaagttcacttagaagctttaaaaaaaaaagtaattaaattcttttacaagtttccattgaggtgtgatatacatacagcaaagtgcacaggtcttagatatacagctcagtgaagcttcagaaatgcatgcatgcatgtagccatgactcagatcaagatacggaagagcccagcactccacgatgctccatcatgcccctttgcagaaaatactgcctcctccagtaaacactattctgatgtcactatagattagttttgcctcttcgtgaactttgtataaatagaactgaacaatatgaactgtcctgtgtgatttcttgtatttcattatgggtggtgtgctattgtatcaacagggtatttgggtggttttcagatttgtgatattaacaataaaggaattataaatattgtagtacaaaatggggg

SEQ ID NO: 361119 - DNA, 311 bp, Homo sapiens
  misc_feature (43)..(44): n is a, c, g, or t
gcggccgcctactactatctactgctcgaattcaagcttctanngatgtacggggacatgtaataaacaggtttttagtttgttcttcagattgatagggagttttaaagaaattttagtagttactaaaattatgttactgtatttttcagaaatccaactgcttatgaaaagtactaatagaacttgttaacctttctaaccttcacgattaactgtgaaatgtacgtcatttgtgcaagaccgtttgtccacttcattttgtataatcacagttgtgttcctgacactcaataaacagtcattggaaa

SEQ ID NO: 361120 - DNA, 2361 bp, Homo sapiens
tcacgcggcgggagggggcgtggcctgcccccggcccagccggctcttctttgcctctgctggagtccggggagtggcgttggctgctagagcgatgccgggccggagttgcgtcgccttagtcctcctggctgccgccgtcagctgtgccgtcgcgcagcacgcgccgccgtggacagaggactgcagaaaatcaacctatcctccttcaggaccaacgtacagaggtgcagttccatggtacaccataaatcttgacttaccaccctacaaaagatggcatgaattgatgcttgacaaggcaccaatgctaaaggttatagtgaattctctgaagaatatgataaatacattcgtgccaagtggaaaagttatgcaggtggtggatgaaaaattgcctggcctacttggcaactttcctggcccttttgaagaggaaatgaagggtattgccgctgttactgatatacctttaggagagattatttcattcaatattttttatgaattatttaccatttgtacttcaatagtagcagaagacaaaaaaggtcatctaatacatgggagaaacatggattttggagtatttcttgggtggaacataaataatgatacctgggtcataactgagcaactaaaacctttaacagtgaatttggatttccaaagaaacaacaaaactgtcttcaaggcttcaagctttgctggctatgtgggcatgttaacaggattcaaaccaggactgttcagtcttacactgaatgaacgtttcagtataaatggtggttatctgggtattctagaatggattctgggaaagaaagatgccatgtggatagggttcctcactagaacagttctggaaaatagcacaagttatgaagaagccaagaatttattgaccaagaccaagatattggccccagcctactttatcctgggaggcaaccagtctggggaaggttgtgtgattacacgagacagaaaggaatcattggatgtatatgaactcgatgctaagcagggtagatggtatgtggtacaaacaaattatgaccgttggaaacatcccttcttccttgatgatcgcagaacgcctgcaaagatgtgtctgaaccgcaccagccaagagaatatctcatttgaaaccatgtatgatgtcctgtcaacaaaacctgtcctcaacaagctgaccgtatacacaaccttgatagatgttaccaaaggtcaattcgaaacttacctgcgggactgccctgacccttgtataggttggtgagcacacgtctggcctacagaatgcggcctctgagacatgaagacaccatctccatgtgaccgaacactgcagctgtctgaccttccaaagactaagactcgcggcaggttctctttgagtcaatagcttgtcttcgtccatctgttgacaaatgacagatcttttttttttccccctatcagttgatttttcttatttacagataacttctttaggggaagtaaaacagtcatctagaattcactgagttttgtttcactttgacatttggggatctggtgggcagtcgaaccatggtgaactccacctccgtggaataaatggagattcagcgtgggtgttgaatccagcacgtctgtgtgagtaacgggacagtaaacactccacattcttcagtttttcacttctacctacatatttgtatgtttttctgtataacagccttttccttctggttctaactgctgttaaaattaatatatcattatctttgctgttattgacagcgatataattttattacatatgattagagggatgagacagacattcacctgtatatttcttttaatgggcacaaaatgggcccttgcctctaaatagcactttttggggttcaagaagtaatcagtatgcaaagcaatcttttatacaataattgaagtgttccctttttcataattactctacttcccagtaaccctaaggaagttgctaacttaaaaaactgcatcccacgttctgttaatttagtaaataaacaagtcaaagacttgtggaaaataggaagtgaacccatattttaaattctcataagtagcattcatgtaataaacaggtttttagtttgttcttcagattgatagggagttttaaagaaattttagtagttactaaaattatgttactgtatttttcagaaatccaactgcttatgaaaagtactaatagaacttgttaacctttctaaccttcacgattaactgtgaaatgtacgtcatttgtgcaagaccgtttgtccacttcattttgtataatcacagttgtgttcctgacactcaataaacagtcattggaaa

SEQ ID NO: 361121 - DNA, 2515 bp, Homo sapiens
tcacgcggcgggagggggcgtggcctgcccccggcccagccggctcttctttgcctctgctggagtccggggagtggcgttggctgctagagcgatgccgggccggagttgcgtcgccttagtcctcctggctgccgccgtcagctgtgccgtcgcgcagcacgcgccgccgtggacagaggactgcagaaaatcaacctatcctccttcaggaccaacgtacagaggtgcagttccatggtacaccataaatcttgacttaccaccctacaaaagatggcatgaattgatgcttgacaaggcaccaatgctaaaggttatagtgaattctctgaagaatatgataaatacattcgtgccaagtggaaaagttatgcaggtggtggatgaaaaattgcctggcctacttggcaactttcctggcccttttgaagaggaaatgaagggtattgccgctgttactgatatacctttaggagagattatttcattcaatattttttatgaattatttaccatttgtacttcaatagtagcagaagacaaaaaaggtcatctaatacatgggagaaacatggattttggagtatttcttgggtggaacataaataatgatacctgggtcataactgagcaactaaaacctttaacagtgaatttggatttccaaagaaacaacaaaactgtcttcaaggcttcaagctttgctggctatgtgggcatgttaacaggattcaaaccaggactgttcagtcttacactgaatgaacgtttcagtataaatggtggttatctgggtattctagaatggattctgggaaagaaagatgccatgtggatagggttcctcactagaacagttctggaaaatagcacaagttatgaagaagccaagaatttattgaccaagaccaagatattggccccagcctactttatcctgggaggcaaccagtctggggaaggttgtgtgattacacgagacagaaaggaatcattggatgtatatgaactcgatgctaagcagggtagatggtatgtggtacaaacaaattatgaccgttggaaacatcccttcttccttgatgatcgcagaacgcctgcaaagatgtgtctgaaccgcaccagccaagagaatatctcatttgaaaccatgtatgatgtcctgtcaacaaaacctgtcctcaacaagctgaccgtatacacaaccttgatagatgttaccaaaggtcaattcgaaacttacctgcgggactgccctgacccttgtataggttggtgagcacacgtctggcctacagaatgcggcctctgagacatgaagacaccatctccatgtgaccgaacactgcagctgtctgaccttccaaagactaagactcgcggcaggttctctttgagtcaatagcttgtcttcgtccatctgttgacaaatgacagatcttttttttttccccctatcagttgatttttcttatttacagataacttctttaggggaagtaaaacagtcatctagaattcactgagttttgtttcactttgacatttggggatctggtgggcagtcgaaccatggtgaactccacctccgtggaataaatggagattcagcgtgggtgttgaatccagcacgtctgtgtgagtaacgggacagtaaacactccacattcttcagtttttcacttctacctacatatttgtatgtttttctgtataacagccttttccttctggttctaactgctgttaaaattaatatatcattatctttgctgttattgacagcgatataattttattacatatgattagagggatgagacagacattcacctgtatatttcttttaatgggcacaaaatgggcccttgcctctaaatagcactttttggggttcaagaagtaatcagtatgcaaagcaatcttttatacaataattgaagtgttccctttttcataattactctacttcccagtaaccctaaggaagttgctaacttaaaaaactgcatcccacgttctgttaatttagtaaataaacaagtcaaagacttgtggaaaataggaagtgaacccatattttaaattctcataagtagcattcatgtaataaacaggtttttagtttgttcttcagattgatagggagttttaaagaaattttagtagttactaaaattatgttactgtatttttcagaaatccaactgcttatgaaaagtactaatagaacttgttaacctttctaaccttcacgattaactgtgaaatgtacgtcatttgtgcaagaccgtttgtccacttcattttgtataatcacagttgtgttcctgacactcaataaacagtcattggaaagtgccagtcagcagtcatgcacgctgattgggtgtgtacatctgtgttggtttggaggaggggggttattatcaagaaatacaagctgaacatcgtatctgaattaaataacaagggttatgtaagtgggttattaaatatgactaaacggtca

SEQ ID NO: 361122 - DNA, 264 bp, Homo sapiens
ctcagtgagcttcagaaatgcatgcacattacctgaccaatcagatcgagacccacatcagagctcatctcccttcgaatacgctcccgtacctacgagtcacatagatattgctccggaacttgttaatatgaactgtcctgtgtgatttcttgtatttcattatgggtggtgtgctattgtatcaacagggtatttgggtggttttcagatttgtgatattaacaataaaggaattataaatattgtagtacaaaatggggg

SEQ ID NO: 361123 - DNA, 1804 bp, Homo sapiens
  misc_feature (624)..(624): n is a, c, g, or t
ataccttatggattaagaagaataacatgatgtataagtggtgtaaatttatataattattataaattattataaatgtataataaaataactagaatttcaccaaattagaaatttaatggaaataaaatacacattggatttgggtgaaaaaaacatgttgagcttaacatgttaatgttaaatgggacagaaatacaatgtgctgcctacttttgaattaaatgctaaatagcagtattatacattttgggaaaatattcaaaaaataaaataccctagaatggagtttcttggcagctctgtactaattttaatagttcttgaatctcctttttcaccttagaaattttagtcacactttaaaaatctgggcaaaatatatgtccagcaaacagccaagagccagatgtattaaatgatcatatttacgctcccaaaagaaaattcaaaatgaagcatgttgataaacattttggatgtgatgttggagaacaattgcaacctgcccagatgttcagctcgcccgaaggctgcctccttggtgacttgtttcatcttgagtctagagagtccaggctggggaagaaaaccacctccagccggccgttccagcacagcccnactggccaaagcacacactcacacaatgaaaacactgaaactttttcttaaaacaaatttttctcccattgtcatggttctgtatattaacacaaaattttcttttctcataggagagattatttcattcaatattttttatgaattatttaccatttgtacttcaatagtagcagaagacaaaaaagggtaattgtgcgctgagggagggtgggcagcatgaagcactacataaagaaaaatcttctaaatgaaattagaacttctgaaatttgggcttgctatgtaaattctgtgtatgttgcatacagctttttatttcttggtaaaattttgtgattgtactgaaaattttccttattttcagactactgtactgcctattaaagttgatttcagacatgcaaaaaacctggaagaaatgttgcagggctagaaacattcttctcttcctcatagtttacttctacccatctacatgatttgatagaagtgctcgcaggaggtgcttccttatcttcgtgtatgtcatgacatctgtccttttcttgaggcccagaacacacattctcccatcctttcccagccaggcaacccaatggataccagcctcactttcccgtatttttcctgactggttcccagagtacaaagcacaggacaacttcgctaactcaccctgatctttgacctatactctgggtataaatctgcctgtaccttacccttgagatgtcctgctctaggggatgatgcctgaagggaaacatttgatgaatcacagtaattgaggctcagatttctgtgtcctggtagaaccatgtgatagtgaaccaaaacatgaccattgattccttttcccatattctgatcttacctggaaacccgtgctctcagattttgtggggttatctggcagatagatggtgacaacagtcccatctggtgaaggcttaggatattaggatgtttcttacttcttattgtttgaagaaacagttgtgaataaaaattaatcaaaattagaggccaggcacagtggcttacacctgtaatgccagcactttgcgaggccgaggcgggcgaatcatctgaggttgggagtttgacaccagactggccaacatggtaaaaccccttctctactaaaagaaaaatacaaaaaaaaaaaaaaagtagc

SEQ ID NO: 361124 - DNA, 531 bp, Homo sapiens
cacaagaattgcttgaacctgggaggcagaggtcgcagtgagctgagatcgcaccactgcactccagtctggccaacagaacgagactctgtctcaaaaataaataaattaatcaaaactaattgtccagctttgatttagaatcttaactgctattacacgtctcttctgtctaccttcaaataggtcatctaatacatgggagaaacatggattttggagtatttcttgggtaagtaaagaacaaagggtcaggcatggtggttcacgcctgtaatcccagctttttgggaggctgacacgggtggatcacgaggtcaggagttcaagaccagcctggccaagatggtgaaaccccgtctctactaaaaacataaaaattagccaggcatggtggtgggcatctgtaatcccggctacttgggagcctgaggcagagacttttttgaacctgcgaggcggaggttgcagtgagccgagatcgcgccactgcactgcagcttgggatacagagccagactccatctcaaa

SEQ ID NO: 361125 - DNA, 513 bp, Homo sapiens
tcacgcggcgggagggggcgtggcctgcccccggcccagccggctcttctttgcctctgctggagtccggggagtggcgttggctgctagagcgatgccgggccggagttgcgtcgccttagtcctcctggctgccgccgtcagctgtgccgtcgcgcagcacgcgccgccgtggacagaggactgcagaaaatcaacctatcctccttcaggaccaacgtacagaggtgcagttccatggtacaccataaatcttgacttaccaccctacaaaagatggcatgaattgatgcttgacaaggcaccaatgcactattctgatgtcactatagattagttttgcctcttcgtgaactttgtataaatagaactgaacaatatgaactgtcctgtgtgatttcttgtatttcattatgggtggtgtgctattgtatcaacagggtatttgggtggttttcagatttgtgatattaacaataaaggaattataaatattgtagtacaaaatggggg

SEQ ID NO: 361126 - DNA, 2999 bp, Homo sapiens
cgagaacatacgcctcagggtggaagaagtttgtctttttgttgttgttcactgcttatccccagtgtcaggagacatgcttggcacattgtaggtccgcagtaaatattttttgaattaataaagaatatttctaccatctgctagcttactgttcatgcaggagctcaaatgtgctttaagcatgtgatatgtttcaaaagtcaaacttcatccttagggagaacactgtcatcttctcctcctttaaaaaaaaaaaataggaaaaaaagcaaaacaaaacatcaccttctcatttccccacctccaacaaaaagagtgttgagttttctaaagaaataatacaaatggataaaactgcaatttgttgtcctttctctcacatgcaaaaagaaaagaaaaaatactgccgagatttcggcagcgtgctgagcttcatcaaagcattaaaacaatgctgcttgagacgtcagaggctcatccaggaagtgcaacccagagggcaggatttcctgctggactttgaaatccaacccggtcacctacccgcgcgactgtgtccacggatggcacgaaagccaagcgagtccccctgccgagctactcgcgtccgcctcctcccaagctgagctctgctccgcccacctgagtccttcgccagttaggaggaaacacagccgcttaatgaactgctgcatcgggctgggagagaaagctcgcgggtcccaccgggcctcctacccaagtctcagcgcgcttttcaccgaggcctcaattctgggatttggcagctttgctgtgaaagcccaatggacagaggactgcagaaaatcaacctatcctccttcaggaccaacgtacagaggtgcagttccatggtacaccataaatcttgacttaccaccctacaaaagatggcatgaattgatgcttgacaaggcaccaatgctaaaggttatagtgaattctctgaagaatatgataaatacattcgtgccaagtggaaaagttatgcaggtggtggatgaaaaattgcctggcctacttggcaactttcctggcccttttgaagaggaaatgaagggtattgccgctgttactgatatacctttaggagagattatttcattcaatattttttatgaattatttaccatttgtacttcaatagtagcagaagacaaaaaaggtcatctaatacatgggagaaacatggattttggagtatttcttgggtggaacataaataatgatacctgggtcataactgagcaactaaaacctttaacagtgaatttggatttccaaagaaacaacaaaactgtcttcaaggcttcaagctttgctggctatgtgggcatgttaacaggattcaaaccaggactgttcagtcttacactgaatgaacgtttcagtataaatggtggttatctgggtattctagaatggattctgggaaagaaagatgccatgtggatagggttcctcactagaacagttctggaaaatagcacaagttatgaagaagccaagaatttattgaccaagaccaagatattggccccagcctactttatcctgggaggcaaccagtctggggaaggttgtgtgattacacgagacagaaaggaatcattggatgtatatgaactcgatgctaagcagggtagatggtatgtggtacaaacaaattatgaccgttggaaacatcccttcttccttgatgatcgcagaacgcctgcaaagatgtgtctgaaccgcaccagccaagagaatatctcatttgaaaccatgtatgatgtcctgtcaacaaaacctgtcctcaacaagctgaccgtatacacaaccttgatagatgttaccaaaggtcaattcgaaacttacctgcgggactgccctgacccttgtataggttggtgagcacacgtctggcctacagaatgcggcctctgagacatgaagacaccatctccatgtgaccgaacactgcagctgtctgaccttccaaagactaagactcgcggcaggttctctttgagtcaatagcttgtcttcgtccatctgttgacaaatgacagatcttttttttttccccctatcagttgatttttcttatttacagataacttctttaggggaagtaaaacagtcatctagaattcactgagttttgtttcactttgacatttggggatctggtgggcagtcgaaccatggtgaactccacctccgtggaataaatggagattcagcgtgggtgttgaatccagcacgtctgtgtgagtaacgggacagtaaacactccacattcttcagtttttcacttctacctacatatttgtatgtttttctgtataacagccttttccttctggttctaactgctgttaaaattaatatatcattatctttgctgttattgacagcgatataattttattacatatgattagagggatgagacagacattcacctgtatatttcttttaatgggcacaaaatgggcccttgcctctaaatagcactttttggggttcaagaagtaatcagtatgcaaagcaatcttttatacaataattgaagtgttccctttttcataattactctacttcccagtaaccctaaggaagttgctaacttaaaaaactgcatcccacgttctgttaatttagtaaataaacaagtcaaagacttgtggaaaataggaagtgaacccatattttaaattctcataagtagcattcatgtaataaacaggtttttagtttgttcttcagattgatagggagttttaaagaaattttagtagttactaaaattatgttactgtatttttcagaaatccaactgcttatgaaaagtactaatagaacttgttaacctttctaaccttcacgattaactgtgaaatgtacgtcatttgtgcaagaccgtttgtccacttcattttgtataatcacagttgtgttcctgacactcaataaacagtcattggaaa

SEQ ID NO: 361127 - DNA, 2588 bp, Homo sapiens
tcacgcggcgggagggggcgtggcctgcccccggcccagccggctcttctttgcctctgctggagtccggggagtggcgttggctgctagagcgatgccgggccggagttgcgtcgccttagtcctcctggctgccgccgtcagctgtgccgtcgcgcagcacgcgccgccgtggacagaggactgcagaaaatcaacctatcctccttcaggaccaacgtacagaggtgcagttccatggtacaccataaatcttgacttaccaccctacaaaagatggcatgaattgatgcttgacaaggcaccaatgctaaaggttatagtgaattctctgaagaatatgataaatacattcgtgccaagtggaaaagttatgcaggtggtggatgaaaaattgcctggcctacttggcaactttcctggcccttttgaagaggaaatgaagggtattgccgctgttactgatatacctttaggagagattatttcattcaatattttttatgaattatttaccatttgtacttcaatagtagcagaagacaaaaaaggtcatctaatacatgggagaaacatggattttggagtatttcttgggtggaacataaataatgatacctgggtcataactgagcaactaaaacctttaacagtgaatttggatttccaaagaaacaacaaaactgtcttcaaggcttcaagctttgctggctatgtgggcatgttaacaggattcaaaccaggactgttcagtcttacactgaatgaacgtttcagtataaatggtggttatctgggtaagtagagcattctcaagtgaaatgggaatctcagagcttttttatgaggaaggctggactgtgccttctggttacaaagtccaacctcttccggttcccgactggttacaaagtctaacctcttctggttcctgactggttatatagtccagcctcttccgggtcctgactggttacatagtgtcacctcttccggttcctgacattgtgttcatctcttccaggtattctagaatggattctgggaaagaaagatgccatgtggatagggttcctcactagaacagttctggaaaatagcacaagttatgaagaagccaagaatttattgaccaagaccaagatattggccccagcctactttatcctgggaggcaaccagtctggggaaggttgtgtgattacacgagacagaaaggaatcattggatgtatatgaactcgatgctaagcagggtagatggtatgtggtacaaacaaattatgaccgttggaaacatcccttcttccttgatgatcgcagaacgcctgcaaagatgtgtctgaaccgcaccagccaagagaatatctcatttgaaaccatgtatgatgtcctgtcaacaaaacctgtcctcaacaagctgaccgtatacacaaccttgatagatgttaccaaaggtcaattcgaaacttacctgcgggactgccctgacccttgtataggttggtgagcacacgtctggcctacagaatgcggcctctgagacatgaagacaccatctccatgtgaccgaacactgcagctgtctgaccttccaaagactaagactcgcggcaggttctctttgagtcaatagcttgtcttcgtccatctgttgacaaatgacagatcttttttttttccccctatcagttgatttttcttatttacagataacttctttaggggaagtaaaacagtcatctagaattcactgagttttgtttcactttgacatttggggatctggtgggcagtcgaaccatggtgaactccacctccgtggaataaatggagattcagcgtgggtgttgaatccagcacgtctgtgtgagtaacgggacagtaaacactccacattcttcagtttttcacttctacctacatatttgtatgtttttctgtataacagccttttccttctggttctaactgctgttaaaattaatatatcattatctttgctgttattgacagcgatataattttattacatatgattagagggatgagacagacattcacctgtatatttcttttaatgggcacaaaatgggcccttgcctctaaatagcactttttggggttcaagaagtaatcagtatgcaaagcaatcttttatacaataattgaagtgttccctttttcataattactctacttcccagtaaccctaaggaagttgctaacttaaaaaactgcatcccacgttctgttaatttagtaaataaacaagtcaaagacttgtggaaaataggaagtgaacccatattttaaattctcataagtagcattcatgtaataaacaggtttttagtttgttcttcagattgatagggagttttaaagaaattttagtagttactaaaattatgttactgtatttttcagaaatccaactgcttatgaaaagtactaatagaacttgttaacctttctaaccttcacgattaactgtgaaatgtacgtcatttgtgcaagaccgtttgtccacttcattttgtataatcacagttgtgttcctgacactcaataaacagtcattggaaa

SEQ ID NO: 361128 - DNA, 3087 bp, Homo sapiens
cgagaacatacgcctcagggtggaagaagtttgtctttttgttgttgttcactgcttatccccagtgtcaggagacatgcttggcacattgtaggtccgcagtaaatattttttgaattaataaagaatatttctaccatctgctagcttactgttcatgcaggagctcaaatgtgctttaagcatgtgatatgtttcaaaagtcaaacttcatccttagggagaacactgtcatcttctcctcctttaaaaaaaaaaaataggaaaaaaagcaaaacaaaacatcaccttctcatttccccacctccaacaaaaagagtgttgagttttctaaagaaataatacaaatggataaaactgcaatttgttgtcctttctctcacatgcaaaaagaaaagaaaaaatactgccgagatttcggcagcgtgctgagcttcatcaaagcattaaaacaatgctgcttgagacgtcagaggctcatccaggaagtgcaacccagagggcaggatttcctgctggactttgaaatccaacccggtcacctacccgcgcgactgtgtccacggatggcacgaaagccaagcgagtccccctgccgagctactcgcgtccgcctcctcccaagctgagctctgctccgcccacctgagtccttcgccagttaggaggaaacacagccgcttaatgaactgctgcatcgggctgggagagaaagctcgcgggtcccaccgggcctcctacccaagtctcagcgcgcttttcaccgaggcctcaattctgggatttggcagctttgctgtgaaagcccaatgggtaaccaacagcttggaggacccgagtggattcgattctctctcactcctcggccactcaactgctccttgtccctgactccgcgtggacagaggactgcagaaaatcaacctatcctccttcaggaccaacgtacagaggtgcagttccatggtacaccataaatcttgacttaccaccctacaaaagatggcatgaattgatgcttgacaaggcaccaatgctaaaggttatagtgaattctctgaagaatatgataaatacattcgtgccaagtggaaaagttatgcaggtggtggatgaaaaattgcctggcctacttggcaactttcctggcccttttgaagaggaaatgaagggtattgccgctgttactgatatacctttaggagagattatttcattcaatattttttatgaattatttaccatttgtacttcaatagtagcagaagacaaaaaaggtcatctaatacatgggagaaacatggattttggagtatttcttgggtggaacataaataatgatacctgggtcataactgagcaactaaaacctttaacagtgaatttggatttccaaagaaacaacaaaactgtcttcaaggcttcaagctttgctggctatgtgggcatgttaacaggattcaaaccaggactgttcagtcttacactgaatgaacgtttcagtataaatggtggttatctgggtattctagaatggattctgggaaagaaagatgccatgtggatagggttcctcactagaacagttctggaaaatagcacaagttatgaagaagccaagaatttattgaccaagaccaagatattggccccagcctactttatcctgggaggcaaccagtctggggaaggttgtgtgattacacgagacagaaaggaatcattggatgtatatgaactcgatgctaagcagggtagatggtatgtggtacaaacaaattatgaccgttggaaacatcccttcttccttgatgatcgcagaacgcctgcaaagatgtgtctgaaccgcaccagccaagagaatatctcatttgaaaccatgtatgatgtcctgtcaacaaaacctgtcctcaacaagctgaccgtatacacaaccttgatagatgttaccaaaggtcaattcgaaacttacctgcgggactgccctgacccttgtataggttggtgagcacacgtctggcctacagaatgcggcctctgagacatgaagacaccatctccatgtgaccgaacactgcagctgtctgaccttccaaagactaagactcgcggcaggttctctttgagtcaatagcttgtcttcgtccatctgttgacaaatgacagatcttttttttttccccctatcagttgatttttcttatttacagataacttctttaggggaagtaaaacagtcatctagaattcactgagttttgtttcactttgacatttggggatctggtgggcagtcgaaccatggtgaactccacctccgtggaataaatggagattcagcgtgggtgttgaatccagcacgtctgtgtgagtaacgggacagtaaacactccacattcttcagtttttcacttctacctacatatttgtatgtttttctgtataacagccttttccttctggttctaactgctgttaaaattaatatatcattatctttgctgttattgacagcgatataattttattacatatgattagagggatgagacagacattcacctgtatatttcttttaatgggcacaaaatgggcccttgcctctaaatagcactttttggggttcaagaagtaatcagtatgcaaagcaatcttttatacaataattgaagtgttccctttttcataattactctacttcccagtaaccctaaggaagttgctaacttaaaaaactgcatcccacgttctgttaatttagtaaataaacaagtcaaagacttgtggaaaataggaagtgaacccatattttaaattctcataagtagcattcatgtaataaacaggtttttagtttgttcttcagattgatagggagttttaaagaaattttagtagttactaaaattatgttactgtatttttcagaaatccaactgcttatgaaaagtactaatagaacttgttaacctttctaaccttcacgattaactgtgaaatgtacgtcatttgtgcaagaccgtttgtccacttcattttgtataatcacagttgtgttcctgacactcaataaacagtcattggaaa

SEQ ID NO: 361129 - DNA, 2400 bp, Homo sapiens
tcacgcggcgggagggggcgtggcctgcccccggcccagccggctcttctttgcctctgctggagtccggggagtggcgttggctgctagagcgatgccgggccggagttgcgtcgccttagtcctcctggctgccgccgtcagctgtgccgtcgcgcagcacgcgccgccgtggacagaggactgcagaaaatcaacctatcctccttcaggaccaacgtacagaggtgcagttccatggtacaccataaatcttgacttaccaccctacaaaagatggcatgaattgatgcttgacaaggcaccaatgctaaaggttatagtgaattctctgaagaatatgataaatacattcgtgccaagtggaaaagttatgcaggtggtggatgaaaaattgcctggcctacttggcaactttcctggcccttttgaagaggaaatgaagggtattgccgctgttactgatatacctttaggagagattatttcattcaatattttttatgaattatttaccatttgtacttcaatagtagcagaagacaaaaaaggtcatctaatacatgggagaaacatggattttggagtatttcttgggtggaacataaataatgatacctgggtcataactgagcaactaaaacctttaacagtgaatttggatttccaaagaaacaacaaaactgtcttcaaggcttcaagctttgctggctatgtgggcatgttaacaggattcaaaccaggactgttcagtcttacactgaatgaacgtttcagtataaatggtggttatctgggtattctagaatggattctgggaaagaaagatgccatgtggatagggttcctcactagaacagttctggaaaatagcacaagttatgaagaagccaagaatttattgaccaagaccaagatattggccccagcctactttatcctgggaggcaaccagtctggggaaggttgtgtgattacacgagacagaaaggaatcattggatgtatatgaactcgatgctaagcagggtagatggtatgtggtacaaacaaattatgaccgttggaaacatcccttcttccttgatgatcgcagaacgcctgcaaagatgtgtctgaaccgcaccagccaagagaatatctcatttgaaaccatgtatgatgtcctgtcaacaaaacctgtcctcaacaagctgaccgtatacacaaccttgatagatgttaccaaaggtcaattcgaaacttacctgcgggactgccctgacccttgtataggttggtgagcacacgtctggcctacagaatgcggcctctgagacatgaagacaccatctccatgtgaccgaacactgcagctgtctgaccttccaaagactaagactcgcggcaggttctctttgagtcaatagcttgtcttcgtccatctgttgacaaatgacagatcttttttttttccccctatcagttgatttttcttatttacagataacttctttaggggaagtaaaacagtcatctagaattcactgagttttgtttcactttgacatttggggatctggtgggcagtcgaaccatggtgaactccacctccgtggaataaatggagattcagcgtgggtgttgaatccagcacgtctgtgtgagtaacgggacagtaaacactccacattcttcagtttttcacttctacctacatatttgtatgtttttctgtataacagccttttccttctggttctaactgctgttaaaattaatatatcattatctttgctgttattgacagcgatataattttattacatatgattagagggatgagacagacattcacctgtatatttcttttaatgggcacaaaatgggcccttgcctctaaatagcactttttggggttcaagaagtaatcagtatgcaaagcaatcttttatacaataattgaagtgttccctttttcataattactctacttcccagtaaccctaaggaagttgctaacttaaaaaactgcatcccacgttctgttaatttagtaaataaacaagtcaaagacttgtggaaaataggaagtgaacccatattttaaattctcataagtagcattcatgtaataaacaggtttttagtttgttcttcagattgatagggagttttaaagaaattttagtagttactaaaattatgttactgtatttttcagaaatccaactgcttatgaaaagtactaatagaacttgttaacctttctaaccttcacgattaactgtgaaatgtacgtcatttgtgcaagaccgtttgtccacttcattttgtataatcacagttgtgttcctgacactcaataaacagtcattggaaaaaaaaaaaaaaacaacactcaccacagaaaaccacacac

SEQ ID NO: 361130 - DNA, 2944 bp, Homo sapiens
cgagaacatacgcctcagggtggaagaagtttgtctttttgttgttgttcactgcttatccccagtgtcaggagacatgcttggcacattgtaggtccgcagtaaatattttttgaattaataaagaatatttctaccatctgctagcttactgttcatgcaggagctcaaatgtgctttaagcatgtgatatgtttcaaaagtcaaacttcatccttagggagaacactgtcatcttctcctcctttaaaaaaaaaaaataggaaaaaaagcaaaacaaaacatcaccttctcatttccccacctccaacaaaaagagtgttgagttttctaaagaaataatacaaatggataaaactgcaatttgttgtcctttctctcacatgcaaaaagaaaagaaaaaatactgccgagatttcggcagcgtgctgagcttcatcaaagcattaaaacaatgctgcttgagacgtcagaggctcatccaggaagtgcaacccagagggcaggatttcctgctggactttgaaatccaacccggtcacctacccgcgcgactgtgtccacggatggcacgaaagccaagcgagtccccctgccgagctactcgcgtccgcctcctcccaagctgagctctgctccgcccacctgagtccttcgccagttaggaggaaacacagccgcttaatgaactgctgcatcgggctgggagagaaagctcgcgggtcccaccgggcctcctacccaagtctcagcgcgcttttcaccgaggcctcaattctgggatttggcagctttgctgtgaaagcccaatggacagaggactgcagaaaatcaacctatcctccttcaggaccaacgtacagaggtgcagttccatggtacaccataaatcttgacttaccaccctacaaaagatggcatgaattgatgcttgacaaggcaccaatgctaaaggttatagtgaattctctgaagaatatgataaatacattcgtgccaagtggaaaagttatgcaggtggtggatgaaaaattgccgctgttactgatatacctttaggagagattatttcattcaatattttttatgaattatttaccatttgtacttcaatagtagcagaagacaaaaaaggtcatctaatacatgggagaaacatggattttggagtatttcttgggtggaacataaataatgatacctgggtcataactgagcaactaaaacctttaacagtgaatttggatttccaaagaaacaacaaaactgtcttcaaggcttcaagctttgctggctatgtgggcatgttaacaggattcaaaccaggactgttcagtcttacactgaatgaacgtttcagtataaatggtggttatctgggtattctagaatggattctgggaaagaaagatgccatgtggatagggttcctcactagaacagttctggaaaatagcacaagttatgaagaagccaagaatttattgaccaagaccaagatattggccccagcctactttatcctgggaggcaaccagtctggggaaggttgtgtgattacacgagacagaaaggaatcattggatgtatatgaactcgatgctaagcagggtagatggtatgtggtacaaacaaattatgaccgttggaaacatcccttcttccttgatgatcgcagaacgcctgcaaagatgtgtctgaaccgcaccagccaagagaatatctcatttgaaaccatgtatgatgtcctgtcaacaaaacctgtcctcaacaagctgaccgtatacacaaccttgatagatgttaccaaaggtcaattcgaaacttacctgcgggactgccctgacccttgtataggttggtgagcacacgtctggcctacagaatgcggcctctgagacatgaagacaccatctccatgtgaccgaacactgcagctgtctgaccttccaaagactaagactcgcggcaggttctctttgagtcaatagcttgtcttcgtccatctgttgacaaatgacagatcttttttttttccccctatcagttgatttttcttatttacagataacttctttaggggaagtaaaacagtcatctagaattcactgagttttgtttcactttgacatttggggatctggtgggcagtcgaaccatggtgaactccacctccgtggaataaatggagattcagcgtgggtgttgaatccagcacgtctgtgtgagtaacgggacagtaaacactccacattcttcagtttttcacttctacctacatatttgtatgtttttctgtataacagccttttccttctggttctaactgctgttaaaattaatatatcattatctttgctgttattgacagcgatataattttattacatatgattagagggatgagacagacattcacctgtatatttcttttaatgggcacaaaatgggcccttgcctctaaatagcactttttggggttcaagaagtaatcagtatgcaaagcaatcttttatacaataattgaagtgttccctttttcataattactctacttcccagtaaccctaaggaagttgctaacttaaaaaactgcatcccacgttctgttaatttagtaaataaacaagtcaaagacttgtggaaaataggaagtgaacccatattttaaattctcataagtagcattcatgtaataaacaggtttttagtttgttcttcagattgatagggagttttaaagaaattttagtagttactaaaattatgttactgtatttttcagaaatccaactgcttatgaaaagtactaatagaacttgttaacctttctaaccttcacgattaactgtgaaatgtacgtcatttgtgcaagaccgtttgtccacttcattttgtataatcacagttgtgttcctgacactcaataaacagtcattggaaa

SEQ ID NO: 361131 - DNA, 2942 bp, Homo sapiens
cgagaacatacgcctcagggtggaagaagtttgtctttttgttgttgttcactgcttatccccagtgtcaggagacatgcttggcacattgtaggtccgcagtaaatattttttgaattaataaagaatatttctaccatctgctagcttactgttcatgcaggagctcaaatgtgctttaagcatgtgatatgtttcaaaagtcaaacttcatccttagggagaacactgtcatcttctcctcctttaaaaaaaaaaaataggaaaaaaagcaaaacaaaacatcaccttctcatttccccacctccaacaaaaagagtgttgagttttctaaagaaataatacaaatggataaaactgcaatttgttgtcctttctctcacatgcaaaaagaaaagaaaaaatactgccgagatttcggcagcgtgctgagcttcatcaaagcattaaaacaatgctgcttgagacgtcagaggctcatccaggaagtgcaacccagagggcaggatttcctgctggactttgaaatccaacccggtcacctacccgcgcgactgtgtccacggatggcacgaaagccaagcgagtccccctgccgagctactcgcgtccgcctcctcccaagctgagctctgctccgcccacctgagtccttcgccagttaggaggaaacacagccgcttaatgaactgctgcatcgggctgggagagaaagctcgcgggtcccaccgggcctcctacccaagtctcagcgcgcttttcaccgaggcctcaattctgggatttggcagctttgctgtgaaagcccaatggacagaggactgcagaaaatcaacctatcctccttcaggaccaacgtacagaggtgcagttccatggtacaccataaatcttgacttaccaccctacaaaagatggcatgaattgatgcttgacaaggcaccaatgctaaaggttatagtgaattctctgaagaatatgataaatacattcgtgccaagtggaaaagttatgcaggtggtggatgaaaaattgcctggcctacttggcaactttcctggcccttttgaagaggaaatgaagggtattgccgctgttactgatatacctttaggagagattatttcattcaatattttttatgaattatttaccatttgtacttcaatagtagcagaagacaaaaaaggtcatctaatacatgggagaaacatggattttggagtatttcttgggtggaacataaataatgatacctgggtcataactgagcaactaaaacctttaacagtgaatttggatttccaaagaaacaacaaaactggactgttcagtcttacactgaatgaacgtttcagtataaatggtggttatctgggtattctagaatggattctgggaaagaaagatgccatgtggatagggttcctcactagaacagttctggaaaatagcacaagttatgaagaagccaagaatttattgaccaagaccaagatattggccccagcctactttatcctgggaggcaaccagtctggggaaggttgtgtgattacacgagacagaaaggaatcattggatgtatatgaactcgatgctaagcagggtagatggtatgtggtacaaacaaattatgaccgttggaaacatcccttcttccttgatgatcgcagaacgcctgcaaagatgtgtctgaaccgcaccagccaagagaatatctcatttgaaaccatgtatgatgtcctgtcaacaaaacctgtcctcaacaagctgaccgtatacacaaccttgatagatgttaccaaaggtcaattcgaaacttacctgcgggactgccctgacccttgtataggttggtgagcacacgtctggcctacagaatgcggcctctgagacatgaagacaccatctccatgtgaccgaacactgcagctgtctgaccttccaaagactaagactcgcggcaggttctctttgagtcaatagcttgtcttcgtccatctgttgacaaatgacagatcttttttttttccccctatcagttgatttttcttatttacagataacttctttaggggaagtaaaacagtcatctagaattcactgagttttgtttcactttgacatttggggatctggtgggcagtcgaaccatggtgaactccacctccgtggaataaatggagattcagcgtgggtgttgaatccagcacgtctgtgtgagtaacgggacagtaaacactccacattcttcagtttttcacttctacctacatatttgtatgtttttctgtataacagccttttccttctggttctaactgctgttaaaattaatatatcattatctttgctgttattgacagcgatataattttattacatatgattagagggatgagacagacattcacctgtatatttcttttaatgggcacaaaatgggcccttgcctctaaatagcactttttggggttcaagaagtaatcagtatgcaaagcaatcttttatacaataattgaagtgttccctttttcataattactctacttcccagtaaccctaaggaagttgctaacttaaaaaactgcatcccacgttctgttaatttagtaaataaacaagtcaaagacttgtggaaaataggaagtgaacccatattttaaattctcataagtagcattcatgtaataaacaggtttttagtttgttcttcagattgatagggagttttaaagaaattttagtagttactaaaattatgttactgtatttttcagaaatccaactgcttatgaaaagtactaatagaacttgttaacctttctaaccttcacgattaactgtgaaatgtacgtcatttgtgcaagaccgtttgtccacttcattttgtataatcacagttgtgttcctgacactcaataaacagtcattggaaa

SEQ ID NO: 361132 - DNA, 1659 bp, Homo sapiens
  misc_feature (12)..(12): n is a, c, g, or t
  misc_feature (15)..(15): n is a, c, g, or t
  misc_feature (20)..(20): n is a, c, g, or t
attctagagganccnggtcntgtatacaggattcaaaccaggactgttcagtcttacactgaatgaacgtttcagtataaatggtggttatctgggtattctagaatggattctgggaaagaaagatgccatgtggatagggttcctcactagaacagttctggaaaatagcacaagttatgaagaagccaagaatttattgaccaagaccaagatattggccccagcctactttatcctgggaggcaaccagtctggggaaggttgtgtgattacacgagacagaaaggaatcattggatgtatatgaactcgatgctaagcagggtagatggtatgtggtacaaacaaattatgaccgttggaaacatcccttcttccttgatgatcgcagaacgcctgcaaagatgtgtctgaaccgcaccagccaagagaatatctcatttgaaaccatgtatgatgtcctgtcaacaaaacctgtcctcaacaagctgaccgtatacacaaccttgatagatgttaccaaaggtcaattcgaaacttacctgcgggactgccctgacccttgtataggttggtgagcacacgtctggcctacagaatgcggcctctgagacatgaagacaccatctccatgtgaccgaacactgcagctgtctgaccttccaaagactaagactcgcggcaggttctctttgagtcaatagcttgtcttcgtccatctgttgacaaatgacagatcttttttttttccccctatcagttgatttttcttatttacagataacttctttaggggaagtaaaacagtcatctagaattcactgagttttgtttcactttgacatttggggatctggtgggcagtcgaaccatggtgaactccacctccgtggaataaatggagattcagcgtgggtgttgaatccagcacgtctgtgtgagtaacgggacagtaaacactccacattcttcagtttttcacttctacctacatatttgtatgtttttctgtataacagccttttccttctggttctaactgctgttaaaattaatatatcattatctttgctgttattgacagcgatataattttattacatatgattagagggatgagacagacattcacctgtatatttcttttaatgggcacaaaatgggcccttgcctctaaatagcactttttggggttcaagaagtaatcagtatgcaaagcaatcttttatacaataattgaagtgttccctttttcataattactctacttcccagtaaccctaaggaagttgctaacttaaaaaactgcatcccacgttctgttaatttagtaaataaacaagtcaaagacttgtggaaaataggaagtgaacccatattttaaattctcataagtagcattcatgtaataaacaggtttttagtttgttcttcagattgatagggagttttaaagaaattttagtagttactaaaattatgttactgtatttttcagaaatccaactgcttatgaaaagtactaatagaacttgttaacctttctaaccttcacgattaactgtgaaatgtacgtcatttgtgcaagaccgtttgtccacttcattttgtataatcacagttgtgttcctgacactcaataaacagtcattggaaa

SEQ ID NO: 361133 - DNA, 2929 bp, Homo sapiens
  misc_feature (1)..(1): n is a, c, g, or t
  misc_feature (4)..(4): n is a, c, g, or t
  misc_feature (13)..(13): n is a, c, g, or t
  misc_feature (16)..(16): n is a, c, g, or t
  misc_feature (21)..(21): n is a, c, g, or t
  misc_feature (25)..(25): n is a, c, g, or t
  misc_feature (31)..(31): n is a, c, g, or t
  misc_feature (37)..(38): n is a, c, g, or t
  misc_feature (50)..(50): n is a, c, g, or t
  misc_feature (71)..(71): n is a, c, g, or t
  misc_feature (180)..(181): n is a, c, g, or t
  misc_feature (247)..(247): n is a, c, g, or t
  misc_feature (336)..(336): n is a, c, g, or t
  misc_feature (350)..(350): n is a, c, g, or t
nggngggggcggngcngcccnggancccganggggcnnacggaaaaaacngcagcccaggggcggggaatntagtaaataaacaagtcaaagacttgtggaaaataggaagtgaacccatattttaaattctcataagtagcattcatgtaataaacaggtttttagtttgttcttcagnntgatagggagttttaaagaaattttagtagttactaaaattatgttactgtatttttcagaaatcnaactgcttatgaaaagtactaatagaactgttaacctttctaaccttcacgattaactgtgaaatgtacgtcattgtgcaagaccgttngtccacttcatttngtataatcacagttgtgttcctgacactcaataaacagtcatgggaaagagtgccaaaaaaaaaaaaaaaaaaaaaaaaaaaaaaaaaaaaaaaaaaaaaaaaaaaaaaaaaccagagggcaggatttcctgctggactttgaaatccaacccggtcacctacccgcgcgactgtgtccacggatggcacgaaagccaagcgagtccccctgccgagctactcgcgtccgcctcctcccaagctgagctctgctccgcccacctgagtccttcgccagttaggaggaaacacagccgcttaatgaactgctgcatcgggctgggagagaaagctcgcgggtcccaccgggcctcctacccaagtctcagcgcgcttttcaccgaggcctcaattctgggatttggcagctttgctgtgaaagcccaatggacagaggactgcagaaaatcaacctatcctccttcaggaccaacgtacagaggtgcagttccatggtacaccataaatcttgacttaccaccctacaaaagatggcatgaattgatgcttgacaaggcaccaatgctaaaggttatagtgaattctctgaagaatatgataaatacattcgtgccaagtggaaaagttatgcaggtggtggatgaaaaattgcctggcctacttggcaactttcctggcccttttgaagaggaaatgaagggtattgccgctgttactgatatacctttaggagagattatttcattcaatattttttatgaattatttaccatttgtacttcaatagtagcagaagacaaaaaaggtcatctaatacatgggagaaacatggattttggagtatttcttgggtggaacataaataatgatacctgggtcataactgagcaactaaaacctttaacagtgaatttggatttccaaagaaacaacaaaactgtcttcaaggcttcaagctttgctggctatgtgggcatgttaacaggattcaaaccaggactgttcagtcttacactgaatgaacgtttcagtataaatggtggttatctgggtattctagaatggattctgggaaagaaagatgccatgtggatagggttcctcactagaacagttctggaaaatagcacaagatattggccccagcctactttatcctgggaggcaaccagtctggggaaggttgtgtgattacacgagacagaaaggaatcattggatgtatatgaactcgatgctaagcagggtagatggtatgtggtacaaacaaattatgaccgttggaaacatcccttcttccttgatgatcgcagaacgcctgcaaagatgtgtctgaaccgcaccagccaagagaatatctcatttgaaaccatgtatgatgtcctgtcaacaaaacctgtcctcaacaagctgaccgtatacacaaccttgatagatgttaccaaaggtcaattcgaaacttacctgcgggactgccctgacccttgtataggttggtgagcacacgtctggcctacagaatgcggcctctgagacatgaagacaccatctccatgtgaccgaacactgcagctgtctgaccttccaaagactaagactcgcggcaggttctctttgagtcaatagcttgtcttcgtccatctgttgacaaatgacagatcttttttttttccccctatcagttgatttttcttatttacagataacttctttaggggaagtaaaacagtcatctagaattcactgagttttgtttcactttgacatttggggatctggtgggcagtcgaaccatggtgaactccacctccgtggaataaatggagattcagcgtgggtgttgaatccagcacgtctgtgtgagtaacgggacagtaaacactccacattcttcagtttttcacttctacctacatatttgtatgtttttctgtataacagccttttccttctggttctaactgctgttaaaattaatatatcattatctttgctgttattgacagcgatataattttattacatatgattagagggatgagacagacattcacctgtatatttcttttaatgggcacaaaatgggcccttgcctctaaatagcactttttggggttcaagaagtaatcagtatgcaaagcaatcttttatacaataattgaagtgttccctttttcataattactctacttcccagtaaccctaaggaagttgctaacttaaaaaactgcatcccacgttctgttaatttagtaaataaacaagtcaaagacttgtggaaaataggaagtgaacccatattttaaattctcataagtagcattcatgtaataaacaggtttttagtttgttcttcagattgatagggagttttaaagaaattttagtagttactaaaattatgttactgtatttttcagaaatccaactgcttatgaaaagtactaatagaacttgttaacctttctaaccttcacgattaactgtgaaatgtacgtcatttgtgcaagaccgtttgtccacttcattttgtataatcacagttgtgttcctgacactcaataaacagtcattggaaa

SEQ ID NO: 361134 - DNA, 2307 bp, Homo sapiens
tcacgcggcgggagggggcgtggcctgcccccggcccagccggctcttctttgcctctgctggagtccggggagtggcgttggctgctagagcgatgccgggccggagttgcgtcgccttagtcctcctggctgccgccgtcagctgtgccgtcgcgcagcacgcgccgccgtggacagaggactgcagaaaatcaacctatcctccttcaggaccaacgtacagaggtgcagttccatggtacaccataaatcttgacttaccaccctacaaaagatggcatgaattgatgcttgacaaggcaccaatgctaaaggttatagtgaattctctgaagaatatgataaatacattcgtgccaagtggaaaagttatgcaggtggtggatgaaaaattgcctggcctacttggcaactttcctggcccttttgaagaggaaatgaagggtattgccgctgttactgatatacctttaggagagattatttcattcaatattttttatgaattatttaccatttgtacttcaatagtagcagaagacaaaaaaggtcatctaatacatgggagaaacatggattttggagtatttcttgggtggaacataaataatgatacctgggtcataactgagcaactaaaacctttaacagtgaatttggatttccaaagaaacaacaaaactgtcttcaaggcttcaagctttgctggctatgtgggcatgttaacaggattcaaaccaggactgttcagtcttacactgaatgaacgtttcagtataaatggtggttatctgggtattctagaatggattctgggaaagaaagatgccatgtggatagggttcctcactagaacagttctggaaaatagcacaagttatgaagaagccaagaatttattgaccaagaccaagatattggccccagcctactttatcctgggaggcaaccagtctggggaaggttgtgtgattacacgagacagaaaggaatcattggatgtatatgaactcgatgctaagcagggtagatggtatgtggtacaaacaaattatgaccgttggaaacatcccttcttccttgatgatcgcagaacgcctgcaaagatgtgtctgaaccgcaccagccaagagaatatctcatttgaaaccatgtatgatgtcctgtcaacaaaacctgtcctcaacaagctgaccgtatacacaaccttgatagatgttaccaaaggtcaattcgaaacttacctgcgggactgccctgacccttgtataggttggtgagcacacgtctggcctacagaatgcggcctctgagacatgaagacaccatctccatgtgaccgaacactgcagctgtctgaccttccaaagactaagactcgcggcaggttctctttgagtcaatagcttgtcttcgtccatctgttgacaaatgacagatcttttttttttccccctatcagttgatttttcttatttacagataacttctttaggggaagtaaaacagtcatctagaattcactgagttttgtttcactttgacatttggggatctggtgggcagtcgaaccatggtgaactccacctccgtggaataaatggagattcagcgtgggtgttgaatccagcacgtctgtgtgagtaacgggacagtaaacactccacattcttcagtttttcacttctacctacatatttgtatgtttttctgtataacagccttttccttctggttctaactgctgttaaaattaatatatcattatctttgctgttattgacagcgatataattttattacatatgattagagggatgagacagacattcacctgtatatttcttttaatgggcacaaaatgggcccttgcctctaaatagcactttttggggttcaagaagtaatcagtatgcaaagcaatcttttatacaataattgaagtgttccctttttcataattactctacttcccagtaaccctaaggaagttgctaacttaaaaaactgcatcccacgttctgttaattaaattctcataagtagcattcatgtaataaacaggtttttagtttgttcttcagattgatagggagttttaaagaaattttagtagttactaaaattatgttactgtatttttcagaaatccaactgcttatgaaaagtactaatagaacttgttaacctttctaaccttcacgattaactgtgaaatgtacgtcatttgtgcaagaccgtttgtccacttcattttgtataatcacagttgtgttcctgacactcaataaacagtcattggaaa

SEQ ID NO: 361135 - DNA, 929 bp, Homo sapiens
  misc_feature (7)..(7): n is a, c, g, or t
  misc_feature (52)..(52): n is a, c, g, or t
tttgaanccctttgccagcacccgactctagaggatccccctgaataccggnattcagcaaagcatgctttgctgaataccggctagaattcactgagttttgtttcactttgacatttggggatctggtgggcagtcgaaccatggtgaactccacctccgtggaataaatggagattcagcgtgggtgttgaatccagcacgtctgtgtgagtaacgggacagtaaacactccacattcttcagtttttcacttctacctacatatttgtatgtttttctgtataacagccttttccttctggttctaactgctgttaaaattaatatatcattatctttgctgttattgacagcgatataattttattacatatgattagagggatgagacagacattcacctgtatatttcttttaatgggcacaaaatgggcccttgcctctaaatagcactttttggggttcaagaagtaatcagtatgcaaagcaatcttttatacaataattgaagtgttccctttttcataattactctacttcccagtaaccctaaggaagttgctaacttaaaaaactgcatcccacgttctgttaatttagtaaataaacaagtcaaagacttgtggaaaataggaagtgaacccatattttaaattctcataagtagcattcatgtaataaacaggtttttagtttgttcttcagattgatagggagttttaaagaaattttagtagttactaaaattatgttactgtatttttcagaaatccaactgcttatgaaaagtactaatagaacttgttaacctttctaaccttcacgattaactgtgaaatgtacgtcatttgtgcaagaccgtttgtccacttcattttgtataatcacagttgtgttcctgacactcaataaacagtcattggaaa

SEQ ID NO: 361136 - DNA, 1466 bp, Homo sapiens
tcacgcggcgggagggggcgtggcctgcccccggcccagccggctcttctttgcctctgctggagtccggggagtggcgttggctgctagagcgatgccgggccggagttgcgtcgccttagtcctcctggctgccgccgtcagctgtgccgtcgcgcagcacgcgccgccgtggacagaggactgcagaaaatcaacctatcctccttcaggaccaacgtacagaggtgcagttccatggtacaccataaatcttgacttaccaccctacaaaagatggcatgaattgatgcttgacaaggcaccaatgctaaaggttatagtgaattctctgaagaatatgataaatacattcgtgccaagtggaaaagttatgcaggtggtggatgaaaaattgcctggcctacttggcaactttcctggcccttttgaagaggaaatgaagggtattgccgctgttactgatatacctttaggagagattatttcattcaatattttttatgaattatttaccatttgtacttcaatagtagcagaagacaaaaaaggtcatctaatacatgggagaaacatggattttggagtatttcttgggtggaacataaataatgatacctgggtcataactgagcaactaaaacctttaacagtgaatttggatttccaaagaaacaacaaaactgtcttcaaggcttcaagctttgctggctatgtgggcatgttaacaggattcaaaccaggactgttcagtcttacactgaatgaacgtttcagtataaatggtggttatctgggtaagtagagcattctcaagtgaaatgggaatctcagagcttttttatgaggaaggctggactgtgccttctggttacaaagtccaacctcttccggttcccgactggttacaaagtctaacctcttctggttcctgactggttatatagtccagcctcttccgggtcctgactggttacatagtgtcacctcttccggttcctgacattgtgttcatctcttccaggtattctagaatggattctgggaaagaaagatgccatgtggatagggttcctcactagaacagttctggaaaatagcacaagttatgaagaagccaagaatttattgaccaagaccaagatattggccccagcctactttatcctgggaggcaaccagtctggggaaggttgtgtgattacacgagacagaaaggaatcattggatgtatatgaactcgatgctaagcagggtagatggtatgtggtacaaacaaattatgaccgttggaaacatcccttcttccttgatgatcgcagaacgcctgcaaagatgtgtctgaaccgcaccagccaagagagcagagatatctcatttgaacatgtatgatgtcctgtcacaaaactgtctcacagctgacgatcacactgtgtgtacaagtcatcgactactgcgatgctgac

SEQ ID NO: 361137 - DNA, 1392 bp, Homo sapiens
tcacgcggcgggagggggcgtggcctgcccccggcccagccggctcttctttgcctctgctggagtccggggagtggcgttggctgctagagcgatgccgggccggagttgcgtcgccttagtcctcctggctgccgccgtcagctgtgccgtcgcgcagcacgcgccgccgtggacagaggactgcagaaaatcaacctatcctccttcaggaccaacgtacagaggtgcagttccatggtacaccataaatcttgacttaccaccctacaaaagatggcatgaattgatgcttgacaaggcaccaatgctaaaggttatagtgaattctctgaagaatatgataaatacattcgtgccaagtggaaaagttatgcaggtggtggatgaaaaattgcctggcctacttggcaactttcctggcccttttgaagaggaaatgaagggtattgccgctgttactgatatacctttaggagagattatttcattcaatattttttatgaattatttaccatttgtacttcaatagtagcagaagacaaaaaaggtcatctaatacatgggagaaacatggattttggagtatttcttgggtggaacataaataatgatacctgggtcataactgagcaactaaaacctttaacagtgaatttggatttccaaagaaacaacaaaactgtcttcaaggcttcaagctttgctggctatgtgggcatgttaacaggattcaaaccaggactgttcagtcttacactgaatgaacgtttcagtataaatggtggttatctgggtaagtagagcattctcaagtgaaatgggaatctcagagcttttttatgaggaaggctggactgtgccttctggttacaaagtccaacctcttccggttcccgactggttacaaagtctaacctcttctggttcctgactggttatatagtccagcctcttccgggtcctgactggttacatagtgtcacctcttccggttcctgacattgtgttcatctcttccaggtattctagaatggattctgggaaagaaagatgccatgtggatagggttcctcactagaacagttctggaaaatagcacaagaggtaaagtgtttcgttgctttactattaaatatttattttaaattactcatattaaaaaataaaaatatttgtcaagctccagcttaatcctttgaggaactattgcagaatttcttaagtgaacctctgacactcatgtggaattactcatgttttctttgtgcagactgtgtgttttatagcaaataaatgaattacttaaaaagcactagggatactgacattatgaaaggcacctatgaatatttttggtgtacagaaaaaaaatgacccacacacaaaag

SEQ ID NO: 361138 - DNA, 1550 bp, Homo sapiens
cgagaacatacgcctcagggtggaagaagtttgtctttttgttgttgttcactgcttatccccagtgtcaggagacatgcttggcacattgtaggtccgcagtaaatattttttgaattaataaagaatatttctaccatctgctagcttactgttcatgcaggagctcaaatgtgctttaagcatgtgatatgtttcaaaagtcaaacttcatccttagggagaacactgtcatcttctcctcctttaaaaaaaaaaaataggaaaaaaagcaaaacaaaacatcaccttctcatttccccacctccaacaaaaagagtgttgagttttctaaagaaataatacaaatggataaaactgcaatttgttgtcctttctctcacatgcaaaaagaaaagaaaaaatactgccgagatttcggcagcgtgctgagcttcatcaaagcattaaaacaatgctgcttgagacgtcagaggctcatccaggaagtgcaacccagagggcaggatttcctgctggactttgaaatccaacccggtcacctacccgcgcgactgtgtccacggatggcacgaaagccaagcgagtccccctgccgagctactcgcgtccgcctcctcccaagctgagctctgctccgcccacctgagtccttcgccagttaggaggaaacacagccgcttaatgaactgctgcatcgggctgggagagaaagctcgcgggtcccaccgggcctcctacccaagtctcagcgcgcttttcaccgaggcctcaattctgggatttggcagctttgctgtgaaagcccaatggacagaggactgcagaaaatcaacctatcctccttcaggaccaacgtacagaggtgcagttccatggtacaccataaatcttgacttaccaccctacaaaagatggcatgaattgatgcttgacaaggcaccaatgctaaaggttatagtgaattctctgaagaatatgataaatacattcgtgccaagtggaaaagttatgcaggtggtggatgaaaaattgcctggcctacttggcaactttcctggcccttttgaagaggaaatgaagggtattgccgctgttactgatatacctttaggtaaagttcacttagaagctttaaaaaaaaaagtaattaaattcttttacaagtttccattgaggtgtgatatacatacagcaaagtgcacaggtcttagatatacagctcagtgaagcttcagaaatgcatgcatgcatgtagccatgactcagatcaagatacggaagagcccagcactccacgatgctccatcatgcccctttgcagaaaatactgcctcctccagtaaacactattctgatgtcactatagattagttttgcctcttcgtgaactttgtataaatagaactgaacaatatgaactgtcctgtgtgatttcttgtatttcattatgggtggtgtgctattgtatcaacagggtatttgggtggttttcagatttgtgatattaacaataaaggaattataaatattgtagtacaaaatggggg

SEQ ID NO: 361139 - DNA, 1811 bp, Homo sapiens
  misc_feature (1)..(1): n is a, c, g, or t
  misc_feature (4)..(4): n is a, c, g, or t
  misc_feature (13)..(13): n is a, c, g, or t
  misc_feature (16)..(16): n is a, c, g, or t
  misc_feature (21)..(21): n is a, c, g, or t
  misc_feature (25)..(25): n is a, c, g, or t
  misc_feature (31)..(31): n is a, c, g, or t
  misc_feature (37)..(38): n is a, c, g, or t
  misc_feature (50)..(50): n is a, c, g, or t
  misc_feature (71)..(71): n is a, c, g, or t
  misc_feature (180)..(181): n is a, c, g, or t
  misc_feature (247)..(247): n is a, c, g, or t
  misc_feature (336)..(336): n is a, c, g, or t
  misc_feature (350)..(350): n is a, c, g, or t
nggngggggcggngcngcccnggancccganggggcnnacggaaaaaacngcagcccaggggcggggaatntagtaaataaacaagtcaaagacttgtggaaaataggaagtgaacccatattttaaattctcataagtagcattcatgtaataaacaggtttttagtttgttcttcagnntgatagggagttttaaagaaattttagtagttactaaaattatgttactgtatttttcagaaatcnaactgcttatgaaaagtactaatagaactgttaacctttctaaccttcacgattaactgtgaaatgtacgtcattgtgcaagaccgttngtccacttcatttngtataatcacagttgtgttcctgacactcaataaacagtcatgggaaagagtgccaaaaaaaaaaaaaaaaaaaaaaaaaaaaaaaaaaaaaaaaaaaaaaaaaaaaaaaaaccagagggcaggatttcctgctggactttgaaatccaacccggtcacctacccgcgcgactgtgtccacggatggcacgaaagccaagcgagtccccctgccgagctactcgcgtccgcctcctcccaagctgagctctgctccgcccacctgagtccttcgccagttaggaggaaacacagccgcttaatgaactgctgcatcgggctgggagagaaagctcgcgggtcccaccgggcctcctacccaagtctcagcgcgcttttcaccgaggcctcaattctgggatttggcagctttgctgtgaaagcccaatggacagaggactgcagaaaatcaacctatcctccttcaggaccaacgtacagaggtgcagttccatggtacaccataaatcttgacttaccaccctacaaaagatggcatgaattgatgcttgacaaggcaccaatgctaaaggttatagtgaattctctgaagaatatgataaatacattcgtgccaagtggaaaagttatgcaggtggtggatgaaaaattgcctggcctacttggcaactttcctggcccttttgaagaggaaatgaagggtattgccgctgttactgatatacctttaggagagattatttcattcaatattttttatgaattatttaccatttgtacttcaatagtagcagaagacaaaaaaggtcatctaatacatgggagaaacatggattttggagtatttcttgggtggaacataaataatgatacctgggtcataactgagcaactaaaacctttaacagtgaatttggatttccaaagaaacaacaaaactgtcttcaaggcttcaagctttgctggctatgtgggcatgttaacaggattcaaaccaggactgttcagtcttacactgaatgaacgtttcagtataaatggtggttatctgggtattctagaatggattctgggaaagaaagatgccatgtggatagggttcctcactagaacagttctggaaaatagcacaagttatgaagaagccaagaatttattgaccaagaccaagatattggccccagcctactttatcctgggaggcaaccagtctggggaaggttgtgtgattacacgagacagaaaggaatcattggatgtatatgaactcgatgctaagcagggtagatggtatgtggtacaaacaaattatgaccgttggaaacatcccttcttccttgatgatcgcagaacgcctgcaaagatgtgtctgaaccgcaccagccaagagcttacccgcccccaacccaaaaaaattttttatttgaaacccttttttaattgccctgggaaacaaaaacg

SEQ ID NO: 361140 - DNA, 969 bp, Homo sapiens
tcacgcggcgggagggggcgtggcctgcccccggcccagccggctcttctttgcctctgctggagtccggggagtggcgttggctgctagagcgatgccgggccggagttgcgtcgccttagtcctcctggctgccgccgtcagctgtgccgtcgcgcagcacgcgccgccgtggacagaggactgcagaaaatcaacctatcctccttcaggaccaacgtacagaggtgcagttccatggtacaccataaatcttgacttaccaccctacaaaagatggcatgaattgatgcttgacaaggcaccaatgctaaaggttatagtgaattctctgaagaatatgataaatacattcgtgccaagtggaaaagttatgcaggtggtggatgaaaaattgcctggcctacttggcaactttcctggcccttttgaagaggaaatgaagggtattgccgctgttactgatatacctttaggtaaagttcacttagaagctttaaaaaaaaaagtaattaaattcttttacaagtttccattgaggtgtgatatacatcagcacaggtgctgtatgtcttagatatacagcacaggtgctgtatgtcttagatatacagcaaagtgcacaggtcttagatatacagctcagtgaagcttcagaaatgcatgcatgcatgtagccatgactcagatcaagatacggaagagcccagcactccacgatgctccatcatgcccctttgcagaaaatactgcctcctccagtaaacactattctgatgtcactatagattagttttgcctcttcgtgaactttgtataaatagaactgaacaatatgaactgtcctgtgtgatttcttgtatttcattatgggtggtgtgctattgtatcaacagggtatttgggtggttttcagatttgtgatattaacaataaaggaattataaatattgtagtacaaaatggggg

SEQ ID NO: 361141 - DNA, 1199 bp, Homo sapiens
cgagaacatacgcctcagggtggaagaagtttgtctttttgttgttgttcactgcttatccccagtgtcaggagacatgcttggcacattgtaggtccgcagtaaatattttttgaattaataaagaatatttctaccatctgctagcttactgttcatgcaggagctcaaatgtgctttaagcatgtgatatgtttcaaaagtcaaacttcatccttagggagaacactgtcatcttctcctcctttaaaaaaaaaaaataggaaaaaaagcaaaacaaaacatcaccttctcatttccccacctccaacaaaaagagtgttgagttttctaaagaaataatacaaatggataaaactgcaatttgttgtcctttctctcacatgcaaaaagaaaagaaaaaatactgccgagatttcggcagcgtgctgagcttcatcaaagcattaaaacaatgctgcttgagacgtcagaggctcatccaggaagtgcaacccagagggcaggatttcctgctggactttgaaatccaacccggtcacctacccgcgcgactgtgtccacggatggcacgaaagccaagcgagtccccctgccgagctactcgcgtccgcctcctcccaagctgagctctgctccgcccacctgagtccttcgccagttaggaggaaacacagccgcttaatgaactgctgcatcgggctgggagagaaagctcgcgggtcccaccgggcctcctacccaagtctcagcgcgcttttcaccgaggcctcaattctgggatttggcagctttgctgtgaaagcccaatggacagaggactgcagaaaatcaacctatcctccttcaggaccaacgtacagaggtgcagttccatggtacaccataaatcttgacttaccaccctacaaaagatggcatgaattgatgcttgacaaggcaccaatgctaaaggttatagtgaattctctgaagaatatgataaatacattcgtgccaagtggaaaagttatgcaggtggtggatgaaaaattgcctggcctacttggcaactttcctggcccttttgaagaggaaatgaagggtattgccgctgttactgatatacctttagagagattattcacgcagatttcttactgaataagatacaagatgtacttcaatagtagcagccgacgaggttttgccactctaaa

SEQ ID NO: 361142 - DNA, 912 bp, Homo sapiens
tcacgcggcgggagggggcgtggcctgcccccggcccagccggctcttctttgcctctgctggagtccggggagtggcgttggctgctagagcgatgccgggccggagttgcgtcgccttagtcctcctggctgccgccgtcagctgtgccgtcgcgcagcacgcgccgccgtggacagaggactgcagaaaatcaacctatcctccttcaggaccaacgtacagaggtgcagttccatggtacaccataaatcttgacttaccaccctacaaaagatggcatgaattgatgcttgacaaggcaccaatgctaaaggttatagtgaattctctgaagaatatgataaatacattcgtgccaagtggaaaagttatgcaggtggtggatgaaaaattgcctggcctacttggcaactttcctggcccttttgaagaggaaatgaagggtattgccgctgttactgatatacctttaggtaaagttcacttagaagctttaaaaaaaaaagtaattaaattcttttacaagtttccattgaggtgtgatatacatacagcaaagtgcacaggtcttagatatacagctcagtgaagcttcagaaatgcatgcatgcatgtagccatgactcagatcaagatacggaagagcccagcactccacgatgctccatcatgcccctttgcagaaaatactgcctcctccagtaaacactattctgatgtcactatagattagttttgcctcttcgtgaactttgtataaatagaactgaacaatatgaactgtcctgtgtgatttcttgtatttcattatgggtggtgtgctattgtatcaacagggtatttgggtggttttcagatttgtgatattaacaataaaggaattataaatattgtagtacaaaatggggg

SEQ ID NO: 361143 - DNA, 2966 bp, Homo sapiens
  misc_feature (1)..(1): n is a, c, g, or t
  misc_feature (4)..(4): n is a, c, g, or t
  misc_feature (13)..(13): n is a, c, g, or t
  misc_feature (16)..(16): n is a, c, g, or t
  misc_feature (21)..(21): n is a, c, g, or t
  misc_feature (25)..(25): n is a, c, g, or t
  misc_feature (31)..(31): n is a, c, g, or t
  misc_feature (37)..(38): n is a, c, g, or t
  misc_feature (50)..(50): n is a, c, g, or t
  misc_feature (71)..(71): n is a, c, g, or t
  misc_feature (180)..(181): n is a, c, g, or t
  misc_feature (247)..(247): n is a, c, g, or t
  misc_feature (336)..(336): n is a, c, g, or t
  misc_feature (350)..(350): n is a, c, g, or t
nggngggggcggngcngcccnggancccganggggcnnacggaaaaaacngcagcccaggggcggggaatntagtaaataaacaagtcaaagacttgtggaaaataggaagtgaacccatattttaaattctcataagtagcattcatgtaataaacaggtttttagtttgttcttcagnntgatagggagttttaaagaaattttagtagttactaaaattatgttactgtatttttcagaaatcnaactgcttatgaaaagtactaatagaactgttaacctttctaaccttcacgattaactgtgaaatgtacgtcattgtgcaagaccgttngtccacttcatttngtataatcacagttgtgttcctgacactcaataaacagtcatgggaaagagtgccaaaaaaaaaaaaaaaaaaaaaaaaaaaaaaaaaaaaaaaaaaaaaaaaaaaaaaaaaccagagggcaggatttcctgctggactttgaaatccaacccggtcacctacccgcgcgactgtgtccacggatggcacgaaagccaagcgagtccccctgccgagctactcgcgtccgcctcctcccaagctgagctctgctccgcccacctgagtccttcgccagttaggaggaaacacagccgcttaatgaactgctgcatcgggctgggagagaaagctcgcgggtcccaccgggcctcctacccaagtctcagcgcgcttttcaccgaggcctcaattctgggatttggcagctttgctgtgaaagcccaatggacagaggactgcagaaaatcaacctatcctccttcaggaccaacgtacagaggtgcagttccatggtacaccataaatcttgacttaccaccctacaaaagatggcatgaattgatgcttgacaaggcaccaatgctaaaggttatagtgaattctctgaagaatatgataaatacattcgtgccaagtggaaaagttatgcaggtggtggatgaaaaattgcctggcctacttggcaactttcctggcccttttgaagaggaaatgaagggtattgccgctgttactgatatacctttaggagagattatttcattcaatattttttatgaattatttaccatttgtacttcaatagtagcagaagacaaaaaaggtcatctaatacatgggagaaacatggattttggagtatttcttgggtggaacataaataatgatacctgggtcataactgagcaactaaaacctttaacagtgaatttggatttccaaagaaacaacaaaactgtcttcaaggcttcaagctttgctggctatgtgggcatgttaacaggattcaaaccaggactgttcagtcttacactgaatgaacgtttcagtataaatggtggttatctgggtattctagaatggattctgggaaagaaagatgccatgtggatagggttcctcactagaacagttctggaaaatagcacaagttatgaagaagccaagaatttattgaccaagaccaagatattggccccagcctactttatcctgggaggcaaccagtctggggaaggttgtgtgattacacgagacagaaaggaatcattggatgtatatgaactcgatgctaagcagggtagatggtatgtggtacaaacaaattatgaccgttggaaacatcccttcttccttgatgatcgcagaacgcctgcaaagatgtgtctgaaccgcaccagccaagagaatatctcatttgaaaccatgtatgatgtcctgtcaacaaaacctgtcctcaacaagctgaccgtatacacaaccttgatagatgttaccaaaggtcaattcgaaacttacctgcgggactgccctgacccttgtataggttggtgagcacacgtctggcctacagaatgcggcctctgagacatgaagacaccatctccatgtgaccgaacactgcagctgtctgaccttccaaagactaagactcgcggcaggttctctttgagtcaatagcttgtcttcgtccatctgttgacaaatgacagatcttttttttttccccctatcagttgatttttcttatttacagataacttctttaggggaagtaaaacagtcatctagaattcactgagttttgtttcactttgacatttggggatctggtgggcagtcgaaccatggtgaactccacctccgtggaataaatggagattcagcgtgggtgttgaatccagcacgtctgtgtgagtaacgggacagtaaacactccacattcttcagtttttcacttctacctacatatttgtatgtttttctgtataacagccttttccttctggttctaactgctgttaaaattaatatatcattatctttgctgttattgacagcgatataattttattacatatgattagagggatgagacagacattcacctgtatatttcttttaatgggcacaaaatgggcccttgcctctaaatagcactttttggggttcaagaagtaatcagtatgcaaagcaatcttttatacaataattgaagtgttccctttttcataattactctacttcccagtaaccctaaggaagttgctaacttaaaaaactgcatcccacgttctgttaatttagtaaataaacaagtcaaagacttgtggaaaataggaagtgaacccatattttaaattctcataagtagcattcatgtaataaacaggtttttagtttgttcttcagattgatagggagttttaaagaaattttagtagttactaaaattatgttactgtatttttcagaaatccaactgcttatgaaaagtactaatagaacttgttaacctttctaaccttcacgattaactgtgaaatgtacgtcatttgtgcaagaccgtttgtccacttcattttgtataatcacagttgtgttcctgacactcaataaacagtcattggaaa

SEQ ID NO: 361144 - DNA, 2432 bp, Homo sapiens
  misc_feature (2398)..(2398): n is a, c, g, or t
  misc_feature (2400)..(2400): n is a, c, g, or t
  misc_feature (2418)..(2418): n is a, c, g, or t
  misc_feature (2420)..(2421): n is a, c, g, or t
  misc_feature (2427)..(2427): n is a, c, g, or t
tcacgcggcgggagggggcgtggcctgcccccggcccagccggctcttctttgcctctgctggagtccggggagtggcgttggctgctagagcgatgccgggccggagttgcgtcgccttagtcctcctggctgccgccgtcagctgtgccgtcgcgcagcacgcgccgccgtggacagaggactgcagaaaatcaacctatcctccttcaggaccaacgtacagaggtgcagttccatggtacaccataaatcttgacttaccaccctacaaaagatggcatgaattgatgcttgacaaggcaccaatgctaaaggttatagtgaattctctgaagaatatgataaatacattcgtgccaagtggaaaagttatgcaggtggtggatgaaaaattgcctggcctacttggcaactttcctggcccttttgaagaggaaatgaagggtattgccgctgttactgatatacctttaggagagattatttcattcaatattttttatgaattatttaccatttgtacttcaatagtagcagaagacaaaaaaggtcatctaatacatgggagaaacatggattttggagtatttcttgggtggaacataaataatgatacctgggtcataactgagcaactaaaacctttaacagtgaatttggatttccaaagaaacaacaaaactgtcttcaaggcttcaagctttgctggctatgtgggcatgttaacaggattcaaaccaggactgttcagtcttacactgaatgaacgtttcagtataaatggtggttatctgggtattctagaatggattctgggaaagaaagatgccatgtggatagggttcctcactagaacagttctggaaaatagcacaagttatgaagaagccaagaatttattgaccaagaccaagatattggccccagcctactttatcctgggaggcaaccagtctggggaaggttgtgtgattacacgagacagaaaggaatcattggatgtatatgaactcgatgctaagcagggtagatggtatgtggtacaaacaaattatgaccgttggaaacatcccttcttccttgatgatcgcagaacgcctgcaaagatgtgtctgaaccgcaccagccaagagaatatctcatttgaaaccatgtatgatgtcctgtcaacaaaacctgtcctcaacaagctgaccgtatacacaaccttgatagatgttaccaaaggtcaattcgaaacttacctgcgggactgccctgacccttgtataggttggtgagcacacgtctggcctacagaatgcggcctctgagacatgaagacaccatctccatgtgaccgaacactgcagctgtctgaccttccaaagactaagactcgcggcaggttctctttgagtcaatagcttgtcttcgtccatctgttgacaaatgacagatcttttttttttccccctatcagttgatttttcttatttacagataacttctttaggggaagtaaaacagtcatctagaattcactgagttttgtttcactttgacatttggggatctggtgggcagtcgaaccatggtgaactccacctccgtggaataaatggagattcagcgtgggtgttgaatccagcacgtctgtgtgagtaacgggacagtaaacactccacattcttcagtttttcacttctacctacatatttgtatgtttttctgtataacagccttttccttctggttctaactgctgttaaaattaatatatcattatctttgctgttattgacagcgatataattttattacatatgattagagggatgagacagacattcacctgtatatttcttttaatgggcacaaaatgggcccttgcctctaaatagcactttttggggttcaagaagtaatcagtatgcaaagcaatcttttatacaataattgaagtgttccctttttcataattactctacttcccagtaaccctaaggaagttgctaacttaaaaaactgcatcccacgttctgttaatttagtaaataaacaagtcaaagacttgtggaaaataggaagtgaacccatattttaaattctcataagtagcattcatgtaataaacaggtttttagtttgttcttcagattgatagggagttttaaagaaattttagtagttactaaaattatgttactgtatttttcagaaatccaactgcttatgaaaagtactaatagaacttgttaacctttctaaccttcacgattaactgtgaaatgtacgtcatttgtgcaagaccgtttgtccacttcattttgtataatcacagttgtgttcctgacactcaataaacagtcattggaaaaaaaaaaaaaaaaaaaaaaaaaaaaaaaaaaaaaaananaaaaaaaaaaaaaaaaanannaaaaanaaaag

SEQ ID NO: 361145 - DNA, 2366 bp, Homo sapiens
gtgcgaattcatcatcctgctgcgcgaattcatcatcctgctgcgcgagattcatcatcctgctgcgcgaattcatcatcctgctgcgcgaattcatcatcctgctgcgcgaattcatcatcctgctgcgcgattcatctcctgctcagctgtgccatcgcgcagcacgcgccggcgtggacagaggactgcagaaaatcaacctatcctccttcaggaccaacgtacagaggtgcagttccatggtacaccataaatcttgacttaccaccctacaaaagatggcatgaattgatgcttgacaaggcaccaatgctaaaggttatagtgaattctctgaagaatatgataaatacattcgtgccaagtggaaaagttatgcaggtggtggatgaaaaattgcctggcctacttggcaactttcctggcccttttgaagaggaaatgaagggtattgccgctgttactgatatacctttaggagagattatttcattcaatattttttatgaattatttaccatttgtacttcaatagtagcagaagacaaaaaaggtcatctaatacatgggagaaacatggattttggagtatttcttgggtggaacataaataatgatacctgggtcataactgagcaactaaaacctttaacagtgaatttggatttccaaagaaacaacaaaactgtcttcaaggcttcaagctttgctggctatgtgggcatgttaacaggattcaaaccaggactgttcagtcttacactgaatgaacgtttcagtataaatggtggttatctgggtattctagaatggattctgggaaagaaagatgccatgtggatagggttcctcactagaacagttctggaaaatagcacaagttatgaagaagccaagaatttattgaccaagaccaagatattggccccagcctactttatcctgggaggcaaccagtctggggaaggttgtgtgattacacgagacagaaaggaatcattggatgtatatgaactcgatgctaagcagggtagatggtatgtggtacaaacaaattatgaccgttggaaacatcccttcttccttgatgatcgcagaacgcctgcaaagatgtgtctgaaccgcaccagccaagagaatatctcatttgaaaccatgtatgatgtcctgtcaacaaaacctgtcctcaacaagctgaccgtatacacaaccttgatagatgttaccaaaggtcaattcgaaacttacctgcgggactgccctgacccttgtataggttggtgagcacacgtctggcctacagaatgcggcctctgagacatgaagacaccatctccatgtgaccgaacactgcagctgtctgaccttccaaagactaagactcgcggcaggttctctttgagtcaatagcttgtcttcgtccatctgttgacaaatgacagatcttttttttttccccctatcagttgatttttcttatttacagataacttctttaggggaagtaaaacagtcatctagaattcactgagttttgtttcactttgacatttggggatctggtgggcagtcgaaccatggtgaactccacctccgtggaataaatggagattcagcgtgggtgttgaatccagcacgtctgtgtgagtaacgggacagtaaacactccacattcttcagtttttcacttctacctacatatttgtatgtttttctgtataacagccttttccttctggttctaactgctgttaaaattaatatatcattatctttgctgttattgacagcgatataattttattacatatgattagagggatgagacagacattcacctgtatatttcttttaatgggcacaaaatgggcccttgcctctaaatagcactttttggggttcaagaagtaatcagtatgcaaagcaatcttttatacaataattgaagtgttccctttttcataattactctacttcccagtaaccctaaggaagttgctaacttaaaaaactgcatcccacgttctgttaatttagtaaataaacaagtcaaagacttgtggaaaataggaagtgaacccatattttaaattctcataagtagcattcatgtaataaacaggtttttagtttgttcttcagattgatagggagttttaaagaaattttagtagttactaaaattatgttactgtatttttcagaaatccaactgcttatgaaaagtactaatagaacttgttaacctttctaaccttcacgattaactgtgaaatgtacgtcatttgtgcaagaccgtttgtccacttcattttgtataatcacagttgtgttcctgacactcaataaacagtcattggaaa

SEQ ID NO: 361146 - DNA, 2244 bp, Homo sapiens
  misc_feature (9)..(9): n is a, c, g, or t
  misc_feature (169)..(169): n is a, c, g, or t
  misc_feature (190)..(190): n is a, c, g, or t
acccccccnccccccccccgccacccccccccccccccccccccccccccccgccccccccccccccccccccccccccccccccccccccccccccccccccccccgtcccccccccccctcccccccccccccccccccccccccccccccccccccccctcccctnccccctctcccccccccaccngtgctaaaggttatagtgaattctctgaagaatatgataaatacattcgtgccaagtggaaaagttatgcaggtggtggatgaaaaattgcctggcctacttggcaactttcctggcccttttgaagaggaaatgaagggtattgccgctgttactgatatacctttaggagagattatttcattcaatattttttatgaattatttaccatttgtacttcaatagtagcagaagacaaaaaaggtcatctaatacatgggagaaacatggattttggagtatttcttgggtggaacataaataatgatacctgggtcataactgagcaactaaaacctttaacagtgaatttggatttccaaagaaacaacaaaactgtcttcaaggcttcaagctttgctggctatgtgggcatgttaacaggattcaaaccaggactgttcagtcttacactgaatgaacgtttcagtataaatggtggttatctgggtattctagaatggattctgggaaagaaagatgccatgtggatagggttcctcactagaacagttctggaaaatagcacaagttatgaagaagccaagaatttattgaccaagaccaagatattggccccagcctactttatcctgggaggcaaccagtctggggaaggttgtgtgattacacgagacagaaaggaatcattggatgtatatgaactcgatgctaagcagggtagatggtatgtggtacaaacaaattatgaccgttggaaacatcccttcttccttgatgatcgcagaacgcctgcaaagatgtgtctgaaccgcaccagccaagagaatatctcatttgaaaccatgtatgatgtcctgtcaacaaaacctgtcctcaacaagctgaccgtatacacaaccttgatagatgttaccaaaggtcaattcgaaacttacctgcgggactgccctgacccttgtataggttggtgagcacacgtctggcctacagaatgcggcctctgagacatgaagacaccatctccatgtgaccgaacactgcagctgtctgaccttccaaagactaagactcgcggcaggttctctttgagtcaatagcttgtcttcgtccatctgttgacaaatgacagatcttttttttttccccctatcagttgatttttcttatttacagataacttctttaggggaagtaaaacagtcatctagaattcactgagttttgtttcactttgacatttggggatctggtgggcagtcgaaccatggtgaactccacctccgtggaataaatggagattcagcgtgggtgttgaatccagcacgtctgtgtgagtaacgggacagtaaacactccacattcttcagtttttcacttctacctacatatttgtatgtttttctgtataacagccttttccttctggttctaactgctgttaaaattaatatatcattatctttgctgttattgacagcgatataattttattacatatgattagagggatgagacagacattcacctgtatatttcttttaatgggcacaaaatgggcccttgcctctaaatagcactttttggggttcaagaagtaatcagtatgcaaagcaatcttttatacaataattgaagtgttccctttttcataattactctacttcccagtaaccctaaggaagttgctaacttaaaaaactgcatcccacgttctgttaatttagtaaataaacaagtcaaagacttgtggaaaataggaagtgaacccatattttaaattctcataagtagcattcatgtaataaacaggtttttagtttgttcttcagattgatagggagttttaaagaaattttagtagttactaaaattatgttactgtatttttcagaaatccaactgcttatgaaaagtactaatagaacttgttaacctttctaaccttcacgattaactgtgaaatgtacgtcatttgtgcaagaccgtttgtccacttcattttgtataatcacagttgtgttcctgacactcaataaacagtcattggaaa

SEQ ID NO: 361147 - DNA, 2380 bp, Homo sapiens
tcacgcggcgggagggggcgtggcctgcccccggcccagccggctcttctttgcctctgctggagtccggggagtggcgttggctgctagagcgatgccgggccggagttgcgtcgccttagtcctcctggctgccgccgtcagctgtgccgtcgcgcagcacgcgccgccgtggacagaggactgcagaaaatcaacctatcctccttcaggaccaacgtacagaggtgcagttccatggtacaccataaatcttgacttaccaccctacaaaagatggcatgaattgatgcttgacaaggcaccaatgctaaaggttatagtgaattctctgaagaatatgataaatacattcgtgccaagtggaaaagttatgcaggtggtggatgaaaaattgcctggcctacttggcaactttcctggcccttttgaagaggaaatgaagggtattgccgctgttactgatatacctttaggagagattatttcattcaatattttttatgaattatttaccatttgtacttcaatagtagcagaagacaaaaaaggtcatctaatacatgggagaaacatggattttggagtatttcttgggtggaacataaataatgatacctgggtcataactgagcaactaaaacctttaacagtgaatttggatttccaaagaaacaacaaaactgtcttcaaggcttcaagctttgctggctatgtgggcatgttaacaggattcaaaccaggactgttcagtcttacactgaatgaacgtttcagtataaatggtggttatctgggtattctagaatggattctgggaaagaaagatgccatgtggatagggttcctcactagaacagttctggaaaatagcacaagttatgaagaagccaagaatttattgaccaagaccaagatattggccccagcctactttatcctgggaggcaaccagtctggggaaggttgtgtgattacacgagacagaaaggaatcattggatgtatatgaactcgatgctaagcagggtagatggtatgtggtacaaacaaattatgaccgttggaaacatcccttcttccttgatgatcgcagaacgcctgcaaagatgtgtctgaaccgcaccagccaagagaatatctcatttgaaaccatgtatgatgtcctgtcaacaaaacctgtcctcaacaagctgaccgtatacacaaccttgatagatgttaccaaaggtcaattcgaaacttacctgcgggactgccctgacccttgtataggttggtgagcacacgtctggcctacagaatgcggcctctgagacatgaagacaccatctccatgtgaccgaacactgcagctgtctgaccttccaaagactaagactcgcggcaggttctctttgagtcaatagcttgtcttcgtccatctgttgacaaatgacagatcttttttttttccccctatcagttgatttttcttatttacagataacttctttaggggaagtaaaacagtcatctagaattcactgagttttgtttcactttgacatttggggatctggtgggcagtcgaaccatggtgaactccacctccgtggaataaatggagattcagcgtgggtgttgaatccagcacgtctgtgtgagtaacgggacagtaaacactccacattcttcagtttttcacttctacctacatatttgtatgtttttctgtataacagccttttccttctggttctaactgctgttaaaattaatatatcattatctttgctgttattgacagcgatataattttattacatatgattagagggatgagacagacattcacctgtatatttcttttaatgggcacaaaatgggcccttgcctctaaatagcactttttggggttcaagaagtaatcagtatgcaaagcaatcttttatacaataattgaagtgttccctttttcataattactctacttcccagtaaccctaaggaagttgctaacttaaaaaactgcatcccacgttctgttaatttagtaaataaacaagtcaaagacttgtggaaaataggaagtgaacccatattttaaattctcataagtagcattcatgtaataaacaggtttttagtttgttcttcagattgatagggagttttaaagaaattttagtagttactaaaattatgttactgtatttttcagaaatccaactgcttatgaaaagtactaatagaacttgttaacctttccaatgactgtttattgagtgtcaggaacacaactgtgattatacaaaatgaagtggacaaacggtcttgcacaaatgacgtacatttcacagttaatcgtgaaggttagaaaggttaacaagttgtcgacc

SEQ ID NO: 361148 - DNA, 2324 bp, Homo sapiens
tcacgcggcgggagggggcgtggcctgcccccggcccagccggctcttctttgcctctgctggagtccggggagtggcgttggctgctagagcgatgccgggccggagttgcgtcgccttagtcctcctggctgccgccgtcagctgtgccgtcgcgcagcacgcgccgccgtggacagaggactgcagaaaatcaacctatcctccttcaggaccaacgtacagaggtgcagttccatggtacaccataaatcttgacttaccaccctacaaaagatggcatgaattgatgcttgacaaggcaccaatgctaaaggttatagtgaattctctgaagaatatgataaatacattcgtgccaagtggaaaagttatgcaggtggtggatgaaaaattgcctggcctacttggcaactttcctggcccttttgaagaggaaatgaagggtattgccgctgttactgatatacctttaggagagattatttcattcaatattttttatgaattatttaccatttgtacttcaatagtagcagaagacaaaaaaggtcatctaatacatgggagaaacatggattttggagtatttcttgggtggaacataaataatgatacctgggtcataactgagcaactaaaacctttaacagtgaatttggatttccaaagaaacaacaaaactgtcttcaaggcttcaagctttgctggctatgtgggcatgttaacaggattcaaaccaggactgttcagtcttacactgaatgaacgtttcagtataaatggtggttatctgggtattctagaatggattctgggaaagaaagatgccatgtggatagggttcctcactagaacagttctggaaaatagcacaagttatgaagaagccaagaatttattgaccaagaccaagatattggccccagcctactttatcctgggaggcaaccagtctggggaaggttgtgtgattacacgagacagaaaggaatcattggatgtatatgaactcgatgctaagcagggtagatggtatgtggtacaaacaaattatgaccgttggaaacatcccttcttccttgatgatcgcagaacgcctgcaaagatgtgtctgaaccgcaccagccaagagaatatctcatttgaaaccatgtatgatgtcctgtcaacaaaacctgtcctcaacaaggtcaattcgaaacttacctgcgggactgccctgacccttgtataggttggtgagcacacgtctggcctacagaatgcggcctctgagacatgaagacaccatctccatgtgaccgaacactgcagctgtctgaccttccaaagactaagactcgcggcaggttctctttgagtcaatagcttgtcttcgtccatctgttgacaaatgacagatcttttttttttccccctatcagttgatttttcttatttacagataacttctttaggggaagtaaaacagtcatctagaattcactgagttttgtttcactttgacatttggggatctggtgggcagtcgaaccatggtgaactccacctccgtggaataaatggagattcagcgtgggtgttgaatccagcacgtctgtgtgagtaacgggacagtaaacactccacattcttcagtttttcacttctacctacatatttgtatgtttttctgtataacagccttttccttctggttctaactgctgttaaaattaatatatcattatctttgctgttattgacagcgatataattttattacatatgattagagggatgagacagacattcacctgtatatttcttttaatgggcacaaaatgggcccttgcctctaaatagcactttttggggttcaagaagtaatcagtatgcaaagcaatcttttatacaataattgaagtgttccctttttcataattactctacttcccagtaaccctaaggaagttgctaacttaaaaaactgcatcccacgttctgttaatttagtaaataaacaagtcaaagacttgtggaaaataggaagtgaacccatattttaaattctcataagtagcattcatgtaataaacaggtttttagtttgttcttcagattgatagggagttttaaagaaattttagtagttactaaaattatgttactgtatttttcagaaatccaactgcttatgaaaagtactaatagaacttgttaacctttctaaccttcacgattaactgtgaaatgtacgtcatttgtgcaagaccgtttgtccacttcattttgtataatcacagttgtgttcctgacactcaataaacagtcattggaaa

SEQ ID NO: 361149 - DNA, 2267 bp, Homo sapiens
tcacgcggcgggagggggcgtggcctgcccccggcccagccggctcttctttgcctctgctggagtccggggagtggcgttggctgctagagcgatgccgggccggagttgcgtcgccttagtcctcctggctgccgccgtcagctgtgccgtcgcgcagcacgcgccgccgtggacagaggactgcagaaaatcaacctatcctccttcaggaccaacgtacagaggtgcagttccatggtacaccataaatcttgacttaccaccctacaaaagatggcatgaattgatgcttgacaaggcaccaatgctaaaggttatagtgaattctctgaagaatatgataaatacattcgtgccaagtggaaaagttatgcaggtggtggatgaaaaattgcctggcctacttggcaactttcctggcccttttgaagaggaaatgaagggtattgccgctgttactgatatacctttaggagagattatttcattcaatattttttatgaattatttaccatttgtacttcaatagtagcagaagacaaaaaaggtcatctaatacatgggagaaacatggattttggagtatttcttgggtggaacataaataatgatacctgggtcataactgagcaactaaaacctttaacagtgaatttggatttccaaagaaacaacaaaactgtcttcaaggcttcaagctttgctggctatgtgggcatgttaacaggattcaaaccaggactgttcagtcttacactgaatgaacgtttcagtataaatggtggttatctgggtattctagaatggattctgggaaagaaagatgccatgtggatagggttcctcactagaacagttctggaaaatagcacaagttatgaagaagccaagaatttattgaccaagaccaagatattggccccagcctactttatcctgggaggcaaccagtctggggaaggttgtgtgattacacgagacagaaaggaatcattggatgtatatgaactcgatgctaagcagggtagatggtatgtggtacaaacaaattatgaccgttggaaacatcccttcttccttgatgatcgcagaacgcctgcaaagatgtgtctgaaccgcaccagccaagagaatatctcatttgaaaccatgtatgatgtcctgtcaacaaaacctgtcctcaacaagacgtctggcctacagaatgcggcctctgagacatgaagacaccatctccatgtgaccgaacactgcagctgtctgaccttccaaagactaagactcgcggcaggttctctttgagtcaatagcttgtcttcgtccatctgttgacaaatgacagatcttttttttttccccctatcagttgatttttcttatttacagataacttctttaggggaagtaaaacagtcatctagaattcactgagttttgtttcactttgacatttggggatctggtgggcagtcgaaccatggtgaactccacctccgtggaataaatggagattcagcgtgggtgttgaatccagcacgtctgtgtgagtaacgggacagtaaacactccacattcttcagtttttcacttctacctacatatttgtatgtttttctgtataacagccttttccttctggttctaactgctgttaaaattaatatatcattatctttgctgttattgacagcgatataattttattacatatgattagagggatgagacagacattcacctgtatatttcttttaatgggcacaaaatgggcccttgcctctaaatagcactttttggggttcaagaagtaatcagtatgcaaagcaatcttttatacaataattgaagtgttccctttttcataattactctacttcccagtaaccctaaggaagttgctaacttaaaaaactgcatcccacgttctgttaatttagtaaataaacaagtcaaagacttgtggaaaataggaagtgaacccatattttaaattctcataagtagcattcatgtaataaacaggtttttagtttgttcttcagattgatagggagttttaaagaaattttagtagttactaaaattatgttactgtatttttcagaaatccaactgcttatgaaaagtactaatagaacttgttaacctttctaaccttcacgattaactgtgaaatgtacgtcatttgtgcaagaccgtttgtccacttcattttgtataatcacagttgtgttcctgacactcaataaacagtcattggaaa

SEQ ID NO: 361150 - DNA, 2058 bp, Homo sapiens
tcacgcggcgggagggggcgtggcctgcccccggcccagccggctcttctttgcctctgctggagtccggggagtggcgttggctgctagagcgatgccgggccggagttgcgtcgccttagtcctcctggctgccgccgtcagctgtgccgtcgcgcagcacgcgccgccgtggacagaggactgcagaaaatcaacctatcctccttcaggaccaacgtacagaggtgcagttccatggtacaccataaatcttgacttaccaccctacaaaagatggcatgaattgatgcttgacaaggcaccaatgctaaaggttatagtgaattctctgaagaatatgataaatacattcgtgccaagtggaaaagttatgcaggtggtggatgaaaaattgcctggcctacttggcaactttcctggcccttttgaagaggaaatgaagggtattgccgctgttactgatatacctttaggagagattatttcattcaatattttttatgaattatttaccatttgtacttcaatagtagcagaagacaaaaaaggtcatctaatacatgggagaaacatggattttggagtatttcttgggtggaacataaataatgatacctgggtcataactgagcaactaaaacctttaacagtgaatttggatttccaaagaaacaacaaaactgtcttcaaggcttcaagctttgctggctatgtgggcatgttaacaggattcaaaccaggactgttcagtcttacactgaatgaacgtttcagtataaatggtggttatctgggtattctagaatggattctgggaaagaaagatgccatgtggatagggttcctcactagaacagttctggaaaatagcacaagttatgaagaagccaagaatttattgaccaagaccaagatattggccccagcctactttatcctgggaggcaaccagtctggggaaggttgtgtgattacacgagacagaaaggaatcattggatgtatatgaactcgatgctaagcagggtagatggtatgtggtacaaacaaattatgaccgttggaaacatcccttcttccttgatgatcgcagaacgcctgcaaagatgtgtctgaaccgcaccagccaagagaatatctcatttgaaaccatgtatgatgtcctgtcaacaaaacctgtcctcaacaagctgaccgtatacacaaccttgatagatgttaccaaaggtcaattcgaaacttacctgcgggactgccctgacccttgtataggttggtgagcacacgtctggcctacagaatgcggcctctgagacatgaagacaccatctccatgtgaccgaacactgcagctgtctgaccttccaaagactaagactcgcggcaggttctctttgagtcaatagcttgtcttcgtccatctgttgacaaatgacagatcttttttttttccccctatcagttgatttttcttatttacagataacttctttaggggaagtaaaacagtcatctagaattcactgagttttgtttcactttgacatttggggatctggtgggcagtcgaaccatggtgaactccacctccgtggaataaatggagattcagcgtgggtgttgaatccagcacgtctgtgtgagtaacgggacagtaaacactccacattcttcagtttttcacttctacctacatatttgtatgtttttctgtataacagccttttccttctggttctaactgctgttaaaattaatatatcattatctttgctgttattgacagcgatataattttattacatatgattagagggatgagacagacattcacctgtatatttcttttaatgggcacaaaatgggcccttgcctctaaatagcactttttggggttcaagaagtaatcagtatgcaaagcaatcttttatacaataattgaagtgttccctttttcataattactctacttccccaagtaccctcagtatattagctaactctcaagtaacagcatttcacgcctgcagtagattctagagatcaccgcatacac

SEQ ID NO: 361151 - DNA, 1412 bp, Homo sapiens
tcacgcggcgggagggggcgtggcctgcccccggcccagccggctcttctttgcctctgctggagtccggggagtggcgttggctgctagagcgatgccgggccggagttgcgtcgccttagtcctcctggctgccgccgtcagctgtgccgtcgcgcagcacgcgccgccgtggacagaggactgcagaaaatcaacctatcctccttcaggaccaacgtacagaggtgcagttccatggtacaccataaatcttgacttaccaccctacaaaagatggcatgaattgatgcttgacaaggcaccaatgctaaaggttatagtgaattctctgaagaatatgataaatacattcgtgccaagtggaaaagttatgcaggtggtggatgaaaaattgcctggcctacttggcaactttcctggcccttttgaagaggaaatgaagggtattgccgctgttactgatatacctttaggagagattatttcattcaatattttttatgaattatttaccatttgtacttcaatagtagcagaagacaaaaaaggtcatctaatacatgggagaaacatggattttggagtatttcttgggtggaacataaataatgatacctgggtcataactgagcaactaaaacctttaacagtgaatttggatttccaaagaaacaacaaaactgtcttcaaggcttcaagctttgctggctatgtgggcatgttaacaggattcaaaccaggactgttcagtcttacactgaatgaacgtttcagtataaatggtggttatctgggtattctagaatggattctgggaaagaaagatgccatgtggatagggttcctcactagaacagttctggaaaatagcacaagttatgaagaagccaagaatttattgaccaagaccaagatattggccccagcctactttatcctgggaggcaaccagtctggggaaggttgtgtgattacacgagacagaaaggaatcattggatgtatatgaactcgatgctaagcagggtagatggtatgtggtacaaacaaattatgaccgttggaaacatcccttcttccttgatgatcgcagaacgcctgcaaagatgtgtctgaaccgcaccagccaagagaatatctcatttgaaaccatgtatgatgtcctgtcaacaaaacctgtcctcaacaagctgaccgtatacacaacttgcatagatggtcacccaaaaggtccaaattccgaaaactttacctggcgggacttggcccttgacgcccttgtcatcagggtcgggaagaagcacaacagtactggccatacaagcaatggacgggcctcctggagaccattgaaccgacaaacactctccaattgttgacacggacaacacttggacagattgtacctgg

SEQ ID NO: 361152 - DNA, 1165 bp, Homo sapiens
tcacgcggcgggagggggcgtggcctgcccccggcccagccggctcttctttgcctctgctggagtccggggagtggcgttggctgctagagcgatgccgggccggagttgcgtcgccttagtcctcctggctgccgccgtcagctgtgccgtcgcgcagcacgcgccgccgtggacagaggactgcagaaaatcaacctatcctccttcaggaccaacgtacagaggtgcagttccatggtacaccataaatcttgacttaccaccctacaaaagatggcatgaattgatgcttgacaaggcaccaatgctaaaggttatagtgaattctctgaagaatatgataaatacattcgtgccaagtggaaaagttatgcaggtggtggatgaaaaattgcctggcctacttggcaactttcctggcccttttgaagaggaaatgaagggtattgccgctgttactgatatacctttaggagagattatttcattcaatattttttatgaattatttaccatttgtacttcaatagtagcagaagacaaaaaaggtcatctaatacatgggagaaacatggattttggagtatttcttgggtggaacataaataatgatacctgggtcataactgagcaactaaaacctttaacagtgaatttggatttccaaagaaacaacaaaactgtcttcaaggcttcaagctttgctggctatgtgggcatgttaacaggattcaaaccaggactgttcagtcttacactgaatgaacgtttcagtataaatggtggttatctgggtattctagaatggattctgggaaagaaagatgccatgtggatagggttcctcactagaacagttctggaaaatagcacaagaggtaaagtgtttcgttgctttactattaaatatttattttaaattactcatattaaaaaataaaaatatttgtcaagctccagcttaatcctttgaggaactattgcagaatttcttaagtgaacctctgacactcatgtggaattactcatgttttctttgtgcagactgtgtgttttatagcaaataaatgaattacttaaaaagcactagggatactgacattatgaaaggcacctatgaatatttttggtgtacagaaaaaaaatgacccacacacaaaag

SEQ ID NO: 361153 - DNA, 746 bp, Homo sapiens
  misc_feature (726)..(726): n is a, c, g, or t
tcacgcggcgggagggggcgtggcctgcccccggcccagccggctcttctttgcctctgctggagtccggggagtggcgttggctgctagagcgatgccgggccggagttgcgtcgccttagtcctcctggctgccgccgtcagctgtgccgtcgcgcagcacgcgccgccgtggacagaggactgcagaaaatcaacctatcctccttcaggaccaacgtacagaggtgcagttccatggtacaccataaatcttgacttaccaccctacaaaagatggcatgaattgatgcttgacaaggcaccaatgctaaaggttatagtgaattctctgaagaatatgataaatacattcgtgccaagtggaaaagttatgcaggtggtggatgaaaaattgcctggcctacttggcaactttcctggcccttttgaagaggaaatgaagggtattgccgctgttactgatatacctttaggtaaagttcacttagaagctttaaaaaaaaaagtaattaaattcttttacaagtttccattgaggtgtgatatacatacagcaaagtgcacaggtcttagatatacagctcagtgaagcttcagaaatgcatgcatgcatgtagccatgactcagatcaagatacggaagagcccagcactccacgatgctccatcatgcccctttgcagaaaatactgcctcctccagtaaacagctacctttccggtnccgagctcgagtcgtatcat

SEQ ID NO: 361154 - DNA, 1107 bp, Homo sapiens
tcacgcggcgggagggggcgtggcctgcccccggcccagccggctcttctttgcctctgctggagtccggggagtggcgttggctgctagagcgatgccgggccggagttgcgtcgccttagtcctcctggctgccgccgtcagctgtgccgtcgcgcagcacgcgccgccgtggacagaggactgcagaaaatcaacctatcctccttcaggaccaacgtacagaggtgcagttccatggtacaccataaatcttgacttaccaccctacaaaagatggcatgaattgatgcttgacaaggcaccaatgctaaaggttatagtgaattctctgaagaatatgataaatacattcgtgccaagtggaaaagttatgcaggtggtggatgaaaaattgcctggcctacttggcaactttcctggcccttttgaagaggaaatgaagggtattgccgctgttactgatatacctttaggtaaagttcacttagaagctttaaaaaaaaaagtaattaaattcttttacaagtttccattgaggtgtgatatacatacagcaaagtgcacaggtcttagatatacagctcagtgaagcttcagaaatgcatgcatgcatgtagccatgactcagatcaagatacggaagagcccagcactccacgatgctccatcatgcccctttgcagaaaatactgcctcctccagtaaacactattctgatgtcactatagattagttttgcctcttcgtgaactttgtataaatagaactgaacaaacaaaaaaaaaaaaaaaaaaaaaaaaacaaacaagagagacacaccaacacacacacaacagacaaacaccaccaacccacacgacaaacagagcgagcgacgacaaccaaattatttaatttaataacaacacaaataaaccactaaaaatacaatatactcacacccaaactaacaataaccaacacgtacacttaacgcaagggacgaaggaagagagggcggaagacaatgacaacacagagaaggaagagaagtagaagagagagaataaacgagagcacggaggagggggagaaatacgagaaaaggtactggggaggaaaggc

SEQ ID NO: 361155 - DNA, 1543 bp, Homo sapiens
tcacgcggcgggagggggcgtggcctgcccccggcccagccggctcttctttgcctctgctggagtccggggagtggcgttggctgctagagcgatgccgggccggagttgcgtcgccttagtcctcctggctgccgccgtcagctgtgccgtcgcgcagcacgcgccgccgtggacagaggactgcagaaaatcaacctatcctccttcaggaccaacgtacagaggtgcagttccatggtacaccataaatcttgacttaccaccctacaaaagatggcatgaattgatgcttgacaaggcaccaatgctaaaggttatagtgaattctctgaagaatatgataaatacattcgtgccaagtggaaaagttatgcaggtggtggatgaaaaattgcctggcctacttggcaactttcctggcccttttgaagaggaaatgaagggtattgccgctgttactgatatacctttaggagagattatttcattcaatattttttatgaattatttaccatttgtacttcaatagtagcagaagacaaaaaagggtaattgtgcgctgagggagggtgggcagcatgaagcactacataaagaaaaatcttctaaatgaaattagaacttctgaaatttgggcttgctatgtaaattctgtgtatgttgcatacagctttttatttcttggtaaaattttgtgattgtactgaaaattttccttattttcagactactgtactgcctattaaagttgatttcagacatgcaaaaaacctggaagaaatgttgcagggctagaaacattcttctcttcctcatagtttacttctacccatctacatgatttgatagaagtgctcgcaggaggtgcttccttatcttcgtgtatgtcatgacatctgtccttttcttgaggcccagaacacacattctcccatcctttcccagccaggcaacccaatggataccagcctcactttcccgtatttttcctgactggttcccagagtacaaagcacaggacaacttcgctaactcaccctgatctttgacctatactctgggtataaatctgcctgtaccttacccttgagatgtcctgctctaggggatgatgcctgaagggaaacatttgatgaatcacagtaattgaggctcagatttctgtgtcctggtagaaccatgtgatagtgaaccaaaacatgaccattgattccttttcccatattctgatcttacctggaaacccgtgctctcagattttgtggggttatctggcagatagatggtgacaacagtcccatctggtgaaggcttaggatattaggatgtttcttacttcttattgtttgaagaaacagttgtgaataaaaattaatcaaaattagaggccaggcacagtggcttacacctgtaatgccagcactttgcgaggccgaggcgggcgaatcatctgaggttgggagtttgacaccagactggccaacatggtaaaaccccttctctactaaaagaaaaatacaaaaaaaaaaaaaaagtagc

SEQ ID NO: 361156 - DNA, 405 bp, Homo sapiens
cctgttctagatgattaggatagagccatgaacaccaacaaagacaaagctgtgctctgttttcattatataatgtcaggtggtgataaggactaggaagaaaataaagtgatgcaggggagtagggaggtagagtggatggctatttagatagagtggcttctcccttgaggtggcatttaaacagagctctgcctgtgaagccattgacttcttcacaacagaaagcttctgttggggaagggtaggagagcagtaacaattcaggaatatttttaaagtacctactgtgtgcttcatgctggggaccgagaagttgaacaaaactggaaaattgttagcattctctgatttttattctagagtctgtgcaagacccagacaataaagaactaccagaaaaaa

SEQ ID NO: 361157 - DNA, 489 bp, Homo sapiens
tttgttagataattctagtatctctgtcatgtcagtgttggcacctattggttatatttttagataagttaagatttttcttgttcttactatgatgaatgtttttttatcaaaacctggacatttgggtattgtgttatgggactctggatcttatttaagccttctgttttagctggcttcttctaataccactctggctggtggtgagggagccacctctttattaatgccaggtgtggtagaaatccaggttccccactcagcatccattaacatcctcaggacagaaagggctcctcattagtgccgggtgtaggtgggaattctggctccccatgttgcctccactgataccacaagcattggagtagccttgttacttttgagcactggaaaaagtcttattatctccactagagctactctgacaccatcccagtggagaaggggaagggtgccccattaacagaagtggaagtccagact

SEQ ID NO: 361158 - DNA, 1767 bp, Homo sapiens
cccggcacgaggagctcccgcccgcccgcggccgcccgggagctcgtccagccccgcgctgcgctcgcccgcccgctgcccgccggagcaccgcggcctccgcccgcgtccatctgcccgccgcccgcgcctgttccgcagcccgcgtccgcgccggccccacagctctgcgtccgggtattactcagcacagaaattcaggagacacagacaagttcttccacgatgtcgtacagacgagaactagagaaataccgtgacctggatgaagatgaaatccttggagccctaacagaggaagagctgaggaccctggaaaatgagctggatgagctggaccctgataatgcactgctgcctgcaggcctgaggcagaaggatcagaccaccaaggcgcccacgggcccctttaaaagagaggagctcttggatcacttggaaaagcaagcaaaggagtttaaggaccgagaagatctggtcccctacacaggggaaaaacgaggaaaggtctgggttcctaagcagaagccactggatcctgtgctggaaagtgtgacgctggaaccggagctggaggaagccttggcaaatgcttcagatgcagaactctgtgacattgcagcgatcctgggcatgcacacgctcatgagtaaccagcagtactaccaggccctgagcagcagctccatcatgaacaaggaggggctcaacagcgtgattaaacccacacaatacaagcctgtgcccgacgaagaaccaaattcaacagacgtagaggaaacgctggaacggataaagaacaacgacccaaaacttgaagaagttaacctcaataatatccggaatatccccatccccaccctcaaggcatatgcagaagccctgaaagaaaactcatatgtgaagaagttcagcatcgtggggacacggagtaatgaccccgtggcgtatgcccttgctgagatgctcaaggagaacaaggtgttgaagacactgaatgtggaatccaacttcatttctggagctgggattctgcgcctggtagaagccctcccatacaacacttctctggtggaaatgaaaattgacaaccagagccagcccctgggcaacaaagtggaaatggagattgtgagcatgttggaaaaaaacgcaacacttctcaaattcggctaccactttacccagcaaggaccccggcttcgggcatccaacgcaatgatgaacaacaatgaccttgtgaggaagaggaggcttgcggacctgactgggcccatcattcccaagtgccggagtggtgtctagtgtgtggcggtggagtccatgcctttgaactggatgtgttctattgatgacctgtgctctgcaggggaaaccagaaggcaaaatgctggcagcatgaaacccttttgtggttcagttctttatgcactaaggttttaggttgactagtggttgtagttgaaaattttataaaataccgttaatgtgaagtttttctttagtcacagaagttgaatctggttattatttaaaaactagaagcccccaaaccagcagatcttactgaagatgatgttccagcagcagcgacttagccccaggagcccagtttcaatggccttgctgtgtggtgtttcaagtgcatttaaaatgtgtgacacagaaacggcacactcttccacatgcttttgaagtattataaaacactttattacaaatttgtcttagctattagcaaataaaactgattatcattctttatta

SEQ ID NO: 361159 - DNA, 2823 bp, Homo sapiens
agcggagcgccgggaaagatggcggcgtctgtggtttgaattccagcggcgccgccagagtctgaacaagagctggggtggagggggcggggacctggggagcccggcgggtcgctatcgcggggggtactagtggcgccgccgccacagacaccaacgccgtcgccacctctgtatccatgatggacttggtgttggaagaggacgtcaccgtcgctgggacgctcagcggctgcagtggccttgttcccagtgtaccagaaaactcatatgtgaagaagttcagcatcgtggggacacggagtaatgaccccgtggcgtatgcccttgctgagatgctcaaggagaacaaggtgttgaagacactgaatgtggaatccaacttcatttctggagctgggattctgcgcctggtagaagccctcccatacaacacttctctggtggaaatgaaaattgacaaccagagccagcccctgggcaacaaagtggaaatggagattgtgagcatgttggaaaaaaacgcaacacttctcaaattcggctaccactttacccagcaaggaccccggcttcgggcatccaacgcaatgatgaacaacaatgaccttgtgaggaagaggaggcttgcggacctgactgggcccatcattcccaagtgccggagtggtgtctagtgtgtggcggtggagtccatgcctttgaactggatgtgttctattgatgacctgtgctctgcaggggaaaccagaaggcaaaatgctggcagcatgaaacccttttgtggttcagttctttatgcactaaggttttaggttgactagtggttgtagttgaaaattttataaaataccgttaatgtgaagtttttctttagtcacagaagttgaatctggttattatttaaaaactagaagcccccaaaccagcagatcttactgaagatgatgttccagcagcagcgacttagccccaggagcccagtttcaatggccttgctgtgtggtgtttcaagtgcatttaaaatgtgtgacacagaaacggcacactcttccacatgcttttgaagtattataaaacactttattacaaatttgtcttagctattagcaaataaaactgattatcattctttattaaccctccttggaattttgaaaacctcgattaaagttgccaaattgattactggatccagaacacaattttcccctcagaacagatagacagactgaagccactgaactctgccaggagtcaacatgagattccttttgctggatatgcagaaatgataggaaaaaaaccaatggtgaaatttcaagtttcaaaaaccaacctttcattaccaatcccaggcaacaaacatgtccctgagtgttctttaagaacatttgggatttatgtacaatttaatactggagttagaactttttccttattgaatgccaaccttatgatggatgtgaaaatctacggccaaatacttttgaaaacacctttctatattgcacagtgggcaaatggcttatgtgaggtaagacactagagggataaatttccagatcaacatggctatggtatttagtaatggcccagcttagagacttcagctactgatctcatcacttattagacaaattgctgctgaccttacgcctgtatattaagcctccgcaggatgccggacaatggtgaagaaactccagatatcaaggaattgggaaatcctggccaaaccaccccaagatgattacactgaaatgtagtattagtactgctgccagatctctttttaacatcatgtgcgtctcttgggatccagcaaaagtgttaagccacaatgcccttgtgccttttaatataccacagtgccagttaaactaatatttttgtttgttgcttttgggagttattttcattagtgatttcagcaaatctcatgataaaggacaaggtcaagaactccagagcactgagcagagaggctggtgatgaaaaggtgaaggcctgcgcactgaactgtaaggcagtgggcagtacagggtaactggaggcggggccagggcctcagcgctatggaagagtgtccactgaggctgcacatggcccaggagtggcaccatgttgcagggacaaccatccccatttggcttctccttaaaacacaattgcagctgcattctgcatcgctgaaaactgcaatataatattaaatctgttggtctatgcatggctgcgtatgtgtttcttggaacctgtgtgacagggacatgtgcctggcacactggccagaagactgggcagccaccatggcagtgctggatgacctcagtaagaatgtgtcatgtattccaggtgctgatctaaaaactgtggctcaaatgtcaccgagcttatatgaagctcccagagagaacatttaaaagctcagagagtaagtgctggggaaagcagagctatcagaggaaatctctcatagaaacgaaaccaaaccaacagaaaatgaagaaggccacatctttaaggccacctctgcctctatcagatgagctgctggtctagatcaggggctggcaaacttttctgtaaaaggccagacagtaaaaatttccgattttgcaggccacatagtgtctgttgcaactattcaactctgccatagatcatgtgtaaaggaatgggtgtggctgttcaataaactatacagttgacccttgaacaatatgggtttgaactgcatggctgcacttatatatggatttttttcaaccatacaggttgaaaatacagtattggcagggggcgaaacctgcgtacatg

SEQ ID NO: 361160 - DNA, 3453 bp, Homo sapiens
  misc_feature (2835)..(2835): n is a, c, g, or t
  misc_feature (2837)..(2838): n is a, c, g, or t
  misc_feature (2848)..(2848): n is a, c, g, or t
  misc_feature (2853)..(2853): n is a, c, g, or t
  misc_feature (2856)..(2856): n is a, c, g, or t
  misc_feature (2859)..(2859): n is a, c, g, or t
  misc_feature (2864)..(2864): n is a, c, g, or t
  misc_feature (2870)..(2870): n is a, c, g, or t
  misc_feature (2876)..(2876): n is a, c, g, or t
  misc_feature (2883)..(2883): n is a, c, g, or t
  misc_feature (2885)..(2885): n is a, c, g, or t
  misc_feature (2890)..(2891): n is a, c, g, or t
  misc_feature (2895)..(2895): n is a, c, g, or t
  misc_feature (2897)..(2897): n is a, c, g, or t
  misc_feature (2901)..(2901): n is a, c, g, or t
  misc_feature (2903)..(2903): n is a, c, g, or t
  misc_feature (2924)..(2924): n is a, c, g, or t
  misc_feature (2926)..(2927): n is a, c, g, or t
cccggcacgaggagctcccgcccgcccgcggccgcccgggagctcgtccagccccgcgctgcgctcgcccgcccgctgcccgccggagcaccgcggcctccgcccgcgtccatctgcccgccgcccgcgcctgttccgcagcccgcgtccgcgccggccccacagctctgcgtccgggtattactcagcacagaaattcaggagacacagacaagttcttccacgatgtcgtacagacgagaactagagaaataccgtgacctggatgaagatgaaatccttggagccctaacagaggaagagctgaggaccctggaaaatgagctggatgagctggaccctgataatgcactgctgcctgcaggcctgaggcagaaggatcagaccaccaaggcgcccacgggcccctttaaaagagaggagctcttggatcacttggaaaagcaagcaaaggagtttaaggaccgagaagatctggtcccctacacaggggaaaaacgaggaaaggtctgggttcctaagcagaagccactggatcctgtgctggaaagtgtgacgctggaaccggagctggaggaagccttggcaaatgcttcagatgcagaactctgtgacattgcagcgatcctgggcatgcacacgctcatgagtaaccagcagtactaccaggccctgagcagcagctccatcatgaacaaggaggggctcaacagcgtgattaaacccacacaatacaagcctgtgcccgacgaagaaccaaattcaacagacgtagaggaaacgctggaacggataaagaacaacgacccaaaacttgaagaagttaacctcaataatatccggaatatccccatccccaccctcaaggcatatgcagaagccctgaaagaaaactcatatgtgaagaagttcagcatcgtggggacacggagtaatgaccccgtggcgtatgcccttgctgagatgctcaaggagaacaaggtgttgaagacactgaatgtggaatccaacttcatttctggagctgggattctgcgcctggtagaagccctcccatacaacacttctctggtggaaatgaaaattgacaaccagagccagcccctgggcaacaaagtggaaatggagattgtgagcatgttggaaaaaaacgcaacacttctcaaattcggctaccactttacccagcaaggaccccggcttcgggcatccaacgcaatgatgaacaacaatgaccttgtgaggaagaggaggcttgcggacctgactgggcccatcattcccaagtgccggagtggtgtctagtgtgtggcggtggagtccatgcctttgaactggatgtgttctattgatgacctgtgctctgcaggggaaaccagaaggcaaaatgctggcagcatgaaacccttttgtggttcagttctttatgcactaaggttttaggttgactagtggttgtagttgaaaattttataaaataccgttaatgtgaagtttttctttagtcacagaagttgaatctggttattatttaaaaactagaagcccccaaaccagcagatcttactgaagatgatgttccagcagcagcgacttagccccaggagcccagtttcaatggccttgctgtgtggtgtttcaagtgcatttaaaatgtgtgacacagaaacggcacactcttccacatgcttttgaagtattataaaacactttattacaaatttgtcttagctattagcaaataaaactgattatcattctttattaaccctccttggaattttgaaaacctcgattaaagttgccaaattgattactggatccagaacacaattttcccctcagaacagatagacagactgaagccactgaactctgccaggagtcaacatgagattccttttgctggatatgcagaaatgataggaaaaaaaccaatggtgaaatttcaagtttcaaaaaccaacctttcattaccaatcccaggcaacaaacatgtccctgagtgttctttaagaacatttgggatttatgtacaatttaatactggagttagaactttttccttattgaatgccaaccttatgatggatgtgaaaatctacggccaaatacttttgaaaacacctttctatattgcacagtgggcaaatggcttatgtgaggtaagacactagagggataaatttccagatcaacatggctatggtatttagtaatggcccagcttagagacttcagctactgatctcatcacttattagacaaattgctgctgaccttacgcctgtatattaagcctccgcaggatgccggacaatggtgaagaaactccagatatcaaggaattgggaaatcctggccaaaccaccccaagatgattacactgaaatgtagtattagtactgctgccagatctctttttaacatcatgtgcgtctcttgggatccagcaaaagtgttaagccacaatgcccttgtgccttttaatataccacagtgccagttaaactaatatttttgtttgttgcttttgggagttattttcattagtgatttcagcaaatctcatgataaaggacaaggtcaagaactccagagcactgagcagagaggctggtgatgaaaaggtgaaggcctgcgcactgaactgtaaggcagtgggcagtacagggtaactggaggcggggccagggcctcagcgctatggaagagtgtccactgaggctgcacatggcccaggagtggcaccatgttgcagggacaaccatccccatttggcttctccttaaaacacaattgcagctgcattctgcatcgcccaacaccgcaacncnntcccaacccngttgnccnacncatgnctcgcntatctnccccccngnccccnngtcncnggcncntcgcccccgcccccccgcccngnnccccgcgcccccaccatggcagtgctggatgacctcagtaagaatgtgtcatgtattccaggtgctgatctaaaaactgtggctcaaatgtcaccgagcttatatgaagctcccagagagaacatttaaaagctcagagagtaagtgctggggaaagcagagctatcagaggaaatctctcatagaaacgaaaccaaaccaacagaaaatgaagaaggccacatctttaaggccacctctgcctctatcagatgagctgctggtctagatcaggggctggcaaacttttctgtaaaaggccagacagtaaaaatttccgattttgcaggccacatagtgtctgttgcaactattcaactctgccatagatcatgtgtaaaggaatgggtgtggctgttcaataaactatacagttgacccttgaacaatatgggtttgaactgcatggctgcacttatatatggatttttttcaaccatacaggttgaaaatacagtattggcagggggcgaaacctgcgtacatg

SEQ ID NO: 361161 - DNA, 2824 bp, Homo sapiens
cccggcacgaggagctcccgcccgcccgcggccgcccgggagctcgtccagccccgcgctgcgctcgcccgcccgctgcccgccggagcaccgcggcctccgcccgcgtccatctgcccgccgcccgcgcctgttccgcagcccgcgtccgcgccggccccacagctctgcgtccgggtattactcagcacagaaattcaggagacacagacaagttcttccacgatgtcgtacagacgagaactagagaaataccgtgacctggatgaagatgaaatccttggagccctaacagaggaagagctgaggaccctggaaaatgagctggatgagctggaccctgataatgcactgctgcctgcaggcctgaggcagaaggatcagaccaccaaggcgcccacgggcccctttaaaagagaggagctcttggatcacttggaaaagcaagcaaaggagtttaaggaccgagaagatctggtcccctacacaggggaaaaacgaggaaaggtctgggttcctaagcagaagccactggatcctgtgctggaaagtgtgacgctggaaccggagctggaggaagccttggcaaatgcttcagatgcagaactctgtgacattgcagcgatcctgggcatgcacacgctcatgagtaaccagcagtactaccaggccctgagcagcagctccatcatgaacaaggaggggctcaacagcgtgattaaacccacacaatacaagcctgtgcccgacgaagaaccaaattcaacagacgtagaggaaacgctggaacggataaagaacaacgacccaaaacttgaagaagttaacctcaataatatccggaatatccccatccccaccctcaaggcatatgcagaagccctgaaagaaaactcatatgtgaagaagttcagcatcgtggggacacggagtaatgaccccgtggcgtatgcccttgctgagatgctcaaggagaacaaggtgttgaagacactgaatgtggaatccaacttcatttctggagctgggattctgcgcctggtagaagccctcccatacaacacttctctggtggaaatgaaaattgacaaccagagccagcccctgggcaacaaagtggaaatggagattgtgagcatgttggaaaaaaacgcaacacttctcaaattcggctaccactttacccagcaaggaccccggcttcgggcatccaacgcaatgatgaacaacaatgaccttgtgaggaagaggaggcttgcggacctgactgggcccatcattcccaagtgccggagtggtgtctagtgtgtggcggtggagtccatgcctttgaactggatgtgttctattgatgacctgtgctctgcaggggaaaccagaaggcaaaatgctggcagcatgaaacccttttgtggttcagttctttatgcactaaggttttaggttgactagtggttgtagttgaaaattttataaaataccgttaatgtgaagtttttctttagtcacagaagttgaatctggttattatttaaaaactagaagcccccaaaccagcagatcttactgaagatgatgttccagcagcagcgacttagccccaggagcccagtttcaatggccttgctgtgtggtgtttcaagtgcatttaaaatgtgtgacacagaaacggcacactcttccacatgcttttgaagtattataaaacactttattacaaatttgtcttagctattagcaaataaaactgattatcattctttattaaccctccttggaattttgaaaacctcgattaaagttgccaaattgattactggatccagaacacaattttcccctcagaacagatagacagactgaagccactgaactctgccaggagtcaacatgagattccttttgctggatatgcagaaatgataggaaaaaaaccaatggtgaaatttcaagtttcaaaaaccaacctttcattaccaatcccaggcaacaaacatgtccctgagtgttctttaagaacatttgggatttatgtacaatttaatactggagttagaactttttccttattgaatgccaaccttatgatggatgtgaaaatctacggccaaatacttttgaaaacacctttctatattgcacagtgggcaaatggcttatgtgaggtaagacactagagggataaatttccagatcaacatggctatggtatttagtaatggcccagcttagagacttcagctactgatctcatcacttattagacaaattgctgctgaccttacgcctgtatattaagcctccgcaggatgccggacaatggtgaagaaactccagatatcaaggaattgggaaatcctggccaaaccaccccaagatgattacactgaaatgtagtattagtactgctgccagatctctttttaacatcatgtgcgtctcttgggatccagcaaaagtgttaagccacaatgcccttgtgccttttaatataccacagtgccagttaaactaatatttttgtttgttgcttttgggagttattttcattagtgacaggctgacttctgtagattaaaagtctagtatgtttagcctttatttttagatttctgtacataagatgcctgttgataggttataatcttcagtagctcagagcatgtattatcacagcacatggtaggcatgcagacatatttgttgaaagagggcaggtatgtgaagaatgccatcattgaattcacttccttctttgcttgtcaaaaggctactcctgatggggtcaggccatcagcaagtggcttttaagcggccttgtacg

SEQ ID NO: 361162 - DNA, 483 bp, Homo sapiens
ggggtatagcccggacagcagggttttaaaagtctccttaggactagatgattgaatgtcctccttcaaatactcttctgtcgtggagctcttacttgggcacctgctcagagagaggctgttgtaaagcagtgaaaagatctgttcttggcatccagcagacctgaatttgaatcccagctcatttgctcctggccgtgtgacctttcaacttctctaaacttccatttccctactcttggagaggaggctaaaatcccctcccactactcaagagtttctgcaggtagaggtggtttaggcactgtacacatggaatgagtggtgattttattttttattttttattttttcttgactaaagagccagcccctgggcaacaaagtggaaatggagattgtgagcatgttggaaaaaaacgcaacacttctcaaattcggctaccactttacccagcaaggaccccggcttcgggcatccaa

SEQ ID NO: 361163 - DNA, 3451 bp, Homo sapiens
cccggcacgaggagctcccgcccgcccgcggccgcccgggagctcgtccagccccgcgctgcgctcgcccgcccgctgcccgccggagcaccgcggcctccgcccgcgtccatctgcccgccgcccgcgcctgttccgcagcccgcgtccgcgccggccccacagctctgcgtccgggtattactcagcacagaaattcaggagacacagacaagttcttccacgatgtcgtacagacgagaactagagaaataccgtgacctggatgaagatgaaatccttggagccctaacagaggaagagctgaggaccctggaaaatgagctggatgagctggaccctgataatgcactgctgcctgcaggcctgaggcagaaggatcagaccaccaaggcgcccacgggcccctttaaaagagaggagctcttggatcacttggaaaagcaagcaaaggagtttaaggaccgagaagatctggtcccctacacaggggaaaaacgaggaaaggtctgggttcctaagcagaagccactggatcctgtgctggaaagtgtgacgctggaaccggagctggaggaagccttggcaaatgcttcagatgcagaactctgtgacattgcagcgatcctgggcatgcacacgctcatgagtaaccagcagtactaccaggccctgagcagcagctccatcatgaacaaggaggggctcaacagcgtgattaaacccacacaatacaagcctgtgcccgacgaagaaccaaattcaacagacgtagaggaaacgctggaacggataaagaacaacgacccaaaacttgaagaagttaacctcaataatatccggaatatccccatccccaccctcaaggcatatgcagaagccctgaaagaaaactcatatgtgaagaagttcagcatcgtggggacacggagtaatgaccccgtggcgtatgcccttgctgagatgctcaaggagaacaaggtgttgaagacactgaatgtggaatccaacttcatttctggagctgggattctgcgcctggtagaagccctcccatacaacacttctctggtggaaatgaaaattgacaaccagagccagcccctgggcaacaaagtggaaatggagattgtgagcatgttggaaaaaaacgcaacacttctcaaattcggctaccactttacccagcaaggaccccggcttcgggcatccaacgcaatgatgaacaacaatgaccttgtgaggaagaggaggcttgcggacctgactgggcccatcattcccaagtgccggagtggtgtctagtgtgtggcggtggagtccatgcctttgaactggatgtgttctattgatgacctgtgctctgcaggggaaaccagaaggcaaaatgctggcagcatgaaacccttttgtggttcagttctttatgcactaaggttttaggttgactagtggttgtagttgaaaattttataaaataccgttaatgtgaagtttttctttagtcacagaagttgaatctggttattatttaaaaactagaagcccccaaaccagcagatcttactgaagatgatgttccagcagcagcgacttagccccaggagcccagtttcaatggccttgctgtgtggtgtttcaagtgcatttaaaatgtgtgacacagaaacggcacactcttccacatgcttttgaagtattataaaacactttattacaaatttgtcttagctattagcaaataaaactgattatcattctttattaaccctccttggaattttgaaaacctcgattaaagttgccaaattgattactggatccagaacacaattttcccctcagaacagatagacagactgaagccactgaactctgccaggagtcaacatgagattccttttgctggatatgcagaaatgataggaaaaaaaccaatggtgaaatttcaagtttcaaaaaccaacctttcattaccaatcccaggcaacaaacatgtccctgagtgttctttaagaacatttgggatttatgtacaatttaatactggagttagaactttttccttattgaatgccaaccttatgatggatgtgaaaatctacggccaaatacttttgaaaacacctttctatattgcacagtgggcaaatggcttatgtgaggtaagacactagagggataaatttccagatcaacatggctatggtatttagtaatggcccagcttagagacttcagctactgatctcatcacttattagacaaattgctgctgaccttacgcctgtatattaagcctccgcaggatgccggacaatggtgaagaaactccagatatcaaggaattgggaaatcctggccaaaccaccccaagatgattacactgaaatgtagtattagtactgctgccagatctctttttaacatcatgtgcgtctcttgggatccagcaaaagtgttaagccacaatgcccttgtgccttttaatataccacagtgccagttaaactaatatttttgtttgttgcttttgggagttattttcattagtgatttcagcaaatctcatgataaaggacaaggtcaagaactccagagcactgagcagagaggctggtgatgaaaaggtgaaggcctgcgcactgaactgtaaggcagtgggcagtacagggtaactggaggcggggccagggcctcagcgctatggaagagtgtccactgaggctgcacatggcccaggagtggcaccatgttgcagggacaaccatccccatttggcttctccttaaaacacaattgcagctgcattctgcatcgctgaaaactgcaatataatattaaatctgttggtctatgcatggctgcgtatgtgtttcttggaacctgtgtgacagggacatgtgcctggcacactggccagaagactgggcagccaccatggcagtgctggatgacctcagtaagaatgtgtcatgtattccaggtgctgatctaaaaactgtggctcaaatgtcaccgagcttatatgaagctcccagagagaacatttaaaagctcagagagtaagtgctggggaaagcagagctatcagaggaaatctctcatagaaacgaaaccaaaccaacagaaaatgaagaaggccacatctttaaggccacctctgcctctatcagatgagctgctggtctagatcaggggctggcaaacttttctgtaaaaggccagacagtaaaaatttccgattttgcaggccacatagtgtctgttgcaactattcaactctgccatagatcatgtgtaaaggaatgggtgtggctgttcaataaactatacagttgacccttgaacaatatgggtttgaactgcatggctgcacttatatatggatttttttcaaccatacaggttgaaaatacagtattggcagggggcgaaacctgcgtacatg

SEQ ID NO: 361164 - DNA, 3414 bp, Homo sapiens
agaggccgaaaaagtacagccccttccgggctccgcggtacgggaagacagctttgggatgtcggaagatcctagaggtcccaaggtagctgacttgcgaagctgaggctccagccgagggctccaggcctctgaccggcccagcagtgagcgcggctgcccgacgcttcagggccgggagcagggagcgtgagtcgccatggcgacgccggcgggtctggagcgctgggttcaggacgagctgcactcggtgttggggctgagcgagcggcacgtcgcccagtttctgatcggtaccgcacagcgctgcacctctgccgaggagttcgtgcagcgcctacgagacactgataccttggatctcagtgggccggcccgggacttcgccctgagactctggaacaaggtaccacgaaaggcagtggtagaaaagccagctcgggcagcagagcgagaggcccgggccctgctggagaagaaccgatcttataggttactggaagacagtgaagagagcagtgaggagactgtgagtagggctggaagcagcctccagaagaaacgtaaaaagcggaaacacctcaggaagaagcgtgaggaagaagaggaggaagaggcttctgagaaagggaagaagaaaacaggggggagtaaacagcagacagagaagccagagtcggaagatgagtgggaacggacagagcgtgaacgccttcaggacctggaggagcgtgatgcctttgctgagcgggttcgacagcgggacaaggatcggactcgaaatgtcctggaacggtcagacaagaaggcttatgaagaggctcagaagcgcctcaagatggccgaggaagaccggaaggccatggtccctgagctgcggaagaaatctcgccgagagtacctggctaagcgggagcgagagaagcttgaggacctggaggcggagctggctgatgaggagttcctttttggggacgtggagctgagccggcacgagcggcaggagctcaaatataagcggcgagtgcgggatctcgcccgggagtaccgggcagctggggagcaggagaagctggaggccaccaatcgctaccacatgcccaaggaaacccgaggacagccagcccgagctgtggatctagtggaggaggaatcaggagcccctggggaggagcagcggcgctgggaggaggcgcggcttggggcagcgtccctgaagtttggggcccgagatgctgcctctcaggagcccaagtatcaactggtgctggaggaggaggagaccattgagtttgtccgggccactcagctccagggtgatgaggagccgtcagctccacccacttcaactcaggcccagcagaaagagtccatccaggccgtccgccgcagcctcccggtgttcccatttcgagaggagctcctggctgctattgcaaatcaccaagtcctcatcattgaaggcgagacaggctcagggaagaccacccagatcccgcagtatctctttgaggagggttatacaaacaagggtatgaagattgcctgcacccaaccccggagagtggctgccatgagtgtggccgcccgagtggcccgggagatgggtgtgaagcttgggaatgaggttggctacagcatccgctttgaggactgcacatcagagcgaactgtcctccgctacatgacagatgggatgcttctccgggagttcctctctgagcctgacctggcgagttacagcgtggtgatggtggatgaggcacacgaaaggaccctacacacagacattctctttggattgatcaaggatgttgctcgcttccgacctgagctcaaggtcctggtggcttcagccacaatggacactgcccgtttttccaccttctttgatgacgcccctgtgtttcgaatccccggacgcaggtttcctgtggacatcttctacaccaaggctccagaggctgactacttggaagcttgtgtagtatctgtgttgcagatccatgtgacccagccccctggggatatcctggtgttcctgacaggacaggaggagattgaggctgcctgtgagatgctccaggatcgctgccgccgcctgggctccaaaatccgggagctcctggtgctgcccatttatgccaatctgccctctgacatgcaggcccgtatcttccagcccacaccacctggggcacgaaaggtggttgtggcaacgaacattgctgagacatcactcaccattgagggcatcatttatgtgctggatccagggttctgtaagcagaagagctacaacccccgcacaggcatggaatcgctcactgtcacaccctgcagcaaggcctcagccaatcagcgagctggcagggcaggtcgggtggctgcagggaagtgcttccgcctgtataccgcctgggcctatcagcacgagcttgaggaaaccacagtgcctgagatccagaggaccagcttgggcaatgtcgtgttgctgctcaagagcttagggatccatgacctaatgcactttgatttcctggaccctccaccatatgagacactgctgctggctttggagcagctgtatgctctgggagccctcaaccaccttggggagctcaccacgtctggtcgaaagatggcagagctgccggtggaccccatgctgtccaaaatgatcttagcctctgagaagtacagctgttcagaggagatcctgacagtggctgccatgctctctgtcaacaactccatcttctaccgaccaaaggacaaggtcgtccatgctgacaatgcccgtgtcaacttctttctccctggcggtgaccacctggttctgctaaatgtttacacacagtgggctgagagtggttactcttcccagtggtgctatgagaactttgtacagttcagatcgatgcgccgagcccgggatgtgcgggaacagctggaagggctcttggaacgtgtggaagttggtctcagttcctgccagggggactatatccgtgtacgcaaggccatcactgctggttacttttaccacacggcacggttgactcggagtggctaccgcacagtgaaacagcagcagacagtcttcattcatcccaactcctccctctttgagcaacagccacgctggctgctctaccacgaacttgtcttgaccaccaaagagttcatgagacaggtactggagattgagagcagttggcttctggaggtggctccccattattataaggccaaggagctagaagatccccatgctaagaaaatgcccaaaaaaataggcaaaacacgagaagagctagggtaagagaaggacgtaaacagaacctgacaccagctccttttccttctatacattatttaatacctattaaataaaattatttttggaataaa

SEQ ID NO: 361165 - DNA, 755 bp, Homo sapiens
aaaagggattcatgaatgtaatgggggtggggtcaggccagctgaacaatatgtgcctttttgactcttcagaggctgtgaatttctggtcttggaagatcacagtggagcaattggacagataggattttatccttcatatcccttgcaaaagatctctaagaacccatggagagccagccagcgcaagagtgtctgatgcagatgtttttgcccatcgagccagcctgctttgtggaatggctggggacttcaccatcacagttagggttaggcacaaagagttgaggtcagggaggtgggtaggggaagatggggatgagttcctgggacttggctgccacccagaaaagccaaagaacaaagagaaagaaggtgtcatgcacataactgagttaggaggaaaccaaggagcatgcagagtcctgtgagagttgaggtagaaaggcttaacttgctcctgtctccaaaagaagaaacagtcaagaatgatgccagcagcagttgtcccacaggacaccaggagcttctaggctatttgaatcacagcagctcaggtctattacccccagtcagccttgctggcccacccttattgaaagggaccctgccttccactttttttttcctttaaaacgtatcagccgggcgcggtggctcacgcctgtaatcccagcactttgggaggcagaggcaggcggatcacgaggtaaggagatcaagaccatcctggctaacacggtgaaaccccgtct

SEQ ID NO: 361166 - DNA, 5733 bp, Homo sapiens
ttttatacaaaacagtagcaatgtagaatatgggaatcgtcttccgctgccacgcacgcaagttgtgaacattccaagccaatgtatacaatttggaggggaaggctaaacaatagcatcaaccacgctactgaacataggaatttttcatttaaaaagattaaaaattagatagcaatgtcttcttaatattgctctcgtcattgaagactgaggaaaaataaaaagtgactttataagttttttaaaaaaagaggcaatggggaaaaaaacaagaggctgctacaacactgccatacagtcaaaccatcatacttcaatatttgcatactcgatagcagcattatttttactgaaccgtgtgcaactacatgtagaaacacatcaaagcaaaatatcatggcagttatcaatcaagatccaaaaaggaaaaaaacaaacaaaaaaataactctaggatgaacacactataagaacatttatggagaaagaatcagtatctacattcttggactgttccattctgccccaataaaagtgtcaattcaactgtcagctgtggatttttggcggatttgagtttttccagttcttatgatactgcatgcttggaacaaagggggtcataataaatccttctacacaatgaacttcataggcagacagctgaaaataaatttactacttgtaaacacacacaaaaaaaaaatacaagattttttgtatctttaaacaatcagtgcttccaaaagcccattatcttctatatcgacctctctcccctcggtctctgtctcgatcacataatcgctctctttctctttctctatcacgtcctctatctcgctctctgtctcgtctgttatctctagggcggtctcgctctcgttcccggtctctttcacggggtctacttctccggccactgacaacagcttgtgtgcgacgaaggaaatcatccaccctcatatcataatcatgtactcgtttatctctgtatcttgcttcatgtggtactggatgatgtcctgagtaagggggatgagcttgaggaggtggagcatggtgctgatagtaaggatggtgtggaggttgttccattcctgggtaagggggcattccttgccaaggtggtggtggtcccatgttatgaaattccctcacataatcattgtaggacccatttaaaaacacatctcggcgaactcctgaaaatcgtctgtccacttcctggtatcgtggatcctttaaataccctggtctctggtgaaactcagggggatagtcaatccttggtttctttctgctgttatgaatatcataatcttctggtcgacgccttcccacatcccggactggttctcgacgggatggacgtcctcgtgatcggggctgagaatgcattcttctcttgtgacgcattttatgaatgacctgatacaagtcaatactttcatcggggggaaacagaagacaaagctgggttccacattcaagttcaatttcctgtccatcacgtccgatctttactggtttatgttcattccaaggattggtgagatgagccgacttagtgaagggtaattcacgcctgcaaatccagtcaattttaaagacacctcccagcattttagcactcattcctgctggaagcacccagtgtataggagatcctccgtgatgtgattctgaagaaagtcttgcaaacccttgaaattttccactctctctgacagaaaatatcggacgcgtggggggatgtcggaagatcctagaggtcccaaggtagctgacttgcgaagctgaggctccagccgagggctccaggcctctgaccggcccagcagtgagcgcggctgcccgacgcttcagggccgggagcagggagcgtgagtcgccatggcgacgccggcgggtctggagcgctgggttcaggacgagctgcactcggtgttggggctgagcgagcggcacgtcgcccagtttctgatcggtaccgcacagcgctgcacctctgccgaggagttcgtgcagcgcctacgagacactgataccttggatctcagtgggccggcccgggacttcgccctgagactctggaacaaggtaccacgaaaggcagtggtagaaaagccagctcgggcagcagagcgagaggcccgggccctgctggagaagaaccgatcttataggttactggaagacagtgaagagagcagtgaggagactgtgagtagggctggaagcagcctccagaagaaacgtaaaaagcggaaacacctcaggaagaagcgtgaggaagaagaggaggaagaggcttctgagaaagggaagaagaaaacaggggggagtaaacagcagacagagaagccagagtcggaagatgagtgggaacggacagagcgtgaacgccttcaggacctggaggagcgtgatgcctttgctgagcgggttcgacagcgggacaaggatcggactcgaaatgtcctggaacggtcagacaagaaggcttatgaagaggctcagaagcgcctcaagatggccgaggaagaccggaaggccatggtccctgagctgcggaagaaatctcgccgagagtacctggctaagcgggagcgagagaagcttgaggacctggaggcggagctggctgatgaggagttcctttttggggacgtggagctgagccggcacgagcggcaggagctcaaatataagcggcgagtgcgggatctcgcccgggagtaccgggcagctggggagcaggagaagctggaggccaccaatcgctaccacatgcccaaggaaacccgaggacagccagcccgagctgtggatctagtggaggaggaatcaggagcccctggggaggagcagcggcgctgggaggaggcgcggcttggggcagcgtccctgaagtttggggcccgagatgctgcctctcaggagcccaagtatcaactggtgctggaggaggaggagaccattgagtttgtccgggccactcagctccagggtgatgaggagccgtcagctccacccacttcaactcaggcccagcagaaagagtccatccaggccgtccgccgcagcctcccggtgttcccatttcgagaggagctcctggctgctattgcaaatcaccaagtcctcatcattgaaggcgagacaggctcagggaagaccacccagatcccgcagtatctctttgaggagggttatacaaacaagggtatgaagattgcctgcacccaaccccggagagtggctgccatgagtgtggccgcccgagtggcccgggagatgggtgtgaagcttgggaatgaggttggctacagcatccgctttgaggactgcacatcagagcgaactgtcctccgctacatgacagatgggatgcttctccgggagttcctctctgagcctgacctggcgagttacagcgtggtgatggtggatgaggcacacgaaaggaccctacacacagacattctctttggattgatcaaggatgttgctcgcttccgacctgagctcaaggtcctggtggcttcagccacaatggacactgcccgtttttccaccttctttgatgacgcccctgtgtttcgaatccccggacgcaggtttcctgtggacatcttctacaccaaggctccagaggctgactacttggaagcttgtgtagtatctgtgttgcagatccatgtgacccagccccctggggatatcctggtgttcctgacaggacaggaggagattgaggctgcctgtgagatgctccaggatcgctgccgccgcctgggctccaaaatccgggagctcctggtgctgcccatttatgccaatctgccctctgacatgcaggcccgtatcttccagcccacaccacctggggcacgaaaggtggttgtggcaacgaacattgctgagacatcactcaccattgagggcatcatttatgtgctggatccagggttctgtaagcagaagagctacaacccccgcacaggcatggaatcgctcactgtcacaccctgcagcaaggcctcagccaatcagcgagctggcagggcaggtcgggtggctgcagggaagtgcttccgcctgtataccgcctgggcctatcagcacgagcttgaggaaaccacagtgcctgagatccagaggaccagcttgggcaatgtcgtgttgctgctcaagagcttagggatccatgacctaatgcactttgatttcctggaccctccaccatatgagacactgctgctggctttggagcagctgtatgctctgggagccctcaaccaccttggggagctcaccacgtctggtcgaaagatggcagagctgccggtggaccccatgctgtccaaaatgatcttagcctctgagaagtacagctgttcagaggagatcctgacagtggctgccatgctctctgtcaacaactccatcttctaccgaccaaaggacaaggtcgtccatgctgacaatgcccgtgtcaacttctttctccctggcggtgaccacctggttctgctaaatgtttacacacagtgggctgagagtggttactcttcccagtggtgctatgagaactttgtacagttcagatcgatgcgccgagcccgggatgtgcgggaacagctggaagggctcttggaacgtgtggaagttggtctcagttcctgccagggggactatatccgtgtacgcaaggccatcactgctggttacttttaccacacggcacggttgactcggagtggctaccgcacagtgaaacagcagcagacagtcttcattcatcccaactcctccctctttgagcaacagccacgctggctgctctaccacgaacttgtcttgaccaccaaagagttcatgagacaggtactggagattgagagcagttggcttctggaggtggctccccattattataaggccaaggagctagaagatccccatgctaagaaaatgcccaaaaaaataggcaaaacacgagaagagctagggtaagagaaggacgtaaacagaacctgacaccagctccttttccttctatacattatttaatacctattaaataaaattatttttggaataaagcttgtgggaacatttgggatctagaaaaagtgatatgtgaaattctatctcatatagtcagttaaactttattatttacaagttaaattacacagcagctttacacagcatgagatggaaaggaaggaaggagagaaacgaggagaggaagctggctcctgagattcttggctgcctccacctccttctcttgggcgtagcagtcttcagtgctgcctccactccaaggtcaaggatcagggcttggaacacaggtttaagtcaggttctggctctgacagccccagggccaccagggctcccactagcagcttcttcacaggcgttggaggtgagtgtgaaggcatcagtttatctagacgatggcgacaaatgaggccactggaattcaggtagaaagtggagtaggcatcataggtccggtaatgctcgtctttgtcacgcttgtagaaccgcaaaaagagcaagtggacgggcagccccacaagccgccaccgggcttgcagggtccagttctcagggtggcgggtcagctgtaaaacctccaaacgaaggtgtgcaaaataattccaggccaggaaacggcagagggtcagtgaaagaatgtaccatgtccgg

SEQ ID NO: 361167 - DNA, 4437 bp, Homo sapiens
  misc_feature (4219)..(4219): n is a, c, g, or t
agaggccgaaaaagtacagccccttccgggctccgcggtacgggaagacagctttgggatgtcggaagatcctagaggtcccaaggtagctgacttgcgaagctgaggctccagccgagggctccaggcctctgaccggcccagcagtgagcgcggctgcccgacgcttcagggccgggagcagggagcgtgagtcgccatggcgacgccggcgggtctggagcgctgggttcaggacgagctgcactcggtgttggggctgagcgagcggcacgtcgcccagtttctgatcggtaccgcacagcgctgcacctctgccgaggagttcgtgcagcgcctacgagacactgataccttggatctcagtgggccggcccgggacttcgccctgagactctggaacaaggtaccacgaaaggcagtggtagaaaagccagctcgggcagcagagcgagaggcccgggccctgctggagaagaaccgatcttataggttactggaagacagtgaagagagcagtgaggagactgtgagtagggctggaagcagcctccagaagaaacgtaaaaagcggaaacacctcaggaagaagcgtgaggaagaagaggaggaagaggcttctgagaaagggaagaagaaaacaggggggagtaaacagcagacagagaagccagagtcggaagatgagtgggaacggacagagcgtgaacgccttcaggacctggaggagcgtgatgcctttgctgagcgggttcgacagcgggacaaggatcggactcgaaatgtcctggaacggtcagacaagaaggcttatgaagaggctcagaagcgcctcaagatggccgaggaagaccggaaggccatggtccctgagctgcggaagaaatctcgccgagagtacctggctaagcgggagcgagagaagcttgaggacctggaggcggagctggctgatgaggagttcctttttggggacgtggagctgagccggcacgagcggcaggagctcaaatataagcggcgagtgcgggatctcgcccgggagtaccgggcagctggggagcaggagaagctggaggccaccaatcgctaccacatgcccaaggaaacccgaggacagccagcccgagctgtggatctagtggaggaggaatcaggagcccctggggaggagcagcggcgctgggaggaggcgcggcttggggcagcgtccctgaagtttggggcccgagatgctgcctctcaggagcccaagtatcaactggtgctggaggaggaggagaccattgagtttgtccgggccactcagctccagggtgatgaggagccgtcagctccacccacttcaactcaggcccagcagaaagagtccatccaggccgtccgccgcagcctcccggtgttcccatttcgagaggagctcctggctgctattgcaaatcaccaagtcctcatcattgaaggcgagacaggctcagggaagaccacccagatcccgcagtatctctttgaggagggttatacaaacaagggtatgaagattgcctgcacccaaccccggagagtggctgccatgagtgtggccgcccgagtggcccgggagatgggtgtgaagcttgggaatgaggttggctacagcatccgctttgaggactgcacatcagagcgaactgtcctccgctacatgacagatgggatgcttctccgggagttcctctctgagcctgacctggcgagttacagcgtggtgatggtggatgaggcacacgaaaggaccctacacacagacattctctttggattgatcaaggatgttgctcgcttccgacctgagctcaaggtcctggtggcttcagccacaatggacactgcccgtttttccaccttctttgatgacgcccctgtgtttcgaatccccggacgcaggtttcctgtggacatcttctacaccaaggctccagaggctgactacttggaagcttgtgtagtatctgtgttgcagatccatgtgacccagccccctggggatatcctggtgttcctgacaggacaggaggagattgaggctgcctgtgagatgctccaggatcgctgccgccgcctgggctccaaaatccgggagctcctggtgctgcccatttatgccaatctgccctctgacatgcaggcccgtatcttccagcccacaccacctggggcacgaaaggtggttgtggcaacgaacattgctgagacatcactcaccattgagggcatcatttatgtgctggatccagggttctgtaagcagaagagctacaacccccgcacaggcatggaatcgctcactgtcacaccctgcagcaaggcctcagccaatcagcgagctggcagggcaggtcgggtggctgcagggaagtgcttccgcctgtataccgcctgggcctatcagcacgagcttgaggaaaccacagtgcctgagatccagaggaccagcttgggcaatgtcgtgttgctgctcaagagcttagggatccatgacctaatgcactttgatttcctggaccctccaccatatgagacactgctgctggctttggagcagctgtatgctctgggagccctcaaccaccttggggagctcaccacgtctggtcgaaagatggcagagctgccggtggaccccatgctgtccaaaatgatcttagcctctgagaagtacagctgttcagaggagatcctgacagtggctgccatgctctctgtcaacaactccatcttctaccgaccaaaggacaaggtcgtccatgctgacaatgcccgtgtcaacttctttctccctggcggtgaccacctggttctgctaaatgtttacacacagtgggctgagagtggttactcttcccagtggtgctatgagaactttgtacagttcagatcgatgcgccgagcccgggatgtgcgggaacagctggaagggctcttggaacgtgtggaagttggtctcagttcctgccagggggactatatccgtgtacgcaaggccatcactgctggttacttttaccacacggcacggttgactcggagtggctaccgcacagtgaaacagcagcagacagtcttcattcatcccaactcctccctctttgagcaacagccacgctggctgctctaccacgaacttgtcttgaccaccaaagagttcatgagacaggtactggagattgagagcagttggcttctggaggtggctccccattattataaggccaaggagctagaagatccccatgctaagaaaatgcccaaaaaaataggcaaaacacgagaagagctagggtaagagaaggacgtaaacagaacctgacaccagctccttttccttctatacattatttaatacctattaaataaaattatttttggaataaaaaaaaaaacaaaaaaaaaaaaaaaaaaaacaacaacaaacacaaaaaaaaaaaaaaaaaaaaaaaaacaaagaagcaaagaaaaaccaaaacaaaacacaacacagcaagaacaaacaatcaccatcacacacacacacctccttaaccaacgccactcaccacctcacacacaagacacacacaaacaagacccgacgcacccacaaacctcagaagacgacatggcataggcacgaacactgcagagatggagagagtcgttgcgtatacacagagccgacactagcctcacatctagagcgaacatcatgactcatgctcagaagcacaaacagctcgctacgttataggctatgctgtatggtcgttaaagtaagcaagagcatgaacatctagctacgtcagtataaccatacacagagagcatcgcgagcccgctagcaacagacgagacatctacatttacgtccgaacgggtaatatgtgacaagcacgactatccaacacacggtcgtgtcggtctagtcataatgcgatttgccactagcgataagcgagctgaggcgaagggacagaccgtgaaggaggaagacgaaggctgcgcgcgcgacgcgaagaagagatgggacgactgagagatgccgagcgatgaagctgcgcagagaggacgctgaaggagcagatggccgaagagacgacgaacgagacaacgaggtgagtagagcgtcgagatgagcgagtgatgacatggtcacgcgtgaacgaagacgcggagacgagagaccgctgatgaccggagaggnacgtgggatcgaggagagtggtggatgaatctgactgcgacacggcgggcagggagtcatcgcgcgaggcgtaacgcgagcgcggacagcgaggaggcggagcgagctgcgaagcacggcgagcgatagacgtgacggagcgcgagactgaatgcgttggagtctaagagcgcgcagcgagactacgaaacaggggtctgcgacgagatgctacgcgg

SEQ ID NO: 361168 - DNA, 2619 bp, Homo sapiens
gtagggattggtagagaaaggggttgctcctccagcaagatgaggattcgactgtcctttcccaactcaggtccctgagctgcggaagaaatctcgccgagagtacctggctaagcgggagcgagagaagcttgaggacctggaggcggagctggctgatgaggagttcctttttggggacgtggagctgagccggcacgagcggcaggagctcaaatataagcggcgagtgcgggatctcgcccgggagtaccgggcagctggggagcaggagaagctggaggccaccaatcgctaccacatgcccaaggaaacccgaggacagccagcccgagctgtggatctagtggaggaggaatcaggagcccctggggaggagcagcggcgctgggaggaggcgcggcttggggcagcgtccctgaagtttggggcccgagatgctgcctctcaggagcccaagtatcaactggtgctggaggaggaggagaccattgagtttgtccgggccactcagctccagggtgatgaggagccgtcagctccacccacttcaactcaggcccagcagaaagagtccatccaggccgtccgccgcagcctcccggtgttcccatttcgagaggagctcctggctgctattgcaaatcaccaagtcctcatcattgaaggcgagacaggctcagggaagaccacccagatcccgcagtatctctttgaggagggttatacaaacaagggtatgaagattgcctgcacccaaccccggagagtggctgccatgagtgtggccgcccgagtggcccgggagatgggtgtgaagcttgggaatgaggttggctacagcatccgctttgaggactgcacatcagagcgaactgtcctccgctacatgacagatgggatgcttctccgggagttcctctctgagcctgacctggcgagttacagcgtggtgatggtggatgaggcacacgaaaggaccctacacacagacattctctttggattgatcaaggatgttgctcgcttccgacctgagctcaaggtcctggtggcttcagccacaatggacactgcccgtttttccaccttctttgatgacgcccctgtgtttcgaatccccggacgcaggtttcctgtggacatcttctacaccaaggctccagaggctgactacttggaagcttgtgtagtatctgtgttgcagatccatgtgacccagccccctggggatatcctggtgttcctgacaggacaggaggagattgaggctgcctgtgagatgctccaggatcgctgccgccgcctgggctccaaaatccgggagctcctggtgctgcccatttatgccaatctgccctctgacatgcaggcccgtatcttccagcccacaccacctggggcacgaaaggtggttgtggcaacgaacattgctgagacatcactcaccattgagggcatcatttatgtgctggatccagggttctgtaagcagaagagctacaacccccgcacaggcatggaatcgctcactgtcacaccctgcagcaaggcctcagccaatcagcgagctggcagggcaggtcgggtggctgcagggaagtgcttccgcctgtataccgcctgggcctatcagcacgagcttgaggaaaccacagtgcctgagatccagaggaccagcttgggcaatgtcgtgttgctgctcaagagcttagggatccatgacctaatgcactttgatttcctggaccctccaccatatgagacactgctgctggctttggagcagctgtatgctctgggagccctcaaccaccttggggagctcaccacgtctggtcgaaagatggcagagctgccggtggaccccatgctgtccaaaatgatcttagcctctgagaagtacagctgttcagaggagatcctgacagtggctgccatgctctctgtcaacaactccatcttctaccgaccaaaggacaaggtcgtccatgctgacaatgcccgtgtcaacttctttctccctggcggtgaccacctggttctgctaaatgtttacacacagtgggctgagagtggttactcttcccagtggtgctatgagaactttgtacagttcagatcgatgcgccgagcccgggatgtgcgggaacagctggaagggctcttggaacgtgtggaagttggtctcagttcctgccagggggactatatccgtgtacgcaaggccatcactgctggttacttttaccacacggcacggttgactcggagtggctaccgcacagtgaaacagcagcagacagtcttcattcatcccaactcctccctctttgagcaacagccacgctggctgctctaccacgaacttgtcttgaccaccaaagagttcatgagacaggtactggagattgagagcagttggcttctggaggtggctccccattattataaggccaaggagctagaagatccccatgctaagaaaatgcccaaaaaaataggcaaaacacgagaagagctagggtaagagaaggacgtaaacagaacctgacaccagctccttttccttctatacattatttaatacctattaaataaaattatttttggaataaa

SEQ ID NO: 361169 - DNA, 1248 bp, Homo sapiens
agaggccgaaaaagtacagccccttccgggctccgcggtacgggaagacagctttgggatgtcggaagatcctagaggtcccaaggtagctgacttgcgaagctgaggctccagccgagggctccaggcctctgaccggcccagcagtgagcgcggctgcccgacgcttcagggccgggagcagggagcgtgagtcgccatggcgacgccggcgggtctggagcgctgggttcaggacgagctgcactcggtgttggggctgagcgagcggcacgtcgcccagtttctgatcggtaccgcacagcgctgcacctctgccgaggagttcgtgcagcgcctacgagacactgataccttggatctcagtgggccggcccgggacttcgccctgagactctggaacaaggtaccacgaaaggcagtggtagaaaagccagctcgggcagcagagcgagaggcccgggccctgctggagaagaaccgatcttataggttactggaagacagtgaagagagcagtgaggagactgtgagtagggctggaagcagcctccagaagaaacgtaaaaagcggaaacacctcaggaagaagcgtgaggaagaagaggaggaagaggcttctgagaaagggaagaagaaaacaggggggagtaaacagcagacagagaagccagagtcggaagatgagtgggaacggacagagcgtgaacgccttcaggacctggaggagcgtgatgcctttgctgagcgggttcgacagcgggacaaggatcggactcgaaatgtcctggaacggtcagacaagaaggcttatgaagaggctcagaagcgcctcaagatggccgaggaagaccggaaggccatgaccatttaaaagagtcttagacatcatggcgttttatctctaagtacatcagtgtgtacctgctaaggataaagatattgtcctctaaaatcagaatgctcttgtcacagtcaggaagttgaacagtaattcttatgtatcgactaagatctctctacaataaaagataccctcattaccctcaaaataactttaatgactgctttttcctaacaagaatgcagtcaaggttcatgcattgcatttgggtcttagatgttaagtttgtttctctctctgtctgtctcaccttgcagtgtcctacattctggatttgcctgattcttatcttgtggtgttaagtacttctctgccctgtgctttctttgaagcaggaattgggt

SEQ ID NO: 361170 - DNA, 1940 bp, Homo sapiens
aaaagggattcatgaatgtaatgggggtggggtcaggccagctgaacaatatgtgcctttttgactcttcagaggctgtgaatttctggtcttggaagatcacagtggagcaattggacagataggattttatccttcatatcccttgcaaaagatctctaagaacccatggagagccagccagcgcaagagtgtctgatgcagatgtttttgcccatcgagccagcctgctttgtggaatggctggggacttcaccatcacagttaggcgtggtgatggtggatgaggcacacgaaaggaccctacacacagacattctctttggattgatcaaggatgttgctcgcttccgacctgagctcaaggtcctggtggcttcagccacaatggacactgcccgtttttccaccttctttgatgacgcccctgtgtttcgaatccccggacgcaggtttcctgtggacatcttctacaccaaggctccagaggctgactacttggaagcttgtgtagtatctgtgttgcagatccatgtgacccagccccctggggatatcctggtgttcctgacaggacaggaggagattgaggctgcctgtgagatgctccaggatcgctgccgccgcctgggctccaaaatccgggagctcctggtgctgcccatttatgccaatctgccctctgacatgcaggcccgtatcttccagcccacaccacctggggcacgaaaggtggttgtggcaacgaacattgctgagacatcactcaccattgagggcatcatttatgtgctggatccagggttctgtaagcagaagagctacaacccccgcacaggcatggaatcgctcactgtcacaccctgcagcaaggcctcagccaatcagcgagctggcagggcaggtcgggtggctgcagggaagtgcttccgcctgtataccgcctgggcctatcagcacgagcttgaggaaaccacagtgcctgagatccagaggaccagcttgggcaatgtcgtgttgctgctcaagagcttagggatccatgacctaatgcactttgatttcctggaccctccaccatatgagacactgctgctggctttggagcagctgtatgctctgggagccctcaaccaccttggggagctcaccacgtctggtcgaaagatggcagagctgccggtggaccccatgctgtccaaaatgatcttagcctctgagaagtacagctgttcagaggagatcctgacagtggctgccatgctctctgtcaacaactccatcttctaccgaccaaaggacaaggtcgtccatgctgacaatgcccgtgtcaacttctttctccctggcggtgaccacctggttctgctaaatgtttacacacagtgggctgagagtggttactcttcccagtggtgctatgagaactttgtacagttcagatcgatgcgccgagcccgggatgtgcgggaacagctggaagggctcttggaacgtgtggaagttggtctcagttcctgccagggggactatatccgtgtacgcaaggccatcactgctggttacttttaccacacggcacggttgactcggagtggctaccgcacagtgaaacagcagcagacagtcttcattcatcccaactcctccctctttgagcaacagccacgctggctgctctaccacgaacttgtcttgaccaccaaagagttcatgagacaggtactggagattgagagcagttggcttctggaggtggctccccattattataaggccaaggagctagaagatccccatgctaagaaaatgcccaaaaaaataggcaaaacacgagaagagctagggtaagagaaggacgtaaacagaacctgacaccagctccttttccttctatacattatttaatacctattaaataaaattatttttggaataaa

SEQ ID NO: 361171 - DNA, 5817 bp, Homo sapiens
ttttatacaaaacagtagcaatgtagaatatgggaatcgtcttccgctgccacgcacgcaagttgtgaacattccaagccaatgtatacaatttggaggggaaggctaaacaatagcatcaaccacgctactgaacataggaatttttcatttaaaaagattaaaaattagatagcaatgtcttcttaatattgctctcgtcattgaagactgaggaaaaataaaaagtgactttataagttttttaaaaaaagaggcaatggggaaaaaaacaagaggctgctacaacactgccatacagtcaaaccatcatacttcaatatttgcatactcgatagcagcattatttttactgaaccgtgtgcaactacatgtagaaacacatcaaagcaaaatatcatggcagttatcaatcaagatccaaaaaggaaaaaaacaaacaaaaaaataactctaggatgaacacactataagaacatttatggagaaagaatcagtatctacattcttggactgttccattctgccccaataaaagtgtcaattcaactgtcagctgtggatttttggcggatttgagtttttccagttcttatgatactgcatgcttggaacaaagggggtcataataaatccttctacacaatgaacttcataggcagacagctgaaaataaatttactacttgtaaacacacacaaaaaaaaaatacaagattttttgtatctttaaacaatcagtgcttccaaaagcccattatcttctatatcgacctctctcccctcggtctctgtctcgatcacataatcgctctctttctctttctctatcacgtcctctatctcgctctctgtctcgtctgttatctctagggcggtctcgctctcgttcccggtctctttcacggggtctacttctccggccactgacaacagcttgtgtgcgacgaaggaaatcatccaccctcatatcataatcatgtactcgtttatctctgtatcttgcttcatgtggtactggatgatgtcctgagtaagggggatgagcttgaggaggtggagcatggtgctgatagtaaggatggtgtggaggttgttccattcctgggtaagggggcattccttgccaaggtggtggtggtcccatgttatgaaattccctcacataatcattgtaggacccatttaaaaacacatctcggcgaactcctgaaaatcgtctgtccacttcctggtatcgtggatcctttaaataccctggtctctggtgaaactcagggggatagtcaatccttggtttctttctgctgttatgaatatcataatcttctggtcgacgccttcccacatcccggactggttctcgacgggatggacgtcctcgtgatcggggctgagaatgcattcttctcttgtgacgcattttatgaatgacctgatacaagtcaatactttcatcggggggaaacagaagacaaagctgggttccacattcaagttcaatttcctgtccatcacgtccgatctttactggtttatgttcattccaaggattggtgagatgagccgacttagtgaagggtaattcacgcctgcaaatccagtcaattttaaagacacctcccagcattttagcactcattcctgctggaagcacccagtgtataggagatcctccgtgatgtgattctgaagaaagtcttgcaaacccttgaaattttccactctctctgacagaaaatatcggacgcgtggggggatgtcggaagatcctagaggtcccaaggtagctgacttgcgaagctgaggctccagccgagggctccaggcctctgaccggcccagcagtgagcgcggctgcccgacgcttcagggccgggagcagggagcgtgagtcgccatggcgacgccggcgggtctggagcgctgggttcaggacgagctgcactcggtgttggggctgagcgagcggcacgtcgcccagtttctgatcggtaccgcacagcgctgcacctctgccgaggagttcgtgcagcgcctacgagacactgataccttggatctcagtgggccggcccgggacttcgccctgagactctggaacaaggtaccacgaaaggcagtggtagaaaagccagctcgggcagcagagcgagaggcccgggccctgctggagaagaaccgatcttataggttactggaagacagtgaagagagcagtgaggagactgtgagtagggctggaagcagcctccagaagaaacgtaaaaagcggaaacacctcaggaagaagcgtgaggaagaagaggaggaagaggcttctgagaaagggaagaagaaaacaggggggagtaaacagcagacagagaagccagagtcggaagatgagtgggaacggacagagcgtgaacgccttcaggacctggaggagcgtgatgcctttgctgagcgggttcgacagcgggacaaggatcggactcgaaatgtcctggaacggtcagacaagaaggcttatgaagaggctcagaagcgcctcaagatggccgaggaagaccggaaggccatggtccctgagctgcggaagaaatctcgccgagagtacctggctaagcgggagcgagagaagcttgaggacctggaggcggagctggctgatgaggagttcctttttggggacgtggagctgagccggcacgagcggcaggagctcaaatataagcggcgagtgcgggatctcgcccgggagtaccgggcagctggggagcaggagaagctggaggccaccaatcgctaccacatgcccaaggaaacccgaggacagccagcccgagctgtggatctagtggaggaggaatcaggagcccctggggaggagcagcggcgctgggaggaggcgcggcttggggcagcgtccctgaagtttggggcccgagatgctgcctctcaggagcccaagtatcaactggtgctggaggaggaggagaccattgagtttgtccgggccactcagctccagggtgatgaggagccgtcagctccacccacttcaactcaggcccagcagaaagagtccatccaggccgtccgccgcagcctcccggtgttcccatttcgagaggagctcctggctgctattgcaaatcaccaagtcctcatcattgaaggcgagacaggctcagggaagaccacccagatcccgcagtatctctttgaggagggttatacaaacaagggtatgaagattgcctgcacccaaccccggagagtggctgccatgagtgtggccgcccgagtggcccgggagatgggtgtgaagcttgggaatgaggttggctacagcatccgctttgaggactgcacatcagagcgaactgtcctccgctacatgacagatgggatgcttctccgggagttcctctctgagcctgacctggcgagttacagcgtggtgatggtggatgaggcacacgaaaggaccctacacacagacattctctttggattgatcaaggatgttgctcgcttccgacctgagctcaaggtcctggtggcttcagccacaatggacactgcccgtttttccaccttctttgatgacgcccctgtgtttcgaatccccggacgcaggtttcctgtggacatcttctacaccaaggctccagaggctgactacttggaagcttgtgtagtatctgtgttgcagatccatgtgacccagccccctggggatatcctggtgttcctgacaggacaggaggagattgaggctgcctgtgagatgctccaggatcgctgccgccgcctgggctccaaaatccgggagctcctggtgctgcccatttatgccaatctgccctctgacatgcaggcccgtatcttccagcccacaccacctggggcacgaaaggtggttgtggcaacgaacattgctgagacatcactcaccattgagggcatcatttatgtgctggatccagggttctgtaagcagaagagctacaacccccgcacaggcatggaatcgctcactgtcacaccctgcagcaaggcctcagccaatcagcgagctggcagggcaggtcgggtggctgcagggaagtgcttccgcctgtataccgcctgggcctatcagcacgagcttgaggaaaccacagtgcctgagatccagaggaccagcttgggcaatgtcgtgttgctgctcaagagcttagggatccatgacctaatgcactttgatttcctggaccctccaccatatgagacactgctgctggctttggagcagctgtatgctctgggagccctcaaccaccttggggagctcaccacgtctggtcgaaagatggcagagctgccggtggaccccatgctgtccaaaatgatcttagcctctgagaagtacagctgttcagaggagatcctgacagtggctgccatgctctctgtcaacaactccatcttctaccgaccaaaggacaaggtcgtccatgctgacaatgcccgtgtcaacttctttctccctggcggtgaccacctggttctgctaaatgtttacacacagtgggctgagagtggttactcttcccagtggtgctatgagaactttgtacagttcagatcgatgcgccgagcccgggatgtgcgggaacagctggaagggctcttggaacgtgtggaagttggtctcagttcctgccagggggactatatccgtgtacgcaaggccatcactgctggttacttttaccacacggcacggttgactcggagtggctaccgcacagtgaaacagcagcagacagtcttcattcatcccaactcctccctctttgagcaacagccacgctggctgctctaccacgaacttgtcttgaccaccaaagagttcatgagacaggtactggagattgagagcagttggcttctggaggtggctccccattattataaggccaaggagctagaagatccccatgctaagaaaatgcccaaaaaaataggcaaaacacgagaagagctagggtaagagaaggacgtaaacagaacctgacaccagctccttttccttctatacattatttaatacctattaaataaaattatttttggaataaagcttgtgggaacatttgggatctagaaaaagtgatatgtgaaattctatctcatatagtcagttaaactttattatttacaagttaaattacacagcagctttacacagcatgagatggaaaggaaggaaggagagaaacgaggagaggaagctggctcctgagattcttggctgcctccacctccttctcttgggcgtagcagtcttcagtgctgcctccactccaaggtcaaggatcagggcttggaacacaggtttaagtcaggttctggctctgacagccccagggccaccagggctcccactagcagcttcttcacaggcgttggaggtgagtgtgaaggcatcagctgcagggagaaaggttaatgccagttgggggaggcacacaaatgttctaccctttaccccacccagccctacctaggactcactttatctagacgatggcgacaaatgaggccactggaattcaggtagaaagtggagtaggcatcataggtccggtaatgctcgtctttgtcacgcttgtagaaccgcaaaaagagcaagtggacgggcagccccacaagccgccaccgggcttgcagggtccagttctcagggtggcgggtcagctgtaaaacctccaaacgaaggtgtgcaaaataattccaggccaggaaacggcagagggtcagtgaaagaatgtaccatgtccgg

SEQ ID NO: 361172 - DNA, 1913 bp, Homo sapiens
agaggccgaaaaagtacagccccttccgggctccgcggtacgggaagacagctttgggatgtcggaagatcctagaggtcccaaggtagctgacttgcgaagctgaggctccagccgagggctccaggcctctgaccggcccagcagtgagcgcggctgcccgacgcttcagggccgggagcagggagcgtgagtcgccatggcgacgccggcgggtctggagcgctgggttcaggacgagctgcactcggtgttggggctgagcgagcggcacgtcgcccagtttctgatcggtaccgcacagcgctgcacctctgccgaggagttcgtgcagcgcctacgagacactgataccttggatctcagtgggccggcccgggacttcgccctgagactctggaacaaggtaccacgaaaggcagtggtagaaaagccagctcgggcagcagagcgagaggcccgggccctgctggagaagaaccgatcttataggttactggaagacagtgaagagagcagtgaggagactgtgagtagggctggaagcagcctccagaagaaacgtaaaaagcggaaacacctcaggaagaagcgtgaggaagaagaggaggaagaggcttctgagaaagggaagaagaaaacaggggggagtaaacagcagacagagaagccagagtcggaagatgagtgggaacggacagagcgtgaacgccttcaggacctggaggagcgtgatgcctttgctgagcgggttcgacagcgggacaaggatcggactcgaaatgtcctggaacggtcagacaagaaggcttatgaagaggctcagaagcgcctcaagatggccgaggaagaccggaaggccatggtccctgagctgcggaagaaatctcgccgagagtacctggctaagcgggagcgagagaagcttgaggacctggaggcggagctggctgatgaggagttcctttttggggacgtggagctgagccggcacgagcggcaggagctcaaatataagcggcgagtgcgggatctcgcccgggagtaccgggcagctggggagcaggagaagctggaggccaccaatcgctaccacatgcccaaggaaacccgaggacagccagcccgagctgtggatctagtggaggaggaatcaggagcccctggggaggagcagcggcgctgggaggaggcgcggcttggggcagcgtccctgaagtttggggcccgagatgctgcctctcaggagcccaagtatcaactggtgctggaggaggaggagaccattgagtttgtccgggccactcagctccagggtgatgaggagccgtcagctccacccacttcaactcaggcccagcagaaagagtccatccaggccgtccgccgcagcctcccggtgttcccatttcgagaggagctcctggctgctattgcaaatcaccaagtcctcatcattgaaggcgagacaggctcagggaagaccacccagatcccgcagtatctctttgaggagggttatacaaacaagggtatgaagattgcctgcacccaaccccggagagtggctgccatgagtgtggccgcccgagtggcccgggagatgggtgtgaagcttgggaatgaggttggctacagcatccgctttgaggactgcacatcagagcgaactgtcctccgctacatgacagatgggatgcttctccgggagttcctctctgagcctgacctggcgagttacagcgtggtgatggtggatgaggcacacgaaaggaccctacacacagacattctctttggattgatcaaggatgttgctcgcttccgacctgagctcaaggggtttgtgaagccaccaggtcgagccgccgcgaatttagtagtagtagtagttgttattatccgccgcccgc

SEQ ID NO: 361173 - DNA, 684 bp, Homo sapiens
aataaagcttgtgggaacatttgggatctagaaaaagtgatatgtgaaattctatctcatatagtcagttaaactttattatttacaagttaaattacacagcagctttacacagcatgagatggaaaggaaggaaggagagaaacgaggagaggaagctggctcctgagattcttggctgcctccacctccttctcttgggcgtagcagtcttcagtgctgcctccactccaaggtcaaggatcagggcttggaacacaggtttaagtcaggttctggctctgacagccccagggccaccagggctcccactagcagcttcttcacaggcgttggaggtgagtgtgaaggcatcagctgcagggagaaaggttaatgccagttgggggaggcacacaaatgttctaccctttaccccacccagccctacctaggactcactttatctagacgatggcgacaaatgaggccactggaattcaggtagaaagtggagtaggcatcataggtcctggggaatagagggaggcttactgagggagaaggtgactggtcccaaagctgaattcaagcatttgtttaaacgagtagtccctaaattctgctacatattagatcacctgggcaacttacaaacatctcagtgcttaggttgtgccctgtctcaattaaatcagagtgttt

SEQ ID NO: 361174 - DNA, 541 bp, Homo sapiens
cagttcatacgtatttataattgttacatcttcttgtgatttgactctcttaccaacatacgatgtctttctgtaacattttttggcttaaaatctattttgtctggtattagtatagccaccccagctctcttttggttactatttgcatggattatctctttccgtcttttcattttgaaacaatttgtgtcttgggtctacagtgagtattttgtaagttgcatatttggattgtgtattacatcatttaaaaaaaatccattctgccgatctttccattggtcagattatttacatttaaagtgattactgaaacaaaaaagttaattgaccggcatggtggctcccgcctggaggtgaggctgcagtgagccatgatcgcaccactgctcttcagcctgggggacagagagattgactcaaaaacaaaaaacaaaaacttacttatggttggactcaggcctgtaatcctatcactttgggatgctgaggtgggcagattgcttgagcccaggcgtttgagaccagtctgggcaac

SEQ ID NO: 361175 - DNA, 481 bp, Homo sapiens
atcacaatgggttggggctccctggaagcccctgtgaaatgcccactgagctggggaaggcctgggctgacctatgagctgttttattgtcttccttcctactgcacgttgtggctcagtaagtatatacgtggaaagatctgcctgaacttggctgaccccagggcctcggcagaagagaggattgccccttggccccaaggccttagccctgaggtcacaggacgggggctacgagacagaggtggccctagtgatttctagttttgggtttgtagccgtgaacattttccacactctgcagcttctttcagtttctttctgacagcctgggaaaggaactgtcagacttagagatctgctatgaaagggctagagagaaaattctaaggaaccagaagtggtttttcaattttgaaataaaaatgtcaactaataagagtgagaactcatatatccccaaggaagggcagtaatgtag

SEQ ID NO: 361176 - DNA, 1444 bp, Homo sapiens
cacggggcgggcggacgctggcgcgggtaggtaagagcagcggcgggcggtggcgctcactcccggcttccaaccgcgcggagcctctgccttggagattctcagtgctgcggatcatgtccctaaggggcagcctctcgcgtctcctccagacgcgagtgcattccatcctgaagaaatccgtccactccgtggctgtgataggagccccgttctcacaagggcagaaaagaaaaggagtggagcatggtcccgctgccataagagaagctggcttgatgaaaaggctctccagtttgggctgccacctaaaagactttggagatttgagttttactccagtccccaaagatgatctctacaacaacctgatagtgaatccacgctcagtgggtcttgccaaccaggaactggctgaggtggttagcagagctgtgtcagatggctacagctgtgtcacactgggaggagaccacagcctggcaatcggtaccattagtggccatgcccgacactgcccagacctttgtgttgtctgggttgatgcccatgctgacatcaacacaccccttaccacttcatcaggaaatctccatggacagccagtttcatttctcctcagagaactacaggataaggtaccacaactcccaggattttcctggatcaaaccttgtatctcttctgcaagtattgtgtatattggtctgagagacgtggaccctcctgaacattttattttaaagaactatgatatccagtatttttccatgagagatattgatcgacttggtatccagaaggtcatggaacgaacatttgatctgctgattggcaagagacaaagaccaatccatttgagttttgatattgatgcatttgaccctacactggctccagccacaggaactcctgttgtcgggggactaacctatcgagaaggcatgtatattgctgaggaaatacacaatacagggttgctatcagcactggatcttgttgaagtcaatcctcagttggccacctcagaggaagaggcgaagactacagctaacctggcagtagatgtgattgcttcaagctttggtcagacaagagaaggagggcatattgtctatgaccaacttcctactcccagttcaccagatgaatcagaaaatcaagcacgtgtgagaatttaggagacactgtgcactgacatgtttcacaacaggcattccagaattatgaggcattgaggggatagatgaatactaaatggttgtctgggtcaatactgccttaatgagaacatttacacattctcacaattgtaaagtttcccctctattttggtgaccaatactactgtaaatgtatttggttttttgcagttcacagggtattaatatgctacagtactatgtaaatttaaagaagtcataaacagcatttattaccttgg

SEQ ID NO: 361177 - DNA, 1988 bp, Homo sapiens
cacggggcgggcggacgctggcgcgggtaggtaagagcagcggcgggcggtggcgctcactcccggcttccaaccgcgcggagcctctgccttggagattctcagtgctgcggatcatgtccctaaggggcagcctctcgcgtctcctccagacgcgagtgcattccatcctgaagaaatccgtccactccgtggctgtgataggagccccgttctcacaagggcagaaaagaaaaggagtggagcatggtcccgctgccataagagaagctggcttgatgaaaaggctctccagtttgggctgccacctaaaagactttggagatttgagttttactccagtccccaaagatgatctctacaacaacctgatagtgaatccacgctcagtgggtcttgccaaccaggaactggctgaggtggttagcagagctgtgtcagatggctacagctgtgtcacactgggaggagaccacagcctggcaatcggtaccattagtggccatgcccgacactgcccagacctttgtgttgtctgggttgatgcccatgctgacatcaacacaccccttaccacttcatcaggaaatctccatggacagccagtttcatttctcctcagagaactacaggataaggtaccacaactcccaggattttcctggatcaaaccttgtatctcttctgcaagtattgtgtatattggtctgagagacgtggaccctcctgaacattttattttaaagaactatgatatccagtatttttccatgagagatattgatcgacttggtatccagaaggtcatggaacgaacatttgatctgctgattggcaagagacaaagaccaatccatttgagttttgatattgatgcatttgaccctacactggctccagccacaggaactcctgttgtcgggggactaacctatcgagaaggcatgtatattgctgaggaaatacacaatacagggttgctatcagcactggatcttgttgaagtcaatcctcagttggccacctcagaggaagaggcgaagactacagctaacctggcagtagatgtgattgcttcaagctttggtcagacaagagaaggagggcatattgtctatgaccaacttcctactcccagttcaccagatgaatcagaaaatcaagcacgtgtgagaatttaggagacactgtgcactgacatgtttcacaacaggcattccagaattatgaggcattgaggggatagatgaatactaaatggttgtctgggtcaatactgccttaatgagaacatttacacattctcacaattgtaaagtttcccctctattttggtgaccaatactactgtaaatgtatttggttttttgcagttcacagggtattaatatgctacagtactatgtaaatttaaagaagtcataaacagcatttattaccttggtatatcatactggtcttgttgctgttgttccttcacatttaagtggtttttcatctttcctccctcctcccacagcctggctatacagtgcatccttgaactgtcagcccacagcagcaatatgcttattctatccacatccctaacatcatgcattcacaaggtcaaagttctggtccacaaacccttccctatagaagttcaatggctgcgaaagaatttgtagtaaaccaggcctcccaggatggcgagctccagtaagatgataatggaaagcagcagcttgttggttgtcactctacaaagagaagcaaagtggggagtagtcagaagtttggataaccttccttctaaacattttggggttagacctgggaccacggctggatactctgaggctgtatgtttgatcacacagccacttagcaggaagtactcataaggttctttagctgtcacttagggataacactgtctacctcacagaaatgttaaactgagacaataaaaaccaaagcataaaaatggattctgaaatgttgtt

SEQ ID NO: 361178 - DNA, 3561 bp, Homo sapiens
cacggggcgggcggacgctggcgcgggtaggtaagagcagcggcgggcggtggcgctcactcccggcttccaaccgcgcggagcctctgccttggagattctcagtgctgcggatcatgtccctaaggggcagcctctcgcgtctcctccagacgcgagtgcattccatcctgaagaaatccgtccactccgtggctgtgataggagccccgttctcacaagggcagaaaagaaaaggagtggagcatggtcccgctgccataagagaagctggcttgatgaaaaggctctccagtttgggctgccacctaaaagactttggagatttgagttttactccagtccccaaagatgatctctacaacaacctgatagtgaatccacgctcagtgggtcttgccaaccaggaactggctgaggtggttagcagagctgtgtcagatggctacagctgtgtcacactgggaggagaccacagcctggcaatcggtaccattagtggccatgcccgacactgcccagacctttgtgttgtctgggttgatgcccatgctgacatcaacacaccccttaccacttcatcaggaaatctccatggacagccagtttcatttctcctcagagaactacaggataaggtaccacaactcccaggattttcctggatcaaaccttgtatctcttctgcaagtattgtgtatattggtctgagagacgtggaccctcctgaacagtaagttgatgcatttggctgaagtttagggcctgtcctagccaattatgttctatttgaaaggctgatgcttaacttggtctattgcaggtcactacaacaaacccaccctctcccccaaatacatatttgttaaaaatgctctttaaactaaggactcctccctttatatctcatcacagttttattttaaagaactatgatatccagtatttttccatgagagatattgatcgacttggtatccagaaggtcatggaacgaacatttgatctgctgattggcaagtaagtaactataactgatgtcagggcaaacccccaatgggcaacacacttttagcctgtttcttgaggacagcagctttacttttaaaatacaaagcaaaaacatacacataattttaaatagttcagaaaggcaaaatttgaaacacaggtcatattcttcctctggggtttttgggaggaggtttcctctaaatcattgcctagatcttctgtctcatgaatttttctttatctccatctttaatgcttatcttctgagatgacaagcatttattgtttcaactgtcccattcttcccagcctcacgattgtttcatctgagttttatattaagcaaatcttggcagtgtagaaagatggcagatgaatactaatcaaatggtaattttaagagcattttcccaataccaagtctttacttctgggtgattaatgtcagaattgttatctggtagtatgtcatttcataagctgttaagaaacttagttgttagcttcagcctttggacactggggctataatgaagttagaaatggaagatgttaaaactgcagacctaaaattagagttcacttcagctgctgttacgttcagagaataagagcaaccataacttacatcaagccaatttaaattagactaatttaaattgtctaattaaattgtctctagatgagagcccaatctcatctagaagtgaagaaatctctctattgacagttattagtataagaggttctaatacccagtgtaaggcagaaatatacattggagttagtctgtctgaggtatgcagaacaaatggcagtatcatgaagtggtatgtaggaagttaatattgccaatctcagtaacttccaagaataggaagcctggaaatgtattaacagctttattaacaaagtactaggactaatagcaacaaaatcaaggagttgcaaccataagaaggatgagtgtccaaggacaaccagttaagtattattttaagtattattttatcctcttcctttttaggagacaaagaccaatccatttgagttttgatattgatgcatttgaccctacactggctccagccacaggaactcctgttgtcgggggactaacctatcgagaaggcatgtatattgctgaggaaatacacaatacaggtatgtagcaaccaggtctgcagcctgttaactacataggtaaatatgctagagtctcttgcctgcaaaggatcttttctgctattccacatcattgcagagtttgtttttgcttaaacttttgtagctaaaaattatatggccatgctaataaaaaggatatagtcctttagagtcatgcttggacatggctcttaccaaattacactaaggtaataatgagtaaaaaattgtatatttaaacaattaaatacaagaataaattgtcaaactgatgcagttctttgagttatctaaaggcagattaagataagaaggcaagataagataagagtgcaaggctgtaatttgcactctaagagattggttcattgggagttgtgaatttggagctaaagctgatctcttgaagaaatctgcaaactggacaatatcttgggtcctttatgtagggtaggtcttgtactagagcctgaaaggatttctaataagggggatacagttagatgagaatggctgatggaaagagtactaagatgaattctacgttatcaagaccggctacttttccaaaactcatacttgtttgcaaacagtttccatttctgtcagaaagcttctggttttaaagctacttcaaatgacctttcattccaaaatttaaagaactaccaaatcatactgcttcagtaaccatctgatggaactagggtatagatagagaccccagattgaaaggttcagggctatagagaacccttgactagctgggatagaaactcacattgagaaatggtctccttagcgccacagcctgccagaaccttaggcagtacaaaaaggcaggcagtactggtctaattctcagatctgcaatcttagatgttgccagtggtccttaggttattggccagagaacttgggggttcaattctctgctttgcttcctaaaaacaccacttagagcaggggttaataacctctagcacttatatatggcatggcttgtctctttgttcctatgctacaatattttactccaaaagacactcatggggctaggcacagtggttcatacctataatcccagtactctgggaggccaaggcaagaggattacttgaccccaggggttcaagaccagcgtgggcaacatagtgtgaccccgtttctacaaaaaataattagccaggtgtcccaactacttgggaggttgaggctgcagtgagccatgattgtgccactgcactgttataatgctgtcaactagatacataaagcagtttgcttaatttatagggtggcaatagtctggaaacataagtcatgtatatatttctaatagtgcaaactttgatgaccacttctgggatatgctaaagg

SEQ ID NO: 361179 - DNA, 3253 bp, Homo sapiens
agaaccactcctatagatcagtaatgtgcaatgggatagaaagggctaatcagcagtattcctgctactaggtaagttaatgagaaaccaagacaaccttagagattttattcgtcttgagaaagcaatactgtgttcctcagctgcccttctgaaacatttccaccttgtgtcacttctccttcccagatcaagtgtgtcctgtgttgctctaaacttaccctgtgggtggcagaagaaagcagattgcatacccacggacgcacatgataatgatcttggtgagaacaagaattcttgattaatcctgtccatttctccctttcataggtaccacaactcccaggattttcctggatcaaaccttgtatctcttctgcaagtattgtgtatattggtctgagagacgtggaccctcctgaacagtaagttgatgcatttggctgaagtttagggcctgtcctagccaattatgttctatttgaaaggctgatgcttaacttggtctattgcaggtcactacaacaaacccaccctctcccccaaatacatatttgttaaaaatgctctttaaactaaggactcctccctttatatctcatcacagttttattttaaagaactatgatatccagtatttttccatgagagatattgatcgacttggtatccagaaggtcatggaacgaacatttgatctgctgattggcaagtaagtaactataactgatgtcagggcaaacccccaatgggcaacacacttttagcctgtttcttgaggacagcagctttacttttaaaatacaaagcaaaaacatacacataattttaaatagttcagaaaggcaaaatttgaaacacaggtcatattcttcctctggggtttttgggaggaggtttcctctaaatcattgcctagatcttctgtctcatgaatttttctttatctccatctttaatgcttatcttctgagatgacaagcatttattgtttcaactgtcccattcttcccagcctcacgattgtttcatctgagttttatattaagcaaatcttggcagtgtagaaagatggcagatgaatactaatcaaatggtaattttaagagcattttcccaataccaagtctttacttctgggtgattaatgtcagaattgttatctggtagtatgtcatttcataagctgttaagaaacttagttgttagcttcagcctttggacactggggctataatgaagttagaaatggaagatgttaaaactgcagacctaaaattagagttcacttcagctgctgttacgttcagagaataagagcaaccataacttacatcaagccaatttaaattagactaatttaaattgtctaattaaattgtctctagatgagagcccaatctcatctagaagtgaagaaatctctctattgacagttattagtataagaggttctaatacccagtgtaaggcagaaatatacattggagttagtctgtctgaggtatgcagaacaaatggcagtatcatgaagtggtatgtaggaagttaatattgccaatctcagtaacttccaagaataggaagcctggaaatgtattaacagctttattaacaaagtactaggactaatagcaacaaaatcaaggagttgcaaccataagaaggatgagtgtccaaggacaaccagttaagtattattttaagtattattttatcctcttcctttttaggagacaaagaccaatccatttgagttttgatattgatgcatttgaccctacactggctccagccacaggaactcctgttgtcgggggactaacctatcgagaaggcatgtatattgctgaggaaatacacaatacaggtatgtagcaaccaggtctgcagcctgttaactacataggtaaatatgctagagtctcttgcctgcaaaggatcttttctgctattccacatcattgcagagtttgtttttgcttaaacttttgtagctaaaaattatatggccatgctaataaaaaggatatagtcctttagagtcatgcttggacatggctcttaccaaattacactaaggtaataatgagtaaaaaattgtatatttaaacaattaaatacaagaataaattgtcaaactgatgcagttctttgagttatctaaaggcagattaagataagaaggcaagataagataagagtgcaaggctgtaatttgcactctaagagattggttcattgggagttgtgaatttggagctaaagctgatctcttgaagaaatctgcaaactggacaatatcttgggtcctttatgtagggtaggtcttgtactagagcctgaaaggatttctaataagggggatacagttagatgagaatggctgatggaaagagtactaagatgaattctacgttatcaagaccggctacttttccaaaactcatacttgtttgcaaacagtttccatttctgtcagaaagcttctggttttaaagctacttcaaatgacctttcattccaaaatttaaagaactaccaaatcatactgcttcagtaaccatctgatggaactagggtatagatagagaccccagattgaaaggttcagggctatagagaacccttgactagctgggatagaaactcacattgagaaatggtctccttagcgccacagcctgccagaaccttaggcagtacaaaaaggcaggcagtactggtctaattctcagatctgcaatcttagatgttgccagtggtccttaggttattggccagagaacttgggggttcaattctctgctttgcttcctaaaaacaccacttagagcaggggttaataacctctagcacttatatatggcatggcttgtctctttgttcctatgctacaatattttactccaaaagacactcatggggctaggcacagtggttcatacctataatcccagtactctgggaggccaaggcaagaggattacttgaccccaggggttcaagaccagcgtgggcaacatagtgtgaccccgtttctacaaaaaataattagccaggtgtcccaactacttgggaggttgaggctgcagtgagccatgattgtgccactgcactgttataatgctgtcaactagatacataaagcagtttgcttaatttatagggtggcaatagtctggaaacataagtcatgtatatatttctaatagtgcaaactttgatgaccacttctgggatatgctaaagg

SEQ ID NO: 361180 - DNA, 1193 bp, Homo sapiens
cacggggcgggcggacgctggcgcgggtaggtaagagcagcggcgggcggtggcgctcactcccggcttccaaccgcgcggagcctctgccttggagattctcagtgctgcggatcatgtccctaaggggcagcctctcgcgtctcctccagacgcgagtgcattccatcctgaagaaatccgtccactccgtggctgtgataggagccccgttctcacaagggcagaaaagaaaaggagtggagcatggtcccgctgccataagagaagctggcttgatgaaaaggctctccagtttgggctgccacctaaaagactttggagatttgagttttactccagtccccaaagatgatctctacaacaacctgatagtgaatccacgctcagtgggtcttgccaaccaggaactggctgaggtggttagcagagctgtgtcagatggctacagctgtgtcacactgggaggagaccacagcctggcaatcggtaccattagtggccatgcccgacactgcccagacctttgtgttgtctgggttgatgcccatgctgacatcaacacaccccttaccacttcatcaggaaatctccatggacagccagtttcatttctcctcagagaactacaggataaggtaccacaactcccaggattttcctggatcaaaccttgtatctcttctgcaagtattgtgtatattggtctgagagacgtggaccctcctgaacattttattttaaagaactatgatatccagtatttttccatgagagatattgatcgacttggtatccagaaggtcatggaacgaacatttgatctgctgattggcaagagacaaagaccaatccatttgagttttgatattgatgcatttgaccctacactggctccagccacaggaactcctgttgtcgggggactaacctatcgagaaggcatgtatattgctgaggaaatacacaatacagggttgctatcagcactggatcttgttgaagtcaatcctcagttggccacctcagaggaagaggcgaagactacagctaacctggcagtagatgtgattgcttcaagctttggtcagacagggagggatttggttttgacaacttctactccagtcacagatgatcaaatcagcctgtgaatttgggacggtgtgatgttcaagggttccttagggggg

SEQ ID NO: 361181 - DNA, 1959 bp, Homo sapiens
  misc_feature (1)..(1): n is a, c, g, or t
  misc_feature (80)..(80): n is a, c, g, or t
ngcgttcagagaataagagcaaccgcccccccttttaaaaaaaaaaaaattttttttttttaaaaaaaaaaaaaaaattntttggtcctcctagatgagagcccaatctcatctagaagtgaagaaatctctctattgacagttattagtataagaggttctaatacccagtgtaaggcagaaatatacattggagttagtctgtctgaggtatgcagaacaaatggcagtatcatgaagtggtatgtaggaagttaatattgccaatctcagtaacttccaagaataggaagcctggaaatgtattaacagctttattaacaaagtactaggactaatagcaacaaaatcaaggagttgcaaccataagaaggatgagtgtccaaggacaaccagttaagtattattttaagtattattttatcctcttcctttttaggagacaaagaccaatccatttgagttttgatattgatgcatttgaccctacactggctccagccacaggaactcctgttgtcgggggactaacctatcgagaaggcatgtatattgctgaggaaatacacaatacaggtatgtagcaaccaggtctgcagcctgttaactacataggtaaatatgctagagtctcttgcctgcaaaggatcttttctgctattccacatcattgcagagtttgtttttgcttaaacttttgtagctaaaaattatatggccatgctaataaaaaggatatagtcctttagagtcatgcttggacatggctcttaccaaattacactaaggtaataatgagtaaaaaattgtatatttaaacaattaaatacaagaataaattgtcaaactgatgcagttctttgagttatctaaaggcagattaagataagaaggcaagataagataagagtgcaaggctgtaatttgcactctaagagattggttcattgggagttgtgaatttggagctaaagctgatctcttgaagaaatctgcaaactggacaatatcttgggtcctttatgtagggtaggtcttgtactagagcctgaaaggatttctaataagggggatacagttagatgagaatggctgatggaaagagtactaagatgaattctacgttatcaagaccggctacttttccaaaactcatacttgtttgcaaacagtttccatttctgtcagaaagcttctggttttaaagctacttcaaatgacctttcattccaaaatttaaagaactaccaaatcatactgcttcagtaaccatctgatggaactagggtatagatagagaccccagattgaaaggttcagggctatagagaacccttgactagctgggatagaaactcacattgagaaatggtctccttagcgccacagcctgccagaaccttaggcagtacaaaaaggcaggcagtactggtctaattctcagatctgcaatcttagatgttgccagtggtccttaggttattggccagagaacttgggggttcaattctctgctttgcttcctaaaaacaccacttagagcaggggttaataacctctagcacttatatatggcatggcttgtctctttgttcctatgctacaatattttactccaaaagacactcatggggctaggcacagtggttcatacctataatcccagtactctgggaggccaaggcaagaggattacttgaccccaggggttcaagaccagcgtgggcaacatagtgtgaccccgtttctacaaaaaataattagccaggtgtcccaactacttgggaggttgaggctgcagtgagccatgattgtgccactgcactgttataatgctgtcaactagatacataaagcagtttgcttaatttatagggtggcaatagtctggaaacataagtcatgtatatatttctaatagtgcaaactttgatgaccacttctgggatatgctaaagg

SEQ ID NO: 361182 - DNA, 1680 bp, Homo sapiens
agaaccactcctatagatcagtaatgtgcaatgggatagaaagggctaatcagcagtattcctgctactaggtaagttaatgagaaaccaagacaaccttagagattttattcgtcttgagaaagcaatactgtgttcctcagctgcccttctgaaacatttccaccttgtgtcacttctccttcccagatcaagtgtgtcctgtgttgctctaaacttaccctgtgggtggcagaagaaagcagattgcatacccacggacgcacatgataatgatcttggtgagaacaagaattcttgattaatcctgtccatttctccctttcataggtaccacaactcccaggattttcctggatcaaaccttgtatctcttctgcaagtattgtgtatattggtctgagagacgtggaccctcctgaacattttattttaaagaactatgatatccagtatttttccatgagagatattgatcgacttggtatccagaaggtcatggaacgaacatttgatctgctgattggcaagagacaaagaccaatccatttgagttttgatattgatgcatttgaccctacactggctccagccacaggaactcctgttgtcgggggactaacctatcgagaaggcatgtatattgctgaggaaatacacaatacagggttgctatcagcactggatcttgttgaagtcaatcctcagttggccacctcagaggaagaggcgaagactacagctaacctggcagtagatgtgattgcttcaagctttggtcagacaagagaaggagggcatattgtctatgaccaacttcctactcccagttcaccagatgaatcagaaaatcaagcacgtgtgagaatttaggagacactgtgcactgacatgtttcacaacaggcattccagaattatgaggcattgaggggatagatgaatactaaatggttgtctgggtcaatactgccttaatgagaacatttacacattctcacaattgtaaagtttcccctctattttggtgaccaatactactgtaaatgtatttggttttttgcagttcacagggtattaatatgctacagtactatgtaaatttaaagaagtcataaacagcatttattaccttggtatatcatactggtcttgttgctgttgttccttcacatttaagtggtttttcatctttcctccctcctcccacagcctggctatacagtgcatccttgaactgtcagcccacagcagcaatatgcttattctatccacatccctaacatcatgcattcacaaggtcaaagttctggtccacaaacccttccctatagaagttcaatggctgcgaaagaatttgtagtaaaccaggcctcccaggatggcgagctccagtaagatgataatggaaagcagcagcttgttggttgtcactctacaaagagaagcaaagtggggagtagtcagaagtttggataaccttccttctaaacattttggggttagacctgggaccacggctggatactctgaggctgtatgtttgatcacacagccacttagcaggaagtactcataaggttctttagctgtcacttagggataacactgtctacctcacagaaatgttaaactgagacaataaaaaccaaagcataaaaatggattctgaaatgttgtt

SEQ ID NO: 361183 - DNA, 975 bp, Homo sapiens
cacggggcgggcggacgctggcgcgggtaggtaagagcagcggcgggcggtggcgctcactcccggcttccaaccgcgcggagcctctgccttggagattctcagtgctgcggatcatgtccctaaggggcagcctctcgcgtctcctccagacgcgagtgcattccatcctgaagaaatccgtccactccgtggctgtgataggagccccgttctcacaagggcagaaaagaaaaggagtggagcatggtcccgctgccataagagaagctggcttgatgaaaaggctctccagtttgggctgccacctaaaagactttggagatttgagttttactccagtccccaaagatgatctctacaacaacctgatagtgaatccacgctcagtgggtcttgccaaccaggaactggctgaggtggttagcagagctgtgtcagatggctacagctgtgtcacactgggaggagaccacagcctggcaatcggtaccattagtggccatgcccgacactgcccagacctttgtgttgtctgggttgatgcccatgctgacatcaacacaccccttaccacttcatcaggaaatctccatggacagccagtttcatttctcctcagagaactacaggataaggtcagtgggccaaaacgaaaagaaaggtgaatggcttgcagggttttgctggagttggtctagttcagttaagattttggtgaagggtgggttgagtgtggattaccactccttcatttgttcatcactattatggaccaggcagtctgccagatgctaggggtataaagactagacatagtctctgttctttgtaagaaagcaaggagggggtagtaacaatagcgactgatatacccacagcctgaggacttcttggttagaggctcccaggccatactctcagacacactgatctagaagacaaataaaaccatgacctctgggtaatattttc

SEQ ID NO: 361184 - DNA, 470 bp, Homo sapiens
ctaatggttaaccatttttttattgttgggttaagtcaatcgatatctcttagtttcagtttccaacatctgcaaaactgttcataataggatcgagataatcttcccacaatcatttgacattttaaattttactgtgacaaaatgattatgatgtgtactttgtcacgtattatcattgtggcccaggctagttaagagttggagatagcacagaaaattcatcttgtcatccctcatttgcttccaggctgccacctaaaagactttggagatttgagttttactccagtccccaaagatgatctctacaacaacctgatagtgaatccacgctcagtgggtcttgccaaccaggaactggctgaggtggttagcagagctgtgtcagatggctacagctgtgtcacactgggaggagaccacaggtaagctgggagccaggcgtggtgaggggatggattacatgg

SEQ ID NO: 361185 - DNA, 606 bp, Homo sapiens
gcgtgtcggggctgcgctgacagaggagcaggcagcagatgtagtctcgcttcgtcacccaggctggagtgcagtggcgcaatctcggctcactgcaacctccgcctcccaggttcaagtgattctcctgcttcagcctcccaggttcaagcgattctcctgcctcagcctcccaagtagctgggattacaggcgctcgccaccatgcccggctaattttttgtatttttagtagagatgggctgatgctgtcacaggttttcagaggaacctgctgggaactaaatgtaccaaatgggtttttttccgacaccttctctacctctaattgtgtaatttgtgtgactgacagaaaagaaaaggagtggagcatggtcccgctgccataagagaagctggcttgatgaaaaggctctccagtttgggtaagtggttagatttttagatattagtgcaggactagtaatagaccacttcagagtcttttctctgacatccagggactacacagctttgtgtttgggaacagtctgccacatcccgcatcctcctttggattccgtctgcggcttaagatcaaggagtcatcagggaaagtcttcttgc

SEQ ID NO: 361186 - DNA, 3507 bp, Homo sapiens
cacggggcgggcggacgctggcgcgggtaggtaagagcagcggcgggcggtggcgctcactcccggcttccaaccgcgcggagcctctgccttggagattctcagtgctgcggatcatgtccctaaggggcagcctctcgcgtctcctccagacgcgagtgcattccatcctgaagaaatccgtccactccgtggctgtgataggagccccgttctcacaagggcagaaaagaaaaggagtggagcatggtcccgctgccataagagaagctggcttgatgaaaaggctctccagtttgggctgccacctaaaagactttggagatttgagttttactccagtccccaaagatgatctctacaacaacctgatagtgaatccacgctcagtgggtcttgccaaccaggaactggctgaggtggttagcagagctgtgtcagatggctacagctgtgtcacactgggaggagaccacagcctggcaatcggtaccattagtggccatgcccgacactgcccagacctttgtgttgtctgggttgatgcccatgctgacatcaacacaccccttaccacttcatcaggaaatctccatggacagccagtttcatttctcctcagagaactacaggataaggtaccacaactcccaggattttcctggatcaaaccttgtatctcttctgcaagtattgtgtatattggtctgagagacgtggaccctcctgaacagtaagttgatgcatttggctgaagtttagggcctgtcctagccaattatgttctatttgaaaggctgatgcttaacttggtctattgcaggtcactacaacaaacccaccctctcccccaaatacatatttgttaaaaatgctctttaaactaaggactcctccctttatatctcatcacagttttattttaaagaactatgatatccagtatttttccatgagagatattgatcgacttggtatccagaaggtcatggaacgaacatttgatctgctgattggcaagtaagtaactataactgatgtcagggcaaacccccaatgggcaacacacttttagcctgtttcttgaggacagcagctttacttttaaaatacaaagcaaaaacatacacataattttaaatagttcagaaaggcaaaatttgaaacacaggtcatattcttcctctggggtttttgggaggaggtttcctctaaatcattgcctagatcttctgtctcatgaatttttctttatctccatctttaatgcttatcttctgagatgacaagcatttattgtttcaactgtcccattcttcccagcctcacgattgtttcatctgagttttatattaagcaaatcttggcagtgtagaaagatggcagatgaatactaatcaaatggtaattttaagagcattttcccaataccaagtctttacttctgggtgattaatgtcagaattgttatctggtagtatgtcatttcataagctgttaagaaacttagttgttagcttcagcctttggacactggggctataatgaagttagaaatggaagatgttaaaactgcagacctaaaattagagttcacttcagctgctgttacgttcagagaataagagcaaccataacttacatcaagccaatttaaattagactaatttaaattgtctaattaaattgtctctagatgagagcccaatctcatctagaagtgaagaaatctctctattgacagttattagtataagaggttctaatacccagtgtaaggcagaaatatacattggagttagtctgtctgaggtatgcagaacaaatggcagtatcatgaagtggtatgtaggaagttaatattgccaatctcagtaacttccaagaataggaagcctggaaatgtattaacagctttattaacaaagtactaggactaatagcaacaaaatcaaggaaagtattattttatcctcttcctttttaggagacaaagaccaatccatttgagttttgatattgatgcatttgaccctacactggctccagccacaggaactcctgttgtcgggggactaacctatcgagaaggcatgtatattgctgaggaaatacacaatacaggtatgtagcaaccaggtctgcagcctgttaactacataggtaaatatgctagagtctcttgcctgcaaaggatcttttctgctattccacatcattgcagagtttgtttttgcttaaacttttgtagctaaaaattatatggccatgctaataaaaaggatatagtcctttagagtcatgcttggacatggctcttaccaaattacactaaggtaataatgagtaaaaaattgtatatttaaacaattaaatacaagaataaattgtcaaactgatgcagttctttgagttatctaaaggcagattaagataagaaggcaagataagataagagtgcaaggctgtaatttgcactctaagagattggttcattgggagttgtgaatttggagctaaagctgatctcttgaagaaatctgcaaactggacaatatcttgggtcctttatgtagggtaggtcttgtactagagcctgaaaggatttctaataagggggatacagttagatgagaatggctgatggaaagagtactaagatgaattctacgttatcaagaccggctacttttccaaaactcatacttgtttgcaaacagtttccatttctgtcagaaagcttctggttttaaagctacttcaaatgacctttcattccaaaatttaaagaactaccaaatcatactgcttcagtaaccatctgatggaactagggtatagatagagaccccagattgaaaggttcagggctatagagaacccttgactagctgggatagaaactcacattgagaaatggtctccttagcgccacagcctgccagaaccttaggcagtacaaaaaggcaggcagtactggtctaattctcagatctgcaatcttagatgttgccagtggtccttaggttattggccagagaacttgggggttcaattctctgctttgcttcctaaaaacaccacttagagcaggggttaataacctctagcacttatatatggcatggcttgtctctttgttcctatgctacaatattttactccaaaagacactcatggggctaggcacagtggttcatacctataatcccagtactctgggaggccaaggcaagaggattacttgaccccaggggttcaagaccagcgtgggcaacatagtgtgaccccgtttctacaaaaaataattagccaggtgtcccaactacttgggaggttgaggctgcagtgagccatgattgtgccactgcactgttataatgctgtcaactagatacataaagcagtttgcttaatttatagggtggcaatagtctggaaacataagtcatgtatatatttctaatagtgcaaactttgatgaccacttctgggatatgctaaagg

SEQ ID NO: 361187 - DNA, 2170 bp, Homo sapiens
cacggggcgggcggacgctggcgcgggtaggtaagagcagcggcgggcggtggcgctcactcccggcttccaaccgcgcggagcctctgccttggagattctcagtgctgcggatcatgtccctaaggggcagcctctcgcgtctcctccagacgcgagtgcattccatcctgaagaaatccgtccactccgtggctgtgataggagccccgttctcacaagggcagaaaagaaaaggagtggagcatggtcccgctgccataagagaagctggcttgatgaaaaggctctccagtttgggctgccacctaaaagactttggagatttgagttttactccagtccccaaagatgatctctacaacaacctgatagtgaatccacgctcagtgggtcttgccaaccaggaactggctgaggtggttagcagagctgtgtcagatggctacagctgtgtcacactgggaggagaccacagcctggcaatcggtaccattagtggccatgcccgacactgcccagacctttgtgttgtctgggttgatgcccatgctgacatcaacacaccccttaccacttcatcaggaaatctccatggacagccagtttcatttctcctcagagaactacaggataaggtaccacaactcccaggattttcctggatcaaaccttgtatctcttctgcaagtattgtgtatattggtctgagagacgtggaccctcctgaacagtaagttgatgcatttggctgaagtttagggcctgtcctagccaattatgttctatttgaaaggctgatgcttaacttggtctattgcaggtcactacaacaaacccaccctctcccccaaatacatatttgttaaaaatgctctttaaactaaggactcctccctttatatctcatcacagttttattttaaagaactatgatatccagtatttttccatgagagatattgatcgacttggtatccagaaggtcatggaacgaacatttgatctgctgattggcaagagacaaagaccaatccatttgagttttgatattgatgcatttgaccctacactggctccagccacaggaactcctgttgtcgggggactaacctatcgagaaggcatgtatattgctgaggaaatacacaatacagggttgctatcagcactggatcttgttgaagtcaatcctcagttggccacctcagaggaagaggcgaagactacagctaacctggcagtagatgtgattgcttcaagctttggtcagacaagagaaggagggcatattgtctatgaccaacttcctactcccagttcaccagatgaatcagaaaatcaagcacgtgtgagaatttaggagacactgtgcactgacatgtttcacaacaggcattccagaattatgaggcattgaggggatagatgaatactaaatggttgtctgggtcaatactgccttaatgagaacatttacacattctcacaattgtaaagtttcccctctattttggtgaccaatactactgtaaatgtatttggttttttgcagttcacagggtattaatatgctacagtactatgtaaatttaaagaagtcataaacagcatttattaccttggtatatcatactggtcttgttgctgttgttccttcacatttaagtggtttttcatctttcctccctcctcccacagcctggctatacagtgcatccttgaactgtcagcccacagcagcaatatgcttattctatccacatccctaacatcatgcattcacaaggtcaaagttctggtccacaaacccttccctatagaagttcaatggctgcgaaagaatttgtagtaaaccaggcctcccaggatggcgagctccagtaagatgataatggaaagcagcagcttgttggttgtcactctacaaagagaagcaaagtggggagtagtcagaagtttggataaccttccttctaaacattttggggttagacctgggaccacggctggatactctgaggctgtatgtttgatcacacagccacttagcaggaagtactcataaggttctttagctgtcacttagggataacactgtctacctcacagaaatgttaaactgagacaataaaaaccaaagcataaaaatggattctgaaatgttgtt

SEQ ID NO: 361188 - DNA, 902 bp, Homo sapiens
cacggggcgggcggacgctggcgcgggtaggtaagagcagcggcgggcggtggcgctcactcccggcttccaaccgcgcggagcctctgccttggagattctcagtgctgcggatcatgtccctaaggggcagcctctcgcgtctcctccagacgcgagtgcattccatcctgaagaaatccgtccactccgtggctgtgataggagccccgttctcacaagggcagaaaagaaaaggagtggagcatggtcccgctgccataagagaagctggcttgatgaaaaggctctccagtttgggctgccacctaaaagactttggagatttgagttttactccagtccccaaagatgatctctacaacaacctgatagtgaatccacgctcagtgggtcttgccaaccaggaactggctgaggtggttagcagagctgtgtcagatggctacagctgtgtcacactgggaggagaccacagcctggcaatcggtaccattagtggccatgcccgacactgcccagacctttgtgttgtctgggttgatgcccatgctgacatcaacacaccccttaccacttcatcaggaaatctccatggacagccagtttcatttctcctcagagaactacaggataaggtaccacaactcccaggattttcctggatcaaaccttgtatctcttctgcaagtattgtgtatattggtctgagagacgtggaccctcctgaacatttcttttaagacacttgattccggatttccctgagaattgtcgactgggtccagagggttggacacattgccgctgtggccacaccatcccttgtctgcttctcctgacctacggcccagggacctgtggggaccctgacggtattgggaccacgggaccgacttatc

SEQ ID NO: 361189 - DNA, 1081 bp, Homo sapiens
  misc_feature (10)..(10): n is a, c, g, or t
gactctagangatccccacgtcgcaagctcatccagaaatcattattatttaataaaaaagatttctggaatgagggaaatgatcagtccattttagccagattagagttgcagtgctgtactttagtatgggtaaacagaaatgtatccagaaggagagaggggtgttcaggtcttctaagtagaagtcagacactcctcaaatattgtggataggggtcatggtttagagtagaaaattgggctaacagagaagctttgaattcccatagttaatactggaggaaatgagtcatcggtgataagcaaagccacacacaatattgttggttcttattgactgaatttactttggttgccttttaggtgagcccgtggtagcagcagaagcaggcattatgggataacgattgtgtaaagaaacagcttcttcattcctgcactggttgccaccaacattctcttggttgatgagatcatgcgagctggaatcttctctgaaaggttgaattgaagcttcctctgtatctgagtcttgaagactctgcaaagtgatcctgaagaatacagctgtggaatttttgtccaagcttcaaatgagctttcaagggaattttcccatgtgaaaaaaggagagaacactggcatctgttgaaattcggaagttctgaaattataattacagtattttttaaaaattgcactgaagtgtacacagataaagcaggtctttcacccagtgaacaggatgttttgctttagcagcagtgacataaaattccatgttaaataagcatatattacctaccttattaaatattccttgaaaaagcagattttaatggtttaattttatgtggacatatgttaaattattcagcagtaccctattgttaagcatctggttttaaaatttttatgctaatataaataacgcttagtaatttaaaattttggaagcatcccgttagtgtaaattctgagtaaatttattgatcagttggacttttcacgcttttgaaatagctttgctaaaatgctccccctacaaagttgtaggaaatgggaagaggagtaaact

SEQ ID NO: 361190 - DNA, 1117 bp, Homo sapiens
  misc_feature (10)..(10): n is a, c, g, or t
gactctagangatccccacgtcgcaagctcatccagaaatcattattatttaataaaaaagatttctggaatgagggaaatgatcagtccattttagccagattagagttgcagtgctgtactttagtatgggtaaacagaaatgtatccagaaggagagaggggtgttcaggtcttctaagtagaagtcagacactcctcaaatattgtggataggggtcatggtttagagtagaaaattgggctaacagagaagctttgaattcccatagttaatactggaggaaatgagtcatcggtgataagcaaagccacacacaatattgttggttcttattgactgaatttactttggttgccttttaggtgagcccgtggtagcagcagaagcaggcattatgggataacgattgtgtaaagaaacagcttcttcattcctgcactggttgccaccaacattctcttggttgatgagatcatgcgagctggaatcttctctgaaaggttgaattgaagcttcctctgtatctgagtcttgaagactctgcaaagtgatcctgaagaatacagctgtggaatttttgtccaagcttcaaatgagctttcaagggaattttcccatgtgaaaaaaggagagaacactggcatctgttgaaattcggaagttgagatctgtactcatccaccttaacaggagtcttggaagaagttcgacttcccacccttatggatgactcaggggtctacacttctctggaggaagtaatagccgatgtgatggaaatagcaagagaactagaattggagctcgagcctgcagatgtgaccgagctgcggccatcgcaagatgcatactcgaaccgatgatgtgttccttctgaagaataagccaagatagtagtttcttgagatggaatttactgctgttgagaatgctgtgaacactgttgaaatgacaaccaaggatttagaatattacataagcttagttgataaagcacgcggcagggtttgagaggattaactcccattcttgaaagaagttctactgtgcggtcaaatgctatcaccggcattgtatggtacagagacctttgtgggtggcatcgataaaccc

SEQ ID NO: 361191 - DNA, 1070 bp, Homo sapiens
cacccccagccgaaagctattccagaaatcattattatttaataaaaaagatttctggaatgagggaaatgatcagtccattttagccagattagagttgcagtgctgtactttagtatgggtaaacagaaatgtatccagaaggagagaggggtgttcaggtcttctaagtagaagtcagacactcctcaaatattgtggataggggtcatggtttagagtagaaaattgggctaacagagaagctttgaattcccatagttaatactggaggaaatgagtcatcggtgataagcaaagccacacacaatattgttggttcttattgactgaatttactttggttgccttttaggtgagcccgtggtagcagcagaagcaggcattatgggataacgattgtgtaaagaaacagcttcttcattcctgcactggttgccaccaacattctcttggttgatgagatcatgcgagctggaatcttctctgaaaggttgaattgaagcttcctctgtatctgagtcttgaagactctgcaaagtgatcctgaagaatacagctgtggaatttttgtccaagcttcaaatgagctttcaagggaattttcccatgtgaaaaaaggagagaacactggcatctgttgaaattcggaagttctgaaattataattacagtattttttaaaaattgcactgaagtgtacacagataaagcaggtctttcacccagtgaacaggatgttttgctttagcagcagtgacataaaattccatgttaaataagcatatattacctaccttattaaatattccttgaaaaagcagattttaatggtttaattttatgtggacatatgttaaattattcagcagtaccctattgttaagcatctggttttaaaatttttatgctaatataaataacgcttagtaatttaaaattttggaagcatcccgttagtgtaaattctgagtaaatttattgatcagttggacttttcacgcttttgaaatagctttgctaaaatgctccccctacaaagttgtaggaaatgggaagaggagtaaact

SEQ ID NO: 361192 - DNA, 1560 bp, Homo sapiens
tgagacggagtcttgctctgttgcccaggctggagtgcagtggcaagatcttggctcactgcaactgctgcctcccaggttcacgccattctcctgcctcagcctcccgagtagctgggactacaggcacctgccaccacgcctggctaattttttgtatttttagttgagatggggtttcaccatgttagccaggatggtctcgatctcctgacctcatgatctgcccgcctcagcctcccaaaatgctgggattacaggcgtgaagcaccgcacccggccaccttactcagtttttaatcaagtactatgataagaaaatagattgggtgattatattcatgggtgaaaaacagctaaagatagcaaataatgccagaagaggggatctagaaatctaatgaaatggtgacagccctgatcttaggcccctgtaacaaaacaacacaaattaagtacaaagtaggagacagataacaggtacatccatgcagtatgtgcaagacctattgctgtcaacattattatttaataaaaaagatttctggaatgagggaaatgatcagtccattttagccagattagagttgcagtgctgtactttagtatgggtaaacagaaatgtatccagaaggagagaggggtgttcaggtcttctaagtagaagtcagacactcctcaaatattgtggataggggtcatggtttagagtagaaaattgggctaacagagaagctttgaattcccatagttaatactggaggaaatgagtcatcggtgataagcaaagccacacacaatattgttggttcttattgactgaatttactttggttgccttttaggtgagcccgtggtagcagcagaagcaggcattatgggataacgattgtgtaaagaaacagcttcttcattcctgcactggttgccaccaacattctcttggttgatgagatcatgcgagctggaatcttctctgaaaggttgaattgaagcttcctctgtatctgagtcttgaagactctgcaaagtgatcctgaagaatacagctgtggaatttttgtccaagcttcaaatgagctttcaagggaattttcccatgtgaaaaaaggagagaacactggcatctgttgaaattcggaagttctgaaattataattacagtattttttaaaaattgcactgaagtgtacacagataaagcaggtctttcacccagtgaacaggatgttttgctttagcagcagtgacataaaattccatgttaaataagcatatattacctaccttattaaatattccttgaaaaagcagattttaatggtttaattttatgtggacatatgttaaattattcagcagtaccctattgttaagcatctggttttaaaatttttatgctaatataaataacgcttagtaatttaaaattttggaagcatcccgttagtgtaaattctgagtaaatttattgatcagttggacttttcacgcttttgaaatagctttgctaaaatgctccccctacaaagttgtaggaaatgggaagaggagtaaact

SEQ ID NO: 361193 - DNA, 2081 bp, Homo sapiens
cgcgccgacttttccggaagatccggatagtgcatcccggccacggcgcgcctgctctgggctctccgcgtgccgcgtcgctttcttttcttcctctggagcagttatggcggcggcgaagaccctgaaccccaaggccaaggtggccggagcgcaggcggcgctggcgttcaacattagcggggcgcggggtctgcaggacgtgctgaggaccaacctggggcccaaagggaccataaagatcaaattcaacacccaacagcttccttaatagcaaaggtagcaacagcccaggatgatataactggtgatggtacgacttccaatgtcctaatcattggagagctgctgaaacaggcagatctctacatttctgaaggccttcatcccagaataatcactgaaggatttgaagctgtgaaggaaaagcccttcattttttggaagaagtcaaagtaagcagagagatggacaaggaaacacttaaagatgtggccagggcatctctttgtactaaagttcatgctgaacttgcagatgtcttaacagaggctgtagtgggctccattttggccattaaaagaaaagatgaacctattgatctcttcatgattttgtgatcattgacaagaaacataaatctgaaactgatacaagagaagtgaattctggcgttttttacaagagtgcagaaagagaaaaactcataaaagctgaaagaaaattcattgaagatagagttaaaacaaataatagaactgaaaaggaaagtctgtagtaattcagataaaggatttgttattaatcaaaagggaattgaccccttttccttagatgctctttcaaagaaggcatagtcgctcttcacagagctaaaaggaggaatatggagaggctgactcttgcttgtggtggggtggccctgaattcttttgaggacctaagtcctgactgcttgagacatgcaggacttgtatatgagtatacattgggagaagttcacctttattgagaagtgtaacaaccctcgttctgtcacattattgatcaaaggaccaaataagcccacacttagatcaaagatgcagtaagggatggcttgagggctgtcaaaaatgctattgatgatggctgtgtggttccggtgctggtgccgtggaagtggcaatggcagaagccctgaataaatataagctcagtgtaaagggcaaggcacagcttggagtccaagcatttgctgatgtgttgctcgttattcccaaggttcttgcgcagaattctggttttgaccttcaggaaacattagttaaaatttaagcagaacattcagaatcaggtcagctcgtgggtgtggacctgaacacaggtgagcccgtggtagcagcagaagcaggcattatgggataacgattgtgtaaagaaacagcttcttcattcctgcactggttgccaccaacattctcttggttgatgagatcatgcgagctggaatcttctctgaaaggttgaattgaagcttcctctgtatctgagtcttgaagactctgcaaagtgatcctgaagaatacagctgtggaatttttgtccaagcttcaaatgagctttcaagggaattttcccatgtgaaaaaaggagagaacactggcatctgttgaaattcggaagttctgaaattataattacagtattttttaaaaattgcactgaagtgtacacagataaagcaggtctttcacccagtgaacaggatgttttgctttagcagcagtgacataaaattccatgttaaataagcatatattacctaccttattaaatattccttgaaaaagcagattttaatggtttaattttatgtggacatatgttaaattattcagcagtaccctattgttaagcatctggttttaaaatttttatgctaatataaataacgcttagtaatttaaaattttggaagcatcccgttagtgtaaattctgagtaaatttattgatcagttggacttttcacgcttttgaaatagctttgctaaaatgctccccctacaaagttgtaggaaatgggaagaggagtaaact

SEQ ID NO: 361194 - DNA, 1820 bp, Homo sapiens
tgagacggagtcttgctctgttgcccaggctggagtgcagtggcaagatcttggctcactgcaactgctgcctcccaggttcacgccattctcctgcctcagcctcccgagtagctgggactacaggcacctgccaccacgcctggctaattttttgtatttttagttgagatggggtttcaccatgttagccaggatggtctcgatctcctgacctcatgatctgcccgcctcagcctcccaaaatgctgggattacaggcgtgaagcaccgcacccggccaccttactcagtttttaatcaagtactatgataagaaaatagattgggtgattatattcatgggtgaaaaacagctaaagatagcaaataatgccagaagaggggatctagaaatctaatgaaatggtgacagccctgatcttaggcccctgtaacaaaacaacacaaattaagtacaaagtaggagacagataacaggtacatccatgcagtatgtgcaagacctattgctgtcaacattattatttaataaaaaagatttctggaatgagggaaatgatcagtccattttagccagattagagttgcagtgctgtactttagtatgggtaaacagaaatgtatccagaaggagagaggggtgttcaggtcttctaagtagaagtcagacactcctcaaatattgtggataggggtcatggtttagagtagaaaattgggctaacagagaagctttgaattcccatagttaatactggaggaaatgagtcatcggtgataagcaaagccacacacaatattgttggttcttattgactgaatttactttggttgccttttaggtgagcccgtggtagcagcagaagcaggcattatgggataacgattgtgtaaagaaacagcttcttcattcctggtaagtttgggaaaatgaaaactaaactgttagagaatcatcatactcttcatttggtgttttctgtttagttgctcattttcccccatgaataatgtaatcagctgaaagtatggaaaccgaactagccctctgatgtgtagaggggaagggggaaatttaattggatgttaacgtgtgcagcttagttggaagtgggaagttgagtcgaattagggctcctaatcatctgagctatctaatttttatccccctttcagcactggttgccaccaacattctcttggttgatgagatcatgcgagctggaatcttctctgaaaggttgaattgaagcttcctctgtatctgagtcttgaagactctgcaaagtgatcctgaagaatacagctgtggaatttttgtccaagcttcaaatgagctttcaagggaattttcccatgtgaaaaaaggagagaacactggcatctgttgaaattcggaagttctgaaattataattacagtattttttaaaaattgcactgaagtgtacacagataaagcaggtctttcacccagtgaacaggatgttttgctttagcagcagtgacataaaattccatgttaaataagcatatattacctaccttattaaatattccttgaaaaagcagattttaatggtttaattttatgtggacatatgttaaattattcagcagtaccctattgttaagcatctggttttaaaatttttatgctaatataaataacgcttagtaatttaaaattttggaagcatcccgttagtgtaaattctgagtaaatttattgatcagttggacttttcacgcttttgaaatagctttgctaaaatgctccccctacaaagttgtaggaaatgggaagaggagtaaact

SEQ ID NO: 361195 - DNA, 1753 bp, Homo sapiens
tgagacggagtcttgctctgttgcccaggctggagtgcagtggcaagatcttggctcactgcaactgctgcctcccaggttcacgccattctcctgcctcagcctcccgagtagctgggactacaggcacctgccaccacgcctggctaattttttgtatttttagttgagatggggtttcaccatgttagccaggatggtctcgatctcctgacctcatgatctgcccgcctcagcctcccaaaatgctgggattacaggcgtgaagcaccgcacccggccaccttactcagtttttaatcaagtactatgataagaaaatagattgggtgattatattcatgggtgaaaaacagctaaagatagcaaataatgccagaagaggggatctagaaatctaatgaaatggtgacagccctgatcttaggcccctgtaacaaaacaacacaaattaagtacaaagtaggagacagataacaggtacatccatgcagtatgtgcaagacctattgctgtcaacattattatttaataaaaaagatttctggaatgagggaaatgatcagtccattttagccagattagagttgcagtgctgtactttagtatgggtaaacagaaatgtatccagaaggagagaggggtgttcaggtcttctaagtagaagtcagacactcctcaaatattgtggataggggtcatggtttagagtagaaaattgggctaacagagaagctttgaattcccatagttaatactggaggaaatgagtcatcggtgataagcaaagccacacacaatattgttggttcttattgactgaatttactttggttgccttttaggtgagcccgtggtagcagcagaagcaggcattatgggataacgattgtgtaaagaaacagcttcttcattcctggtaagtttgggaaaatgaaaactaaactgttagagaatcatcatactcttcatttggtgttttctgtttagttgctcattttcccccatgaataatgtaatcagctgaaagtatggaaaccgaactagccctctgatgtgtagaggggaagggggaaatttaattggatgttaacgtgtgcagcttagttggaagtgggaagttgagtcgaattagggctcctaatcatctgagctatctaatttttatccccctttcagcactggttgccaccaacattctcttggttgatgagatcatgcgagctggaatcttctctgaaaggttgaattgaagcttcctctgtatctgagtcttgaagactctgcaaagtgatcctgaagaatacagctgtggaatttttgtccaagcttcaaatgagctttcaagggaattttcccatgtgaaaaaaggagagaacactggcatctgttgaaattcggaagttccaggctcagctgaggcgagtgcgcggccagggctgcagctggcgctggctggtacttgctcaggccattgaggagcttctgggcgaccctgcgctcgtgcctaccaggcgccagccagtaggtgcgcagcgcctgctccagcagcgtcaagcctttgctgcgcggaccccgcaggccgggaagtcacgcaggtggtagtagtccaggtggtcgtaaactcctcctcatagcttatgggtggcggcggctgggctgaagactgcggacaggacatcccgcccggccgcctgtggtcaccctcccgcgcaggcgcgctcctggaagacccagcacctggagttccgat

SEQ ID NO: 361196 - DNA, 2060 bp, Homo sapiens
gtagcccaggctggtttcgaattcctgagttcaagggatccatctgctgtggcctcccaaagtgctgggattacaggcatgagctaacgcacctgacctttccttttaaattacttggccattgcagagtaacagtggaggctgctgagctttcattttaggagatacctggcttattctcgtagagccctacacttgcctaaagaggcaaggatgtaaaattatccgttactgttaactgttagctgtcatcttgcgtaaactttcactgagcctcaagcttcctcatctgtaaagtagagataacctgggaaataaattacacatgaaaatgtttccatcattataattgcatgcgcatgatagcaaattgtgactttttaatcttagtaatttgtagccaaacacttgggtagctttttcaagtagatagtacttaaagaggcccttcatgcattttatttgtggtatttttagactgtttcatattgttttaagtgattcgttctttttctactttcagcaaattcaacacccaacagcttccttaatagcaaaggtagcaacagcccaggatgatataactggtgatggtacgacttccaatgtcctaatcattggagagctgctgaaacaggcagatctctacatttctgaagtatgcacaacttttttttgttttgtttttttgagatgggatttcactcttgttgcccaggctggggtgcaatggcatctcggctcactgcaacgtctgtctcctgggttcaagcaattcccagcctcagcctcctcagtagctgagattacaggcatgagccactgtgcctggttcatgaagtctttagcagaaaaatcaattgaaattcaggatcagatttttgtttatatacattttgaaggtttatgtgtagtaatgggaagccatttatatgtgatttttcaaaaagataatttggtttgatgtgatcaagtttgttccttattaatatgctgcttgtcattctctgtaagtccctcttctctctttgcacacatcgtgtttttgaaaatcatgtttcttctacacaaagggagaagttcacctttattgagaagtgtaacaaccctcgttctgtcacattattgatcaaaggaccaaataagcccacacttagatcaaagatgcagtaagggatggcttgagggctgtcaaaaatgctattgatgatggctgtgtggttccggtgctggtgccgtggaagtggcaatggcagaagccctgaataaatataagctcagtgtaaagggcaaggcacagcttggagtccaagcatttgctgatgtgttgctcgttattcccaaggtgagcccgtggtagcagcagaagcaggcattatgggataacgattgtgtaaagaaacagcttcttcattcctgcactggttgccaccaacattctcttggttgatgagatcatgcgagctggaatcttctctgaaaggttgaattgaagcttcctctgtatctgagtcttgaagactctgcaaagtgatcctgaagaatacagctgtggaatttttgtccaagcttcaaatgagctttcaagggaattttcccatgtgaaaaaaggagagaacactggcatctgttgaaattcggaagttctgaaattataattacagtattttttaaaaattgcactgaagtgtacacagataaagcaggtctttcacccagtgaacaggatgttttgctttagcagcagtgacataaaattccatgttaaataagcatatattacctaccttattaaatattccttgaaaaagcagattttaatggtttaattttatgtggacatatgttaaattattcagcagtaccctattgttaagcatctggttttaaaatttttatgctaatataaataacgcttagtaatttaaaattttggaagcatcccgttagtgtaaattctgagtaaatttattgatcagttggacttttcacgcttttgaaatagctttgctaaaatgctccccctacaaagttgtaggaaatgggaagaggagtaaact

SEQ ID NO: 361197 - DNA, 1606 bp, Homo sapiens
cgcgccgacttttccggaagatccggatagtgcatcccggccacggcgcgcctgctctgggctctccgcgtgccgcgtcgctttcttttcttcctctggagcagttatggcggcggcgaagaccctgaaccccaaggccaaggtggccggagcgcaggcggcgctggcgttcaacattagcggggcgcggggtctgcaggacgtgctgaggaccaacctggggcccaaagggaccataaagatggccttcatcccagaataatcactgaaggatttgaagctgtgaaggaaaagcccttcattttttggaagaagtcaaagtaagcagagagatggacaaggaaacacttaaagatgtggccagggcatctctttgtactaaagttcatgctgaacttgcagatgtcttaacagaggctgtagtgggctccattttggccattaaaagaaaagatgaacctattgatctcttcatgattttgtgatcattgacaagaaacataaatctgaaactgatacaaggctgactcttgcttgtggtggggtggccctgaattcttttgaggacctaagtcctgactgcttgagacatgcaggacttgtatatgagtatacattgggagaagttcacctttattgagaagtgtaacaaccctcgttctgtcacattattgatcaaaggaccaaataagcccacacttagatcaaagatgcagtaagggatggcttgagggctgtcaaaaatgctattgatgatggctgtgtggttccggtgctggtgccgtggaagtggcaatggcagaagccctgaataaatataagctcagtgtaaagggcaaggcacagcttggagtccaagcatttgctgatgtgttgctcgttattcccaaggtgagcccgtggtagcagcagaagcaggcattatgggataacgattgtgtaaagaaacagcttcttcattcctgcactggttgccaccaacattctcttggttgatgagatcatgcgagctggaatcttctctgaaaggttgaattgaagcttcctctgtatctgagtcttgaagactctgcaaagtgatcctgaagaatacagctgtggaatttttgtccaagcttcaaatgagctttcaagggaattttcccatgtgaaaaaaggagagaacactggcatctgttgaaattcggaagttctgaaattataattacagtattttttaaaaattgcactgaagtgtacacagataaagcaggtctttcacccagtgaacaggatgttttgctttagcagcagtgacataaaattccatgttaaataagcatatattacctaccttattaaatattccttgaaaaagcagattttaatggtttaattttatgtggacatatgttaaattattcagcagtaccctattgttaagcatctggttttaaaatttttatgctaatataaataacgcttagtaatttaaaattttggaagcatcccgttagtgtaaattctgagtaaatttattgatcagttggacttttcacgcttttgaaatagctttgctaaaatgctccccctacaaagttgtaggaaatgggaagaggagtaaact

SEQ ID NO: 361198 - DNA, 1687 bp, Homo sapiens
aaaaaagcggctctagtgtgcggcgttccccgccttcttgggcttccagacaccctgaggactctgcacaatctctgcggggacgggggccttcatcccagaataatcactgaaggatttgaagctgtgaaggaaaagcccttcattttttggaagaagtcaaagtaagcagagagatggacaaggaaacacttaaagatgtggccagggcatctctttgtactaaagttcatgctgaacttgcagatgtcttaacagaggctgtagtgggctccattttggccattaaaagaaaagatgaacctattgatctcttcatgattttgtgatcattgacaagaaacataaatctgaaactgatacaagagaagtgaattctggcgttttttacaagagtgcagaaagagaaaaactcataaaagctgaaagaaaattcattgaagatagagttaaaacaaataatagaactgaaaaggaaagtctgtagtaattcagataaaggatttgttattaatcaaaagggaattgaccccttttccttagatgctctttcaaagaaggcatagtcgctcttcacagagctaaaaggaggaatatggagaggctgactcttgcttgtggtggggtggccctgaattcttttgaggacctaagtcctgactgcttgagacatgcaggacttgtatatgagtatacattgggagaagttcacctttattgagaagtgtaacaaccctcgttctgtcacattattgatcaaaggaccaaataagcccacacttagatcaaagatgcagtaagggatggcttgagggctgtcaaaaatgctattgatgatggctgtgtggttccggtgctggtgccgtggaagtggcaatggcagaagccctgaataaatataagctcagtgtaaagggcaaggcacagcttggagtccaagcatttgctgatgtgttgctcgttattcccaaggtgagcccgtggtagcagcagaagcaggcattatgggataacgattgtgtaaagaaacagcttcttcattcctgcactggttgccaccaacattctcttggttgatgagatcatgcgagctggaatcttctctgaaaggttgaattgaagcttcctctgtatctgagtcttgaagactctgcaaagtgatcctgaagaatacagctgtggaatttttgtccaagcttcaaatgagctttcaagggaattttcccatgtgaaaaaaggagagaacactggcatctgttgaaattcggaagttctgaaattataattacagtattttttaaaaattgcactgaagtgtacacagataaagcaggtctttcacccagtgaacaggatgttttgctttagcagcagtgacataaaattccatgttaaataagcatatattacctaccttattaaatattccttgaaaaagcagattttaatggtttaattttatgtggacatatgttaaattattcagcagtaccctattgttaagcatctggttttaaaatttttatgctaatataaataacgcttagtaatttaaaattttggaagcatcccgttagtgtaaattctgagtaaatttattgatcagttggacttttcacgcttttgaaatagctttgctaaaatgctccccctacaaagttgtaggaaatgggaagaggagtaaact

SEQ ID NO: 361199 - DNA, 1967 bp, Homo sapiens
cgcgccgacttttccggaagatccggatagtgcatcccggccacggcgcgcctgctctgggctctccgcgtgccgcgtcgctttcttttcttcctctggagcagttatggcggcggcgaagaccctgaaccccaaggccaaggtggccggagcgcaggcggcgctggcgttcaacattagcggggcgcggggtctgcaggacgtgctgaggaccaacctggggcccaaagggaccataaagatcaaattcaacacccaacagcttccttaatagcaaaggtagcaacagcccaggatgatataactggtgatggtacgacttccaatgtcctaatcattggagagctgctgaaacaggcagatctctacatttctgaaggccttcatcccagaataatcactgaaggatttgaagctgtgaaggaaaagcccttcattttttggaagaagtcaaagtaagcagagagatggacaaggaaacacttaaagatgtggccagggcatctctttgtactaaagttcatgctgaacttgcagatgtcttaacagaggctgtagtgggctccattttggccattaaaagaaaagatgaacctattgatctcttcatgattttgtgatcattgacaagaaacataaatctgaaactgatacaagagaagtgaattctggcgttttttacaagagtgcagaaagagaaaaactcataaaagctgaaagaaaattcattgaagatagagttaaaacaaataatagaactgaaaaggaaagtctgtagtaattcagataaaggatttgttattaatcaaaagggaattgaccccttttccttagatgctctttcaaagaaggcatagtcgctcttcacagagctaaaaggaggaatatggagaggctgactcttgcttgtggtggggtggccctgaattcttttgaggacctaagtcctgactgcttgagacatgcaggacttgtatatgagtatacattgggagaagttcacctttattgagaagtgtaacaaccctcgttctgtcacattattgatcaaaggaccaaataagcccacacttagatcaaagatgcagtaagggatggcttgagggctgtcaaaaatgctattgatgatggctgtgtggttccggtgctggtgccgtggaagtggcaatggcagaagccctgaataaatataagctcagtgtaaagggcaaggcacagcttggagtccaagcatttgctgatgtgttgctcgttattcccaaggtgtgtatgccttaaacagtcaatcttccaaaagattcagctgatcaaaactttttgataatgtaggctttattcataatacggattttggataaacgggtttgatcagttttcttcctgactataaaacatccaaacgtatttggtttctctgggaggcctgaatagctgacgtttcagatggcaagagagaacctgtagcttaatatttgcagtattaggggttatacttgagtaccaacttgctttttgttttggttttagctaaactgatatcattgttttttattatatactaattttgaagtatagtttatgactgatgtattgctgctgggtttggggtagatgagagagttgatcagtaacttgtgtctggttattctctgaagggaacataaatgttctgtcttcatgcaatgagattcttgttttgttttgttttgtttttaagaattttgagagttttgctcttgttgtccaggctggagtgcaatggtgtgatctcggcccactgcaacctcagcctccccagtagctgggattacaggcacctgccaccacactcagctaggtttcttttgtatttgtagtagaggtggggtttcaccatgttggccagactggtctcatactcctggcctcaggcgatccacctggcttggcctcccaaagtgctgggattacaggcatgagccactgca

SEQ ID NO: 361200 - DNA, 1590 bp, Homo sapiens
tgagacggagtcttgctctgttgcccaggctggagtgcagtggcaagatcttggctcactgcaactgctgcctcccaggttcacgccattctcctgcctcagcctcccgagtagctgggactacaggcacctgccaccacgcctggctaattttttgtatttttagttgagatggggtttcaccatgttagccaggatggtctcgatctcctgacctcatgatctgcccgcctcagcctcccaaaatgctgggattacaggcgtgaagcaccgcacccggccaccttactcagtttttaatcaagtactatgataagaaaatagattgggtgattatattcatgggtgaaaaacagctaaagatagcaaataatgccagaagaggggatctagaaatctaatgaaatggtgacagccctgatcttaggcccctgtaacaaaacaacacaaattaagtacaaagtaggagacagataacaggtacatccatgcagtatgtgcaagacctattgctgtcaacattattatttaataaaaaagatttctggaatgagggaaatgatcagtccattttagccagattagagttgcagtgctgtactttagtatgggtaaacagaaatgtatccagaaggagagaggggtgttcaggtcttctaagtagaagtcagacactcctcaaatattgtggataggggtcatggtttagagtagaaaattgggctaacagagaagctttgaattcccatagttaatactggaggaaatgagtcatcggtgataagcaaagccacacacaatattgttggttcttattgactgaatttactttggttgccttttaggtgagcccgtggtagcagcagaagcagcttagttggaagtgggaagttgagtcgaattagggctcctaatcatctgagctatctaatttttatccccctttcagcactggttgccaccaacattctcttggttgatgagatcatgcgagctggaatcttctctgaaaggttgaattgaagcttcctctgtatctgagtcttgaagactctgcaaagtgatcctgaagaatacagctgtggaatttttgtccaagcttcaaatgagctttcaagggaattttcccatgtgaaaaaaggagagaacactggcatctgttgaaattcggaagttctgaaattataattacagtattttttaaaaattgcactgaagtgtacacagataaagcaggtctttcacccagtgaacaggatgttttgctttagcagcagtgacataaaattccatgttaaataagcatatattacctaccttattaaatattccttgaaaaagcagattttaatggtttaattttatgtggacatatgttaaattattcagcagtaccctattgttaagcatctggttttaaaatttttatgctaatataaataacgcttagtaatttaaaattttggaagcatcccgttagtgtaaattctgagtaaatttattgatcagttggacttttcacgcttttgaaatagctttgctaaaatgctccccctacaaagttgtaggaaatgggaagaggagtaaact

SEQ ID NO: 361201 - DNA, 1407 bp, Homo sapiens
tgagacggagtcttgctctgttgcccaggctggagtgcagtggcaagatcttggctcactgcaactgctgcctcccaggttcacgccattctcctgcctcagcctcccgagtagctgggactacaggcacctgccaccacgcctggctaattttttgtatttttagttgagatggggtttcaccatgttagccaggatggtctcgatctcctgacctcatgatctgcccgcctcagcctcccaaaatgctgggattacaggcgtgaagcaccgcacccggccaccttactcagtttttaatcaagtactatgataagaaaatagattgggtgattatattcatgggtgaaaaacagctaaagatagcaaataatgccagaagaggggatctagaaatctaatgaaatggtgacagccctgatcttaggcccctgtaacaaaacaacacaaattaagtacaaagtaggagacagataacaggtacatccatgcagtatgtgcaagacctattgctgtcaacattattatttaataaaaaagatttctggaatgagggaaatgatcagtccattttagccagattagagttgcagtgctgtactttagtatgggtaaacagaaatgtatccagaaggagagaggggtgttcaggtcttctaagtagaagtcagacactcctcaaatattgtggataggggtcatggtttagagtagaaaattgggctaacagagaagctttgaattcccatagttaatactggaggaaatgagtcatcggtgataagcaaagccacacacaatattgttggttcttattgactgaatttactttggttgccttttaggtgagcccgtggtagcagcagaagcaggcattatgggataacgattgtgtaaagaaacagcttcttcattcctggtaagtttgggaaaatgaaaactaaactgttagagaatcatcatactcttcatttggtgttttctgtttagttgctcattttcccccatgaataatgtaatcagctgaaagtatggaaaccgaactagccctctgatgttcagtgaagaggaccagaaaagtctgctagagcagtaccatctgggtctggatctaatacgcagtatatacttggttggagagctcatctggaattttgccgttttcatgactgaccagtgtaagtggcagtttagcgcatgggattatgtacccgtcctcattttttcaggttgcctcgcacattctggacattttggctgtaagaatattggatacaagcgggggtacctggtttatacatgtagtttgtgttgataattttcctaggaaaagtaagttgtgcttaggaagtaggaaagcaatcaggccccgcttcccacgtacgtctactctctgagtagagatcg

SEQ ID NO: 361202 - DNA, 598 bp, Homo sapiens
gcgcaggcggcgctggcgttcaacattagcggggcgcggggtctgcaggacgtgctgaggaccaacctggggcccaaagggaccataaagatgtaaggtggggctggcgggagggctgggtgggcaccgcgcgccgctgcgcacctggcgggcccaagaccgcagatgggagcccgctgcctcggggctccgcagccacccttcctcgcgtcctcccgggccggtcctgttccctgctaagccccaccgttgcgtccatttcttcctgcgtcgatgccgtctccatggagaaaaaagcggctctagtgtgcggcgttccccgccttcttgggcttccagacaccctgaggactctgcacaatctctgcggggacggggtgggcactacacttgtcctccagcctgcgggagataactagctccatattctcggctccctaagatcggggaaaagcccgttttctaatgggactttttaatttagttttcgttgataactagctccatatccctggctccctgagatctgggaaaagtccttttttgttgtttgttttggttttttgttgtttttttttttgagacagagtctcgctct

SEQ ID NO: 361203 - DNA, 1978 bp, Homo sapiens
cgcgccgacttttccggaagatccggatagtgcatcccggccacggcgcgcctgctctgggctctccgcgtgccgcgtcgctttcttttcttcctctggagcagttatggcggcggcgaagaccctgaaccccaaggccaaggtggccggagcgcaggcggcgctggcgttcaacattagcggggcgcggggtctgcaggacgtgctgaggaccaacctggggcccaaagggaccataaagatcaaattcaacacccaacagcttccttaatagcaaaggtagcaacagcccaggatgatataactggtgatggtacgacttccaatgtcctaatcattggagagctgctgaaacaggcagatctctacatttctgaaggccttcatcccagaataatcactgaaggatttgaagctgtgaaggaaaagcccttcattttttggaagaagtcaaagtaagcagagagatggacaaggaaacacttaaagatgtggccagggcatctctttgtactaaagttcatgctgaacttgcagatgtcttaacagaggctgtagtgggctccattttggccattaaaagaaaagatgaacctattgatctcttcatgattttgtgatcattgacaagaaacataaatctgaaactgatacaagagaagtgaattctggcgttttttacaagagtgcagaaagagaaaaactcataaaagctgaaagaaaattcattgaagatagagttaaaacaaataatagaactgaaaaggaaagtctgtagtaattcagataaaggatttgttattaatcaaaagggaattgaccccttttccttagatgctctttcaaagaaggcatagtcgctcttcacagagctaaaaggaggaatatggagaggctgactcttgcttgtggtggggtggccctgaattcttttgaggacctaagtcctgactgcttgagacatgcaggacttgtatatgagtatacattgggagaagttcacctttattgagaagtgtaacaaccctcgttctgtcacattattgatcaaaggaccaaataagcccacacttagatcaaagatgcagtaagggatggcttgagggctgtcaaaaatgctattgatgatggctgtgtggttccggtgctggtgccgtggaagtggcaatggcagaagccctgaataaatataagctcagtgtaaagggcaaggcacagcttggagtccaagcatttgctgatgtgttgctcgttattcccaaggtgagcccgtggtagcagcagaagcaggcattatgggataacgattgtgtaaagaaacagcttcttcattcctgcactggttgccaccaacattctcttggttgatgagatcatgcgagctggaatcttctctgaaaggttgaattgaagcttcctctgtatctgagtcttgaagactctgcaaagtgatcctgaagaatacagctgtggaatttttgtccaagcttcaaatgagctttcaagggaattttcccatgtgaaaaaaggagagaacactggcatctgttgaaattcggaagttctgaaattataattacagtattttttaaaaattgcactgaagtgtacacagataaagcaggtctttcacccagtgaacaggatgttttgctttagcagcagtgacataaaattccatgttaaataagcatatattacctaccttattaaatattccttgaaaaagcagattttaatggtttaattttatgtggacatatgttaaattattcagcagtaccctattgttaagcatctggttttaaaatttttatgctaatataaataacgcttagtaatttaaaattttggaagcatcccgttagtgtaaattctgagtaaatttattgatcagttggacttttcacgcttttgaaatagctttgctaaaatgctccccctacaaagttgtaggaaatgggaagaggagtaaact

SEQ ID NO: 361204 - DNA, 1843 bp, Homo sapiens
cgcgccgacttttccggaagatccggatagtgcatcccggccacggcgcgcctgctctgggctctccgcgtgccgcgtcgctttcttttcttcctctggagcagttatggcggcggcgaagaccctgaaccccaaggccaaggtggccggagcgcaggcggcgctggcgttcaacattagcggggcgcggggtctgcaggacgtgctgaggaccaacctggggcccaaagggaccataaagatggccttcatcccagaataatcactgaaggatttgaagctgtgaaggaaaagcccttcattttttggaagaagtcaaagtaagcagagagatggacaaggaaacacttaaagatgtggccagggcatctctttgtactaaagttcatgctgaacttgcagatgtcttaacagaggctgtagtgggctccattttggccattaaaagaaaagatgaacctattgatctcttcatgattttgtgatcattgacaagaaacataaatctgaaactgatacaagagaagtgaattctggcgttttttacaagagtgcagaaagagaaaaactcataaaagctgaaagaaaattcattgaagatagagttaaaacaaataatagaactgaaaaggaaagtctgtagtaattcagataaaggatttgttattaatcaaaagggaattgaccccttttccttagatgctctttcaaagaaggcatagtcgctcttcacagagctaaaaggaggaatatggagaggctgactcttgcttgtggtggggtggccctgaattcttttgaggacctaagtcctgactgcttgagacatgcaggacttgtatatgagtatacattgggagaagttcacctttattgagaagtgtaacaaccctcgttctgtcacattattgatcaaaggaccaaataagcccacacttagatcaaagatgcagtaagggatggcttgagggctgtcaaaaatgctattgatgatggctgtgtggttccggtgctggtgccgtggaagtggcaatggcagaagccctgaataaatataagctcagtgtaaagggcaaggcacagcttggagtccaagcatttgctgatgtgttgctcgttattcccaaggtgagcccgtggtagcagcagaagcaggcattatgggataacgattgtgtaaagaaacagcttcttcattcctgcactggttgccaccaacattctcttggttgatgagatcatgcgagctggaatcttctctgaaaggttgaattgaagcttcctctgtatctgagtcttgaagactctgcaaagtgatcctgaagaatacagctgtggaatttttgtccaagcttcaaatgagctttcaagggaattttcccatgtgaaaaaaggagagaacactggcatctgttgaaattcggaagttctgaaattataattacagtattttttaaaaattgcactgaagtgtacacagataaagcaggtctttcacccagtgaacaggatgttttgctttagcagcagtgacataaaattccatgttaaataagcatatattacctaccttattaaatattccttgaaaaagcagattttaatggtttaattttatgtggacatatgttaaattattcagcagtaccctattgttaagcatctggttttaaaatttttatgctaatataaataacgcttagtaatttaaaattttggaagcatcccgttagtgtaaattctgagtaaatttattgatcagttggacttttcacgcttttgaaatagctttgctaaaatgctccccctacaaagttgtaggaaatgggaagaggagtaaact

SEQ ID NO: 361205 - DNA, 2125 bp, Homo sapiens
cgcgccgacttttccggaagatccggatagtgcatcccggccacggcgcgcctgctctgggctctccgcgtgccgcgtcgctttcttttcttcctctggagcagttatggcggcggcgaagaccctgaaccccaaggccaaggtggccggagcgcaggcggcgctggcgttcaacattagcggggcgcggggtctgcaggacgtgctgaggaccaacctggggcccaaagggaccataaagattcttgtttctggcgctggagacatcaagcttactaaagacacaggagttgacgatcagccctggccaacatggtgaaactcagtctctactaaaaatacaaaaattagccgggcacggtcctgcacagtgcgctgcttcacgaaatgcaaattcaacacccaacagcttccttaatagcaaaggtagcaacagcccaggatgatataactggtgatggtacgacttccaatgtcctaatcattggagagctgctgaaacaggcagatctctacatttctgaaggccttcatcccagaataatcactgaaggatttgaagctgtgaaggaaaagcccttcattttttggaagaagtcaaagtaagcagagagatggacaaggaaacacttaaagatgtggccagggcatctctttgtactaaagttcatgctgaacttgcagatgtcttaacagaggctgtagtgggctccattttggccattaaaagaaaagatgaacctattgatctcttcatgattttgtgatcattgacaagaaacataaatctgaaactgatacaagagaagtgaattctggcgttttttacaagagtgcagaaagagaaaaactcataaaagctgaaagaaaattcattgaagatagagttaaaacaaataatagaactgaaaaggaaagtctgtagtaattcagataaaggatttgttattaatcaaaagggaattgaccccttttccttagatgctctttcaaagaaggcatagtcgctcttcacagagctaaaaggaggaatatggagaggctgactcttgcttgtggtggggtggccctgaattcttttgaggacctaagtcctgactgcttgagacatgcaggacttgtatatgagtatacattgggagaagttcacctttattgagaagtgtaacaaccctcgttctgtcacattattgatcaaaggaccaaataagcccacacttagatcaaagatgcagtaagggatggcttgagggctgtcaaaaatgctattgatgatggctgtgtggttccggtgctggtgccgtggaagtggcaatggcagaagccctgaataaatataagctcagtgtaaagggcaaggcacagcttggagtccaagcatttgctgatgtgttgctcgttattcccaaggtgagcccgtggtagcagcagaagcaggcattatgggataacgattgtgtaaagaaacagcttcttcattcctgcactggttgccaccaacattctcttggttgatgagatcatgcgagctggaatcttctctgaaaggttgaattgaagcttcctctgtatctgagtcttgaagactctgcaaagtgatcctgaagaatacagctgtggaatttttgtccaagcttcaaatgagctttcaagggaattttcccatgtgaaaaaaggagagaacactggcatctgttgaaattcggaagttctgaaattataattacagtattttttaaaaattgcactgaagtgtacacagataaagcaggtctttcacccagtgaacaggatgttttgctttagcagcagtgacataaaattccatgttaaataagcatatattacctaccttattaaatattccttgaaaaagcagattttaatggtttaattttatgtggacatatgttaaattattcagcagtaccctattgttaagcatctggttttaaaatttttatgctaatataaataacgcttagtaatttaaaattttggaagcatcccgttagtgtaaattctgagtaaatttattgatcagttggacttttcacgcttttgaaatagctttgctaaaatgctccccctacaaagttgtaggaaatgggaagaggagtaaact

SEQ ID NO: 361206 - DNA, 377 bp, Homo sapiens
tgagacagagtctcgctctgtcacccaggctggagtgcagtggtgcaacctcggctcactgcaacctccacctcctgggttcaagcgattctcctgcctcagcctcccaagtagctaggactacaggcacccgccaccacgcccagctaatctttgtatttttagcagagacggggtttcaccatgttggccaggctagtctcgaactcctgacctcaaatgatccacccaccttggcctggccctgaggccatgaagccaaatacggccactagctgagcactggcttctatgcctcttaaaagtgtctgcaagcatgatagtcactccattttcctgtagatcatccaaaattctctatgaaacagtctttcctc

SEQ ID NO: 361207 - DNA, 2791 bp, Homo sapiens
agccggtccccgccgccgccgcccttcgcgccctgggccatctccctcccacctccctccgcggagcagccagacagcgagggccccggccgggggcaggggggacgccccgtccggggcacccccccggctctgagccgcccgcggggccggcctcggcccggagcggaggaaggagtcgccgaggagcagcctgaggccccagagtctgagacgagccgccgccgcccccgccactgcggggaggagggggaggaggagcgggaggagggacgagctggtcgggagaagaggaaaaaaacttttgagacttttccgttgccgctgggagccggaggcgcggggacctcttggcgcgacgctgccccgcgaggaggcaggacttggggaccccagaccgcctccctttgccgccggggacgcttgctccctccctgccccctacacggcgtccctcaggcgcccccattccggaccagccctcgggagtcgccgacccggcctcccgcaaagacttttccccagacctcgggcgcaccccctgcacgccgccttcatccccggcctgtctcctgagcccccgcgcatcctagaccctttctcctccaggagacggatctctctccgacctgccacagatcccctattcaagaccacccaccttctggtaccagatcgcgcccatctaggttatttccgtgggatactgagacacccccggtccaagcctcccctccaccactgcgcccttctccctgaggacctcagctttccctcgaggccctcctaccttttgccgggagacccccagcccctgcaggggcggggcctccccaccacaccagccctgttcgcgctctcggcagtgccggggggcgccgcctcccccatgccgccctccgggctgcggctgctgctgctgctgctaccgctgctgtggctactggtgctgacgcctggccggccggccgcgggactatccacctgcaagactatcgacatggagctggtgaagcggaagcgcatcgaggccatccgcggccagatcctgtccaagctgcggctcgccagccccccgagccagggggaggtgccgcccggcccgctgcccgaggccgtgctcgccctgtacaacagcacccgcgaccgggtggccggggagagtgcagaaccggagcccgagcctgaggccgactactacgccaaggaggtcacccgcgtgctaatggtggaaacccacaacgaaatctatgacaagttcaagcagagtacacacagcatatatatgttcttcaacacatcagagctccgagaagcggtacctgaacccgtgttgctctcccgggcagagctgcgtctgctgaggctcaagttaaaagtggagcagcacgtggagctgtaccagaaatacagcaacaattcctggcgatacctcagcaaccggctgctggcacccagcgactcgccagagtggttatcttttgatgtcaccggagttgtgcggcagtggttgagccgtggaggggaaattgagggctttcgccttagcgcccactgctcctgtgacagcagggataacacactgcaagtggacatcaacgggttcactaccggccgccgaggtgacctggccaccattcatggcatgaaccggcctttcctgcttctcatggccaccccgctggagagggcccagcatctgcaaagctcccggcaccgccgagccctggacaccaactattgcttcagctccacggagaagaactgctgcgtgcggcagctgtacattgacttccgcaaggacctcggctggaagtggatccacgagcccaagggctaccatgccaacttctgcctcgggccctgcccctacatttggagcctggacacgcagtacagcaaggtcctggccctgtacaaccagcataacccgggcgcctcggcggcgccgtgctgcgtgccgcaggcgctggagccgctgcccatcgtgtactacgtgggccgcaagcccaaggtggagcagctgtccaacatgatcgtgcgctcctgcaagtgcagctgaggtcccgccccgccccgccccgccccggcaggcccggccccaccccgccccgcccccgctgccttgcccatgggggctgtatttaaggacacccgtgccccaagcccacctggggccccattaaagatggagagaggactgcggatctctgtgtcattgggcgcctgcctggggtctccatccctgacgttcccccactcccactccctctctctccctctctgcctcctcctgcctgtctgcactattcctttgcccggcatcaaggcacaggggaccagtggggaacactactgtagttagatctatttattgagcaccttgggcactgttgaagtgccttacattaatgaactcattcagtcaccatagcaacactctgagatggcagggactctgataacacccattttaaaggttgaggaaacaagcccagagaggttaagggaggagttcctgcccaccaggaacctgctttagtgggggatagtgaagaagacaataaaagatagtagttcaggccaggcggggtgctcacgcctgtaatcctagcacttttgggaggcagagatgggaggatacttgaatccaggcatttgagaccagcctgggtaacatagtgagaccctatctctacaaaacacttttaaaaaatgtacacctgtggtcccagctactctggaggctaaggtgggaggatcacttgatcctgggaggtcaaggctgcag

SEQ ID NO: 361208 - DNA, 2123 bp, Homo sapiens
agccggtccccgccgccgccgcccttcgcgccctgggccatctccctcccacctccctccgcggagcagccagacagcgagggccccggccgggggcaggggggacgccccgtccggggcacccccccggctctgagccgcccgcggggccggcctcggcccggagcggaggaaggagtcgccgaggaggacgagctggtcgggagaagaggaaaaaaacttttgagacttttccgttgccgctgggagccggaggcgcggggacctcttggcgcgacgctgccccgcgaggaggcaggacttggggaccccagaccgcctccctttgccgccggggacgcttgctccctccctgccccctacacggcgtccctcaggcgcccccattccggaccagccctcgggagtcgccgacccggcctcccgcaaagacttttccccagacctcgggcgcaccccctgcacgccgccttcatccccggcctgtctcctgagcccccgcgcatcctagaccctttctcctccaggagacggatctctctccgacctgccacagatcccctattcaagaccacccaccttctggtaccagatcgcgcccatctaggttatttccgtgggatactgagacacccccggtccaagcctcccctccaccactgcgcccttctccctgaggacctcagctttccctcgaggccctcctaccttttgccgggagacccccagcccctgcaggggcggggcctccccaccacaccagccctgttcgcgctctcggcagtgccggggggcgccgcctcccccatgccgccctccgggctgcggctgctgctgctgctgctaccgctgctgtggctactggtgctgacgcctggccggccggccgcgggactatccacctgcaagactatcgacatggagctggtgaagcggaagcgcatcgaggccatccgcggccagatcctgtccaagctgcggctcgccagccccccgagccagggggaggtgccgcccggcccgctgcccgaggccgtgctcgccctgtacaacagcacccgcgaccgggtggccggggagagtgcagaaccggagcccgagcctgaggccgactactacgccaaggaggtcacccgcgtgctaatggtggaaacccacaacgaaatctatgacaagttcaagcagagtacacacagcatatatatgttcttcaacacatcagagctccgagaagcggtacctgaacccgtgttgctctcccgggcagagctgcgtctgctgaggctcaagttaaaagtggagcagcacgtggagctgtaccagaaatacagcaacaattcctggcgatacctcagcaaccggctgctggcacccagcgactcgccagagtggttatcttttgatgtcaccggagttgtgcggcagtggttgagccgtggaggggaaattgagggctttcgccttagcgcccactgctcctgtgacagcagggataacacactgcaagtggacatcaacgggttcactaccggccgccgaggtgacctggccaccattcatggcatgaaccggcctttcctgcttctcatggccaccccgctggagagggcccagcatctgcaaagctcccggcaccgccgagccctggacaccaactattgcttcagctccacggagaagaactgctgcgtgcggcagctgtacattgacttccgcaaggacctcggctggaagtggatccacgagcccaagggctaccatgccaacttctgcctcgggccctgcccctacatttggagcctggacacgcagtacagcaaggtcctggccctgtacaaccagcataacccgggcgcctcggcggcgccgtgctgcgtgccgcaggcgctggagccgctgcccatcgtgtactacgtgggccgcaagcccaaggtggagcagctgtccaacatgatcgtgcgctcctgcaagtgcagctgaggtcccgccccgccccgccccgccccggcaggcccggccccaccccgccccgcccccgctgccttgcccatgggggctgtatttaaggacacccgtgccccaagcccacctggggccccattaaagatggagagaggactgcg

SEQ ID NO: 361209 - DNA, 2344 bp, Homo sapiens
agccggtccccgccgccgccgcccttcgcgccctgggccatctccctcccacctccctccgcggagcagccagacagcgagggccccggccgggggcaggggggacgccccgtccggggcacccccccggctctgagccgcccgcggggccggcctcggcccggagcggaggaaggagtcgccgaggagcagcctgaggccccagagtctgagacgagccgccgccgcccccgccactgcggggaggagggggaggaggagcgggaggagggacgagctggtcgggagaagaggaaaaaaacttttgagacttttccgttgccgctgggagccggaggcgcggggacctcttggcgcgacgctgccccgcgaggaggcaggacttggggaccccagaccgcctccctttgccgccggggacgcttgctccctccctgccccctacacggcgtccctcaggcgcccccattccggaccagccctcgggagtcgccgacccggcctcccgcaaagacttttccccagacctcgggcgcaccccctgcacgccgccttcatccccggcctgtctcctgagcccccgcgcatcctagaccctttctcctccaggagacggatctctctccgacctgccacagatcccctattcaagaccacccaccttctggtaccagatcgcgcccatctaggttatttccgtgggatactgagacacccccggtccaagcctcccctccaccactgcgcccttctccctgaggacctcagctttccctcgaggccctcctaccttttgccgggagacccccagcccctgcaggggcggggcctccccaccacaccagccctgttcgcgctctcggcagtgccggggggcgccgcctcccccatgccgccctccgggctgcggctgctgctgctgctgctaccgctgctgtggctactggtgctgacgcctggccggccggccgcgggactatccacctgcaagactatcgacatggagctggtgaagcggaagcgcatcgaggccatccgcggccagatcctgtccaagctgcggctcgccagccccccgagccagggggaggtgccgcccggcccgctgcccgaggccgtgctcgccctgtacaacagcacccgcgaccgggtggccggggagagtgcagaaccggagcccgagcctgaggccgactactacgccaaggaggtcacccgcgtgctaatggtggaaacccacaacgaaatctatgacaagttcaagcagagtacacacagcatatatatgttcttcaacacatcagagctccgagaagcggtacctgaacccgtgttgctctcccgggcagagctgcgtctgctgaggctcaagttaaaagtggagcagcacgtggagctgtaccagaaatacagcaacaattcctggcgatacctcagcaaccggctgctggcacccagcgactcgccagagtggttatcttttgatgtcaccggagttgtgcggcagtggttgagccgtggaggggaaattgagggctttcgccttagcgcccactgctcctgtgacagcagggataacacactgcaagtggacatcaacggtgaggcctgcttccccggccatgcccagttgtgacgtgtgtgcgtgtgtgtgttcccatctgccccacgccccacttatctatccctctgagagtgtgtgtgtatgtcccctatcccctgactcccacaccaaagcagggttcactaccggccgccgaggtgacctggccaccattcatggcatgaaccggcctttcctgcttctcatggccaccccgctggagagggcccagcatctgcaaagctcccggcaccgccgagccctggacaccaactattgcttcagctccacggagaagaactgctgcgtgcggcagctgtacattgacttccgcaaggacctcggctggaagtggatccacgagcccaagggctaccatgccaacttctgcctcgggccctgcccctacatttggagcctggacacgcagtacagcaaggtcctggccctgtacaaccagcataacccgggcgcctcggcggcgccgtgctgcgtgccgcaggcgctggagccgctgcccatcgtgtactacgtgggccgcaagcccaaggtggagcagctgtccaacatgatcgtgcgctcctgcaagtgcagctgaggtcccgccccgccccgccccgccccggcaggcccggccccaccccgccccgcccccgctgccttgcccatgggggctgtatttaaggacacccgtgccccaagcccacctggggccccattaaagatggagagaggactgcg

SEQ ID NO: 361210 - DNA, 1014 bp, Homo sapiens
ctaacccgcgtccctcaccctcacccgcgtgctaatggtggaaacccactacgaaatctatgacaagttcaagcagagtacacacagcatatatatgttcttcaacacatcagagctccgagaagcggtacctgaacccgtgttgctctcccgggcagagctgcgtctgctgaggctcaagttaaaagtggagcagcacgtggagctgtaccagaaatacagcaacaattcctggcgatacctcagcaaccggctgctggcacccagcgactcgccagagtggttatcttttgatgtcaccggagttgtgcggcagtggttgagccgtggaggggaaattgagggctttcgccttagcgcccactgctcctgtgacagcagggataacacactgcaagtggacatcaacgggttcactaccggccgccgaggtgacctggccaccattcatggcatgaaccggcctttcctgcttctcatggccaccccgctggagagggcccagcatctgcaaagctcccggcaccgccgagccctggacaccaactattgcttcagctccacggagaagaactgctgcgtgcggcagctgtacattgacttccgcaaggacctcggctggaagtggatccacgagcccaagggctaccatgccaacttctgcctcgggccctgcccctacatttggagcctggacacgcagtacagcaaggtcctggccctgtacaaccagcataacccgggcgcctcggcggcgccgtgctgcgtgccgcaggcgctggagccgctgcccatcgtgtactacgtgggccgcaagcccaaggtggagcagctgtccaacatgatcgtgcgctcctgcaagtgcagctgaggtcccgccccgccccgccccgccccggcaggcccggccccaccccgccccgcccccgctgccttgcccatgggggctgtatttaaggacacccgtgccccaagcccacctggggccccattaaagatggagagaggactgcg

SEQ ID NO: 361211 - DNA, 1887 bp, Homo sapiens
agccggtccccgccgccgccgcccttcgcgccctgggccatctccctcccacctccctccgcggagcagccagacagcgagggccccggccgggggcaggggggacgccccgtccggggcacccccccggctctgagccgcccgcggggccggcctcggcccggagcggaggaaggagtcgccgaggagcagcctgaggccccagagtctgagacgagccgccgccgcccccgccactgcggggaggagggggaggaggagcgggaggagggacgagctggtcgggagaagaggaaaaaaacttttgagacttttccgttgccgctgggagccggaggcgcggggacctcttggcgcgacgctgccccgcgaggaggcaggacttggggaccccagaccgcctccctttgccgccggggacgcttgctccctccctgccccctacacggcgtccctcaggcgcccccattccggaccagccctcgggagtcgccgacccggcctcccgcaaagacttttccccagacctcgggcgcaccccctgcacgccgccttcatccccggcctgtctcctgagcccccgcgcatcctagaccctttctcctccaggagacggatctctctccgacctgccacagatcccctattcaagaccacccaccttctggtaccagatcgcgcccatctaggttatttccgtgggatactgagacacccccggtccaagcctcccctccaccactgcgcccttctccctgaggacctcagctttccctcgaggccctcctaccttttgccgggagacccccagcccctgcaggggcggggcctccccaccacaccagccctgttcgcgctctcggcagtgccggggggcgccgcctcccccatgccgccctccgggctgcggctgctgctgctgctgctaccgctgctgtggctactggtgctgacgcctggccggccggccgcgggactatccacctgcaagactatcgacatggagctggtgaagcggaagcgcatcgaggccatccgcggccagatcctgtccaagctgcggctcgccagccccccgagccagggggaggtgccgcccggcccgctgcccgaggccgtgctcgccctgtacaacagcacccgcgaccgggtggccggggagagtgcagaaccggagcccgagcctgaggccgactactacgccaaggaggtcacccgcgtgctaatggtggaaacccacaacgaaatctatgacaagttcaagcagagtacacacagcatatatatgttcttcaacacatcagagctccgagaagcggtacctgaacccgtgttgctctcccgggcagagctgcgtctgctgaggctcaagttaaaagtggagcagcacgtggagctgtaccagaaatacagcaacaattcctggcgatacctcagcaaccggctgctggcacccagcgactcgccagagtggttatcttttgatgtcaccggagttgtgcggcagtggttgagccgtggaggggaaattgagggctttcgccttagcgcccactgctcctgtgacagcagggataacacactgcaagtggacatcaacgggttcactaccggccgccgaggtgacctggccaccattcatggcatgaaccggcctttcctgcttctcatggccaccccgctggagagggcccagcatctgcaaagctcccggcaccgccgagccctggacaccaactattgcttcagctccacggagaagaactgctgcgtgcggcagctgtacattgacttccgcaaggaacccccgcgcgtgggttccttgcagacaggcataaaaattcctgggcaagaggcacttacccagcatccttacaaaggggttct

SEQ ID NO: 361212 - DNA, 1973 bp, Homo sapiens
agccggtccccgccgccgccgcccttcgcgccctgggccatctccctcccacctccctccgcggagcagccagacagcgagggccccggccgggggcaggggggacgccccgtccggggcacccccccggctctgagccgcccgcggggccggcctcggcccggagcggaggaaggagtcgccgaggagcagcctgaggccccagagtctgagacgagccgccgccgcccccgccactgcggggaggagggggaggaggagcgggaggagggacgagctggtcgggagaagaggaaaaaaacttttgagacttttccgttgccgctgggagccggaggcgcggggacctcttggcgcgacgctgccccgcgaggaggcaggacttggggaccccagaccgcctccctttgccgccggggacgcttgctccctccctgccccctacacggcgtccctcaggcgcccccattccggaccagccctcgggagtcgccgacccggcctcccgcaaagacttttccccagacctcgggcgcaccccctgcacgccgccttcatccccggcctgtctcctgagcccccgcgcatcctagaccctttctcctccaggagacggatctctctccgacctgccacagatcccctattcaagaccacccaccttctggtaccagatcgcgcccatctaggttatttccgtgggatactgagacacccccggtccaagcctcccctccaccactgcgcccttctccctgaggacctcagctttccctcgaggccctcctaccttttgccgggagacccccagcccctgcaggggcggggcctccccaccacaccagccctgttcgcgctctcggcagtgccggggggcgccgcctcccccatgccgccctccgggctgcggctgctgctgctgctgctaccgctgctgtggctactggtgctgacgcctggccggccggccgcgggactatccacctgcaagactatcgacatggagctggtgaagcggaagcgcatcgaggccatccgcggccagatcctgtccaagctgcggctcgccagccccccgagccagggggaggtgccgcccggcccgctgcccgaggccgtgctcgccctgtacaacagcacccgcgaccgggtggccggggagagtgcagaaccggagcccgagcctgaggccgactactacgccaaggaggtcacccgcgtgctaatggtggaaacccacaacgaaatctatgacaagttcaagcagagtacacacagcatatatatgttcttcaacacatcagagctccgagaagcggtacctgaacccgtgttgctctcccgggcagagctgcgtctgctgaggctcaagttaaaagtggagcagcacgtggagctgtaccagaaatacagcaacaattcctggcgatacctcagcaaccggctgctggcacccagcgactcgccagagtggttatcttttgatgtcaccggagttgtgcggcagtggttgagccgtggaggggaaattgagggctttcgccttagcgcccactgctcctgtgacagcagggataacacactgcaagtggacatcaacgggttcactaccggccgccgaggtgacctggccaccattcatggcatgaaccggcctttcctgcttctcatggccaccccgctggagagggcccagcatctgcaaagctcccggcgccgtgctgcgtgccgcaggcgctggagccgctgcccatcgtgtactacgtgggccgcaagcccaaggtggagcagctgtccaacatgatcgtgcgctcctgcaagtgcagctgaggtcccgccccgccccgccccgccccggcaggcccggccccaccccgccccgcccccgctgccttgcccatgggggctgtatttaaggacacccgtgccccaagcccacctggggccccattaaagatggagagaggactgcg

SEQ ID NO: 361213 - DNA, 1837 bp, Homo sapiens
agccggtccccgccgccgccgcccttcgcgccctgggccatctccctcccacctccctccgcggagcagccagacagcgagggccccggccgggggcaggggggacgccccgtccggggcacccccccggctctgagccgcccgcggggccggcctcggcccggagcggaggaaggagtcgccgaggagcagcctgaggccccagagtctgagacgagccgccgccgcccccgccactgcggggaggagggggaggaggagcgggaggagggacgagctggtcgggagaagaggaaaaaaacttttgagacttttccgttgccgctgggagccggaggcgcggggacctcttggcgcgacgctgccccgcgaggaggcaggacttggggaccccagaccgcctccctttgccgccggggacgcttgctccctccctgccccctacacggcgtccctcaggcgcccccattccggaccagccctcgggagtcgccgacccggcctcccgcaaagacttttccccagacctcgggcgcaccccctgcacgccgccttcatccccggcctgtctcctgagcccccgcgcatcctagaccctttctcctccaggagacggatctctctccgacctgccacagatcccctattcaagaccacccaccttctggtaccagatcgcgcccatctaggttatttccgtgggatactgagacacccccggtccaagcctcccctccaccactgcgcccttctccctgaggacctcagctttccctcgaggccctcctaccttttgccgggagacccccagcccctgcaggggcggggcctccccaccacaccagccctgttcgcgctctcggcagtgccggggggcgccgcctcccccatgccgccctccgggctgcggctgctgctgctgctgctaccgctgctgtggctactggtgctgacgcctggccggccggccgcgggactatccacctgcaagactatcgacatggagctggtgaagcggaagcgcatcgaggccatccgcggccagatcctgtccaagctgcggctcgccagccccccgagccagggggaggtgccgcccggcccgctgcccgaggccgtgctcgccctgtacaacagcacccgcgaccgggtggccggggagagtgcagaaccggagcccgagcctgaggccgactactacgccaaggaggtcacccgcgtgctaatggtggaaacccacaacgaaatctatgacaagttcaagcagagtacacacagcatatatatgttcttcaacacatcagagctccgagaagcggtacctgaacccgtgttgctctcccgggcagagctgcgtctgctgaggctcaagttaaaagtggagcagcacgtggagctgtaccagaaatacagcaacaattcctggcgatacctcagcaaccggctgctggcacccagcgactcgccagagtggttatcttttgatgtcaccggagttgtgcggcagtggttgagccgtggaggggaaattgagggctttcgccttagcgcccactgctcctgtgacagcagggataacacactgcaagtggacatcaacgctccacggagaagaactgctgcgtgcggcagctgtacattgacttccgcaaggacctcggctggaagtggatccacgagcccaagggctaccatgccaacttctgcctcgggccctgcccctacatttggagcctggacacgcagtacagcaaggtacgtctggcccaccgggctacgagatgcgcttggggggagccaggacggaggaagaggagagagaaagagaagtaaagtc

SEQ ID NO: 361214 - DNA, 790 bp, Homo sapiens
agccggtccccgccgccgccgcccttcgcgccctgggccatctccctcccacctccctccgcggagcagccagacagcgagggccccggccgggggcaggggggacgccccgtccggggcacccccccggctctgagccgcccgcggggccggcctcggcccggagcggaggaaggagtcgccgaggagcagcctgaggccccagagtctgagacgagccgccgccgcccccgccactgcggggaggagggggaggaggagcgggaggagggacgagctggtcgggagaagaggaaaaaaacttttgagacttttccgttgccgctgggagccggaggcgcggggacctcttggcgcgacgctgccccgcgaggaggcaggacttggggaccccagaccgcctccctttgccgccggggacgcttgctccctccctgccccctacacggcgtccctcaggcgcccccattccggaccagccctcgggagtcgccgacccggcctcccgcaaagacttttccccagacctcgggcgcaccccctgcacgccgccttcatccccggcctgtctcctgagcccccgcgcatcctagaccctttctcctccaggagacggatctctctccgacctgccacagatcccctattcaagaccacccaccttctggtaccagatcgcgcccatctaggttatttccgtgggatactgagacacccccggtccaagcctcccctccaccactgcgcccttctccctgaggacctcagggagaagtgcgcctgggtgcgc

SEQ ID NO: 361215 - DNA, 444 bp, Homo sapiens
tccacccctcctctcatgggtactgttggggaggatgggtgccacaggaccacacaggtggctgtctgagagggtagtgcctgggaactttctggaagcctgtttggggaagcagatggggtgaaggattcagttagtgtatgtggggtcgtgacaccatctacccactgtctctctcctgccttcatcatcctctagaaatacagcaacaattcctggcgatacctcagcaaccggctgctggcacccagcgactcgccagagtggttatcttttgatgtcaccggagttgtgcggcagtggttgagccgtggaggtgaggattacttgtgtgtcccacccctgtttctccctggggtccaccccattgtttgtcctggggtcactttgcctaggacccctctccgccccatactggtgtgaaagtgctgagacctggctccc

SEQ ID NO: 361216 - DNA, 2205 bp, Homo sapiens
agccggtccccgccgccgccgcccttcgcgccctgggccatctccctcccacctccctccgcggagcagccagacagcgagggccccggccgggggcaggggggacgccccgtccggggcacccccccggctctgagccgcccgcggggccggcctcggcccggagcggaggaaggagtcgccgaggagcagcctgaggccccagagtctgagacgagccgccgccgcccccgccactgcggggaggagggggaggaggagcgggaggagggacgagctggtcgggagaagaggaaaaaaacttttgagacttttccgttgccgctgggagccggaggcgcggggacctcttggcgcgacgctgccccgcgaggaggcaggacttggggaccccagaccgcctccctttgccgccggggacgcttgctccctccctgccccctacacggcgtccctcaggcgcccccattccggaccagccctcgggagtcgccgacccggcctcccgcaaagacttttccccagacctcgggcgcaccccctgcacgccgccttcatccccggcctgtctcctgagcccccgcgcatcctagaccctttctcctccaggagacggatctctctccgacctgccacagatcccctattcaagaccacccaccttctggtaccagatcgcgcccatctaggttatttccgtgggatactgagacacccccggtccaagcctcccctccaccactgcgcccttctccctgaggacctcagctttccctcgaggccctcctaccttttgccgggagacccccagcccctgcaggggcggggcctccccaccacaccagccctgttcgcgctctcggcagtgccggggggcgccgcctcccccatgccgccctccgggctgcggctgctgctgctgctgctaccgctgctgtggctactggtgctgacgcctggccggccggccgcgggactatccacctgcaagactatcgacatggagctggtgaagcggaagcgcatcgaggccatccgcggccagatcctgtccaagctgcggctcgccagccccccgagccagggggaggtgccgcccggcccgctgcccgaggccgtgctcgccctgtacaacagcacccgcgaccgggtggccggggagagtgcagaaccggagcccgagcctgaggccgactactacgccaaggaggtcacccgcgtgctaatggtggaaacccacaacgaaatctatgacaagttcaagcagagtacacacagcatatatatgttcttcaacacatcagagctccgagaagcggtacctgaacccgtgttgctctcccgggcagagctgcgtctgctgaggctcaagttaaaagtggagcagcacgtggagctgtaccagaaatacagcaacaattcctggcgatacctcagcaaccggctgctggcacccagcgactcgccagagtggttatcttttgatgtcaccggagttgtgcggcagtggttgagccgtggaggggaaattgagggctttcgccttagcgcccactgctcctgtgacagcagggataacacactgcaagtggacatcaacgggttcactaccggccgccgaggtgacctggccaccattcatggcatgaaccggcctttcctgcttctcatggccaccccgctggagagggcccagcatctgcaaagctcccggcaccgccgagccctggacaccaactattgcttcagctccacggagaagaactgctgcgtgcggcagctgtacattgacttccgcaaggacctcggctggaagtggatccacgagcccaagggctaccatgccaacttctgcctcgggccctgcccctacatttggagcctggacacgcagtacagcaaggtcctggccctgtacaaccagcataacccgggcgcctcggcggcgccgtgctgcgtgccgcaggcgctggagccgctgcccatcgtgtactacgtgggccgcaagcccaaggtggagcagctgtccaacatgatcgtgcgctcctgcaagtgcagctgaggtcccgccccgccccgccccgccccggcaggcccggccccaccccgccccgcccccgctgccttgcccatgggggctgtatttaaggacacccgtgccccaagcccacctggggccccattaaagatggagagaggactgcg

SEQ ID NO: 361217 - DNA, 2218 bp, Homo sapiens
  misc_feature (2079)..(2080): n is a, c, g, or t
  misc_feature (2082)..(2082): n is a, c, g, or t
agccggtccccgccgccgccgcccttcgcgccctgggccatctccctcccacctccctccgcggagcagccagacagcgagggccccggccgggggcaggggggacgccccgtccggggcacccccccggctctgagccgcccgcggggccggcctcggcccggagcggaggaaggagtcgccgaggagcagcctgaggccccagagtctgagacgagccgccgccgcccccgccactgcggggaggagggggaggaggagcgggaggagggacgagctggtcgggagaagaggaaaaaaacttttgagacttttccgttgccgctgggagccggaggcgcggggacctcttggcgcgacgctgccccgcgaggaggcaggacttggggaccccagaccgcctccctttgccgccggggacgcttgctccctccctgccccctacacggcgtccctcaggcgcccccattccggaccagccctcgggagtcgccgacccggcctcccgcaaagacttttccccagacctcgggcgcaccccctgcacgccgccttcatccccggcctgtctcctgagcccccgcgcatcctagaccctttctcctccaggagacggatctctctccgacctgccacagatcccctattcaagaccacccaccttctggtaccagatcgcgcccatctaggttatttccgtgggatactgagacacccccggtccaagcctcccctccaccactgcgcccttctccctgaggacctcagctttccctcgaggccctcctaccttttgccgggagacccccagcccctgcaggggcggggcctccccaccacaccagccctgttcgcgctctcggcagtgccggggggcgccgcctcccccatgccgccctccgggctgcggctgctgctgctgctgctaccgctgctgtggctactggtgctgacgcctggccggccggccgcgggactatccacctgcaagactatcgacatggagctggtgaagcggaagcgcatcgaggccatccgcggccagatcctgtccaagctgcggctcgccagccccccgagccagggggaggtgccgcccggcccgctgcccgaggccgtgctcgccctgtacaacagcacccgcgaccgggtggccggggagagtgcagaaccggagcccgagcctgaggccgactactacgccaaggaggtcacccgcgtgctaatggtggaaacccacaacgaaatctatgacaagttcaagcagagtacacacagcatatatatgttcttcaacacatcagagctccgagaagcggtacctgaacccgtgttgctctcccgggcagagctgcgtctgctgaggctcaagttaaaagtggagcagcacgtggagctgtaccagaaatacagcaacaattcctggcgatacctcagcaaccggctgctggcacccagcgactcgccagagtggttatcttttgatgtcaccggagttgtgcggcagtggttgagccgtggaggggaaattgagggctttcgccttagcgcccactgctcctgtgacagcagggataacacactgcaagtggacatcaacgggttcactaccggccgccgaggtgacctggccaccattcatggcatgaaccggcctttcctgcttctcatggccaccccgctggagagggcccagcatctgcaaagctcccggcaccgccgagccctggacaccaactattgcttcagctccacggagaagaactgctgcgtgcggcagctgtacattgacttccgcaaggacctcggctggaagtggatccacgagcccaagggctaccatgccaacttctgcctcgggccctgcccctacatttggagcctggacacgcagtacagcaaggtcctggccctgtacaaccagcataacccgggcgcctcggcggcgccgtgctgcgtgccgcaggcgctggagccgctgcccatcgtgtactacgtgggccgcaagcccaaggtggagcagctgtccaacatgatcgtgcgctcctgcaagtgcagctgaggtcccgccccgccttnntntattttcaatttattttaaatttttatttttttaatttttattcttaatattataatataatatataatttattcaattattttacttactatattatctatatttattttaattatatttacttattaaattcaa

SEQ ID NO: 361218 - DNA, 2169 bp, Homo sapiens
agccggtccccgccgccgccgcccttcgcgccctgggccatctccctcccacctccctccgcggagcagccagacagcgagggccccggccgggggcaggggggacgccccgtccggggcacccccccggctctgagccgcccgcggggccggcctcggcccggagcggaggaaggagtcgccgaggagcagcctgaggccccagagtctgagacgagccgccgccgcccccgccactgcggggaggagggggaggaggagcgggaggagggacgagctggtcgggagaagaggaaaaaaacttttgagacttttccgttgccgctgggagccggaggcgcggggacctcttggcgcgacgctgccccgcgaggaggcaggacttggggaccccagaccgcctccctttgccgccggggacgcttgctccctccctgccccctacacggcgtccctcaggcgcccccattccggaccagccctcgggagtcgccgacccggcctcccgcaaagacttttccccagacctcgggcgcaccccctgcacgccgccttcatccccggcctgtctcctgagcccccgcgcatcctagaccctttctcctccaggagacggatctctctccgacctgccacagatcccctattcaagaccacccaccttctggtaccagatcgcgcccatctaggttatttccgtgggatactgagacacccccggtccaagcctcccctccaccactgcgcccttctccctgaggacctcagctttccctcgaggccctcctaccttttgccgggagacccccagcccctgcaggggcggggcctccccaccacaccagccctgttcgcgctctcggcagtgccggggggcgccgcctcccccatgccgccctccgggctgcggctgctgctgctgctgctaccgctgctgtggctactggtgctgacgcctggccggccggccgcgggactatccacctgcaagactatcgacatggagctggtgaagcggaagcgcatcgaggccatccgcggccagatcctgtccaagctgcggctcgccagccccccgagccagggggaggtgccgcccggcccgctgcccgaggccgtgctcgccctgtacaacagcacccgcgaccgggtggccggggagagtgcagaaccggagcccgagcctgaggccgactactacgccaaggaggtcacccgcgtgctaatggtggaaacccacaacgaaatctatgacaagttcaagcagagtacacacagcatatatatgttcttcaacacatcagagctccgagaagcggtacctgaacccgtgttgctctcccgggcagagctgcgtctgctgaggctcaagttaaaagtggagcagcacgtggagctgtaccagaaatacagcaacaattcctggcgatacctcagcaaccggctgctggcacccagcgactcgccagagtggttatcttttgatgtcaccggagttgtgcggcagtggttgagccgtggaggggaaattgagggctttcgccttagcgcccactgctcctgtgacagcagggataacacactgcaagtggacatcaacgggttcactaccggccgccgaggtgacctggccaccattcatggcatgaaccggcctttcctgcttctcatggccaccccgctggagagggcccagcatctgcaaagctcccggcaccgccgagccctggacaccaactattgcttcagctccacggagaagaactgctgcgtgcggcagctgtacattgacttccgcaaggacctcggctggaagtggatccacgagcccaagggctaccatgccaacttctgcctcgggccctgcccctacatttggagcctggacacgcagtacagcaagctcaatgaacagaacctcatccaggaagtccccaacatctggcaacgtgaagttggctaggaggaaggaagtgccccaaagagaacaagaagaagaggaccctgcattgacgttcctctgggaagcactcatttcctacctttcatttctaagaccgcatgatctgggacatccttcccttcctcgtcggttcgctttattgttcggtcttttaggtcctcgtcagtgggacaaattacaatagctttgcgctggaagccttcaaa

SEQ ID NO: 361219 - DNA, 2057 bp, Homo sapiens
agccggtccccgccgccgccgcccttcgcgccctgggccatctccctcccacctccctccgcggagcagccagacagcgagggccccggccgggggcaggggggacgccccgtccggggcacccccccggctctgagccgcccgcggggccggcctcggcccggagcggaggaaggagtcgccgaggagcagcctgaggccccagagtctgagacgagccgccgccgcccccgccactgcggggaggagggggaggaggagcgggaggagggacgagctggtcgggagaagaggaaaaaaacttttgagacttttccgttgccgctgggagccggaggcgcggggacctcttggcgcgacgctgccccgcgaggaggcaggacttggggaccccagaccgcctccctttgccgccggggacgcttgctccctccctgccccctacacggcgtccctcaggcgcccccattccggaccagccctcgggagtcgccgacccggcctcccgcaaagacttttccccagacctcgggcgcaccccctgcacgccgccttcatccccggcctgtctcctgagcccccgcgcatcctagaccctttctcctccaggagacggatctctctccgacctgccacagatcccctattcaagaccacccaccttctggtaccagatcgcgcccatctaggttatttccgtgggatactgagacacccccggtccaagcctcccctccaccactgcgcccttctccctgaggacctcagctttccctcgaggccctcctaccttttgccgggagacccccagcccctgcaggggcggggcctccccaccacaccagccctgttcgcgctctcggcagtgccggggggcgccgcctcccccatgccgccctccgggctgcggctgctgctgctgctgctaccgctgctgtggctactggtgctgacgcctggccggccggccgcgggactatccacctgcaagactatcgacatggagctggtgaagcggaagcgcatcgaggccatccgcggccagatcctgtccaagctgcggctcgccagccccccgagccagggggaggtgccgcccggcccgctgcccgaggccgtgctcgccctgtacaacagcacccgcgaccgggtggccggggagagtgcagaaccggagcccgagcctgaggccgactactacgccaaggaggtcacccgcgtgctaatggtggaaacccacaacgaaatctatgacaagttcaagcagagtacacacagcatatatatgttcttcaacacatcagagctccgagaagcggtacctgaacccgtgttgctctcccgggcagagctgcgtctgctgaggctcaagttaaaagtggagcagcacgtggagctgtaccagaaatacagcaacaattcctggcgatacctcagcaaccggctgctggcacccagcgactcgccagagtggttatcttttgatgtcaccggagttgtgcggcagtggttgagccgtggaggggaaattgagggctttcgccttagcgcccactgctcctgtgacagcagggataacacactgcaagtggacatcaacgctccacggagaagaactgctgcgtgcggcagctgtacattgacttccgcaaggacctcggctggaagtggatccacgagcccaagggctaccatgccaacttctgcctcgggccctgcccctacatttggagcctggacacgcagtacagcaaggtcctggccctgtacaaccagcataacccgggcgcctcggcggcgccgtgctgcgtgccgcaggcgctggagccgctgcccatcgtgtactacgtgggccgcaagcccaaggtggagcagctgtccaacatgatcgtgcgctcctgcaagtgcagctgaggtcccgccccgccccgccccgccccggcaggcccggccccaccccgccccgcccccgctgccttgcccatgggggctgtatttaaggacacccgtgccccaagcccacctggggccccattaaagatggagagaggactgcg

SEQ ID NO: 361220 - DNA, 2017 bp, Homo sapiens
agccggtccccgccgccgccgcccttcgcgccctgggccatctccctcccacctccctccgcggagcagccagacagcgagggccccggccgggggcaggggggacgccccgtccggggcacccccccggctctgagccgcccgcggggccggcctcggcccggagcggaggaaggagtcgccgaggagcagcctgaggccccagagtctgagacgagccgccgccgcccccgccactgcggggaggagggggaggaggagcgggaggagggacgagctggtcgggagaagaggaaaaaaacttttgagacttttccgttgccgctgggagccggaggcgcggggacctcttggcgcgacgctgccccgcgaggaggcaggacttggggaccccagaccgcctccctttgccgccggggacgcttgctccctccctgccccctacacggcgtccctcaggcgcccccattccggaccagccctcgggagtcgccgacccggcctcccgcaaagacttttccccagacctcgggcgcaccccctgcacgccgccttcatccccggcctgtctcctgagcccccgcgcatcctagaccctttctcctccaggagacggatctctctccgacctgccacagatcccctattcaagaccacccaccttctggtaccagatcgcgcccatctaggttatttccgtgggatactgagacacccccggtccaagcctcccctccaccactgcgcccttctccctgaggacctcagctttccctcgaggccctcctaccttttgccgggagacccccagcccctgcaggggcggggcctccccaccacaccagccctgttcgcgctctcggcagtgccggggggcgccgcctcccccatgccgccctccgggctgcggctgctgctgctgctgctaccgctgctgtggctactggtgctgacgcctggccggccggccgcgggactatccacctgcaagactatcgacatggagctggtgaagcggaagcgcatcgaggccatccgcggccagatcctgtccaagctgcggctcgccagccccccgagccagggggaggtgccgcccggcccgctgcccgaggccgtgctcgccctgtacaacagcacccgcgaccgggtggccggggagagtgcagaaccggagcccgagcctgaggccgactactacgccaaggaggtcacccgcgtgctaatggtggaaacccacaacgaaatctatgacaagttcaagcagagtacacacagcatatatatgttcttcaacacatcagagctccgagaagcggtacctgaacccgtgttgctctcccgggcagagctgcgtctgctgaggctcaagttaaaagtggagcagcacgtggagctgtaccagaaatacagcaacaattcctggcgatacctcagcaaccggctgctggcacccagcgactcgccagagtggttatcttttgatgtcaccggagttgtgcggcagtggttgagccgtggaggggaaattgagggctttcgccttagcgcccactgctcctgtgacagcagggataacacactgcaagtggacatcaacggtgaggcctgcttccccggccatgcccagttgtgacgtgtgtgcgtgtgtgtgttcccatctgccccacgccccacttatctatccctctgagagtgtgtgtgtatgtcccctatcccctgactcccacaccaaagcagggttcactaccggccgccgaggtgacctggccaccattcatggcatgaaccggcctttcctgcttctcatggccaccccgctggagagggcccagcatctgcaaagctcccggcaccgccgagccctggacaccaactattgcttcagccgccccgccccggcaggcccggccccaccccgccccgcccccgctgccttgcccatgggggctgtatttaaggacacccgtgccccaagcccacctggggccccattaaagatggagagaggactgcg

SEQ ID NO: 361221 - DNA, 1629 bp, Homo sapiens
agccggtccccgccgccgccgcccttcgcgccctgggccatctccctcccacctccctccgcggagcagccagacagcgagggccccggccgggggcaggggggacgccccgtccggggcacccccccggctctgagccgcccgcggggccggcctcggcccggagcggaggaaggagtcgccgaggagcagcctgaggccccagagtctgagacgagccgccgccgcccccgccactgcggggaggagggggaggaggagcgggaggagggacgagctggtcgggagaagaggaaaaaaacttttgagacttttccgttgccgctgggagccggaggcgcggggacctcttggcgcgacgctgccccgcgaggaggcaggacttggggaccccagaccgcctccctttgccgccggggacgcttgctccctccctgccccctacacggcgtccctcaggcgcccccattccggaccagccctcgggagtcgccgacccggcctcccgcaaagacttttccccagacctcgggcgcaccccctgcacgccgccttcatccccggcctgtctcctgagcccccgcgcatcctagaccctttctcctccaggagacggatctctctccgacctgccacagatcccctattcaagaccacccaccttctggtaccagatcgcgcccatctaggttatttccgtgggatactgagacacccccggtccaagcctcccctccaccactgcgcccttctccctgaggacctcagctttccctcgaggccctcctaccttttgccgggagacccccagcccctgcaggggcggggcctccccaccacaccagccctgttcgcgctctcggcagtgccggggggcgccgcctcccccatgccgccctccgggctgcggctgctgctgctgctgctaccgctgctgtggctactggtgctgacgcctggccggccggccgcgggactatccacctgcaagactatcgacatggagctggtgaagcggaagcgcatcgaggccatccgcggccagatcctgtccaagctgcggctcgccagccccccgagccagggggaggtgccgcccggcccgctgcccgaggccgtgctcgccctgtacaacagcacccgcgaccgggtggccggggagagtgcagaaccggagcccgagcctgaggccgactactacgccaaggaggtcacccgcgtgctaatggtggaaacccacaacgaaatctatgacaagttcaagcagagtacacacagcatatatatgttcttcaacacatcagagctccgagaagcggtacctgaacccgtgttgctctcccgggcagagctgcgtctgctgaggctcaagttaaaagtggagcagcacgtggagctgtaccagaaatacagcaacaattcctggcgatacctcagcaaccggctgctggcacccagcgactcgccagagtggttatcttttgatgtcaccggagttgtgcggcagtggttgagccgtggagggaaattgagggcattcgccagagcggacatagctcatgtgccagcagggtcatcgcactgccagtgtgtagaatgcagcagtgctccgaagcactgtctcgcggg

SEQ ID NO: 361222 - DNA, 404 bp, Homo sapiens
ggcccctccttcaacatgtggggattacaattcgacatgagatttgggtgaggacacagagccaaaccatgtcatgcggccatggggagcagctgcttaagtggtatgggtttccttttggagtgaggaaagaagagtttgaaactagataggggtggtgattgttcagtgttgcagatgtactaaatgccactgacttgttcagtttaaattggccaattttatgttatctgaatttcacctcaataaaagaacacctagttcactcccaggagcaggggaaaggataaagcagccagggtcaccatgtaaaggcataagcatggctgtattctgctacattgtattataaaccttatttacagcaagagaaggcatgcctgctctggcctatataatctgca

SEQ ID NO: 361223 - DNA, 3094 bp, Homo sapiens
ttgttaggtaaggctcatcaattgatttgttaaatcacatactaataggtggataattgtgaaaaattgaggaataacaatatacaattcaatgcttttttctttggcttttatgtcaaagccctgttgcatattttctaagtccagatggctcctaaactgaaagttactgtgagatttagctgccgtttgcattttctaaaaacatgaacattcatttatagtcaagtattggggatttttaaacccttacaagatgaggctaaaagttatataacaaaatctgtagctaacttcatatagtattcttcatacatacacacacattgattggcagtgagagagaagggcagtaattgaccgatttagatattaattggtttgttacaatctgtgactctgagctaatcagaaccagaacatgtagttctgaagctgtgtttcagtctgctcattgtaccataattaggaagaactgctttggcaaatcatggaatttgggagcttatataaagggacttcattatcattattctataggaagaactgctttggcaaatcatggaatttgggagcttacgtaaggttacttcattatcattattctaacttatttttccaatgaagaagcagatctgtctggagaggttaagttgaactaaggttttatagaaagctggtggctaaggcagaactaaaggtaactttctaagacccaatctgatatccttgagtcttattgtaggcttttgcctttgttaagcatactccaactaataccccaactaattccaggcaaatggaagtttaatgcaaaagcgtcatggaatacagcagttttctaataatataatttgttatttagaatatacactgtcatgtcatgctatatgtaaaataattaggcaaccattaacaccattattacacagtttgttttgaaaatgtgttaatcctgcctccaacctaaattttgtcaaggggcttctatttctttttttggggggcaggtaatatttctcttggttatgatatgacataatatttaagaactacagattctgtttttcttggcattagtggtgattgggaggaatagaaaagaattacaagcataatattccagcacagttacgtgtgagatgtaaattaaaactgttctataaatttgtaagtttcaaacaagtataactgttaagcaaacacagcaggaaattgtaaactgtttcgtgcaagagggtgttttagggcatttttgccaaggttaggtttcaggctcatagacctactatgtataattatcacaatattttcaagtaaagtttacaagattctttaaatttgggaagtccaaaattaaagacttaattgttatttttttgagacagggtcttgctctgttgcccatgctggagtgcagtggtgtgatttcggcttactgcaacccccgcctcccaggttcaagtgagattcttgtgcttcatccacccaagtagctggattacaggcatgcaccaccatacctggctatttttgtatttttagtagagatggggttagaccatgttggccaggctggtcttgaactcctggcctcaggtggtacacccacctcggcctcccaaagtgttggattacaggcatgagccaccatgcccagccaatatattagaatttctataaatgctgtttgagaagtaacatctttactttctaagagtccaaaaattagcaaacaggtacatgttcaaaggtaaatgctaagaaattgggtaatccactctaacagagaacagagattgtatctattaatctatagaaggaattgcgtaactcattattttgggaataatgcttgtctttacatggattatgtctatcaatctgtagaaggaattgcataattcattattttaggaataatgcttgtctttacatggggcaagtaagaggttaattattagtgtggattcttcttaaaaggaaattagaaattatctacatgacaacatatcctccctaccagtgactaaaggaggcagaataggagtatctatgcaagcttttaacactgacattgtcccaaagtaaaattagcagataaaatcatatatgacagctgttagtataatttttgcttttgctattgttttataatttgacaactttttaaaactttagaattcctaatgtcttgtcttaaaagtttttcaggctgggcatggtggctcaagcctgtaatctcaacatgtttagaccaagacaggaggattgcttgaggccaggaatttgaaattgtcctgggcaccgtagcgagactctgctttctacaaaaataattaaaaaaaaaaaaaaattgccaggtatggtgatgtgcacctgtagtcctaactactctaagcctgaggcaagagaattgtttgatcccaggggttcaaggttgcagtgagctgtgattgtgggccactgcactccagcctgggtgacagagcaaaaccctatctcaaagaaaacaaagaaaaaaggaaaaaagaaaacctttccagtgttctattatagacattttcattgatcaataagtcactttttctctagtgcaatggattcttatttttatgtgaatcatcaacaaaatcaatgcaaccaacttaggctgttctgtttaaataaattaagaaatgagggtgtgtgaagttctaaaattgtacagaactatgcttatataaaaagtttatttctactcctgtggtatttcagaaattcttaagattcctgaggatactactttctctaagtatcaaatgaccactagcctggaataataaatagtaagcaagacagtaaatactacagataaacaacattttcccaaagttaatccacattctaaattgggaaaagtgagtaatacattcaagaagcagatatatatattcttaaaatacgatgctttggcttactgttttcttaaagctttctgtgtctgggctttcttttattggtttagagtgaattttatgggttctatgagtactaaaaattctgtttatatatattgttttaatgtaacacattatataggtgttttctaaaa

SEQ ID NO: 361224 - DNA, 1442 bp, Homo sapiens
cgcgcggaccggggcggggcgggcggtgccccgggctgggcgaggggccgggtgcggggccgctggccgagaggctgaggcggcgtcatgtcctccgaggtgtccgcgcgccgcgacgccaagaagctggtgcgctccccgagcggcctgcgcatggtgcccgaacaccgcgccttcggaagcccgttcggcctggaggagccgcagtgggtcccggacaaggagtgtcggagatgtatgcagtgtgacgccaagtttgactttctcaccagaaagcaccactgtcgccgctgcgggaagtgcttctgcgacaggtgctgcagccagaaggtgccgctgcggcgcatgtgctttgtggaccccgtgcggcagtgcgcggagtgcgccctggtgtccctcaaggaggcggagttctacgacaagcagctcaaagtgctcctgagcggagccaccttcctcgtcacgtttggaaactcagagaaacctgaaactatgacttgtcgtctttccaataaccagagatacttgtttctggatggagacagccactatgaaatcgaaattgtacacatttccaccgtgcagatcctcacagaaggcttccctcctggaggaggcaacgcacgggccacaggcatgttcctgcagtatacagtgccggggacggagggtgtgacccagctgaagctgacagtggtggaggacgtgactgtgggcaggaggcaggcggtggcgtggctagtggccatgcacaaggctgccaagctcctctatgaatctcgggaccagtaactctacgtggggctgagcttggagtacgtgtggtcaccaggactgagtcgcttggaacagcagagcctgctccttgcgtaccacagggattaatcctgcttgtgctgggaaatgcaactcactcatgtatttggagaaacaggagtgttcacttatctagtgcaatatgttcacagtttattaatgctttaaacagcttcatgttttagaatttgtgtattgtcaatacttaattgggggtgggagagactgagctacactactgctaaactatttttagcataatatataccatttttatgagttcgcaggtctactagaaggttctggcccatcaatattcatttcatttaattcttccacagaaccagtttgggcagtaggaactcaggcttctggtctgcagtggagcctgttcgcctctaatagccagtttacagcacttgccttagcctgtttcacagacttgtccacttaccttgtcactaatttggggcttctgggctgtgagtgatcctttgatacttcaccaaggggaacgtgggggctttgtgttttgtacttttcactcactatttcactttattaagatgactgtacagcaatttgtatataaagcttatgattaaaaactattttgaacatacgga

SEQ ID NO: 361225 - DNA, 2018 bp, Homo sapiens
ctctactaacaatacaaaaaaaaaaaaaaatagctgggcgtagaggtacacgcctgtaatcccagctactcaggaggctgaggcaggagaatcacttgaacccgggaggcggagggtgcagagccgagatcgcaccactgctctctagcctgggcaacaagagcaaagactccgtctcggaaaaaaaaaatgtggttccggggcctcccaggggacagcgtgtcataggttgctcaggcctccaagcacggtcggtgggcctccgactgcagccttggtgcccactccaccaaccggcagaagagccggccctgagtgctgatggggggatgtgtgtctgatggaggggtctcctgagaggtcagtgattgcctacgatggggcttccctcccaagtcatcaagttcatgggaggctgcatcccatgggtctctttcaacaccagccctgactgaagagctgctctcttcagcagtgtattgttggagcgagtgctggaattgagtcattgtcactggaacagctggtcaccgcccaaagacggggagcctgggtcccagagaccagtccccaacatgggtgctgggtctggggagatggcccgtgaccaggctggggtggcatttccctgacactgggcctttgtagtgacaatcccctctgtgctgacgccgcttctcaacggtgggatggctgaggcctctgactcctgggtgaggccagctgtgtccctgaccatctgcttggcctgtcagtggccagggcactctcgaggtggcctccactcttcccccagccctgggtgcaggtgggcacctctgcaggagccagtcttgtctggaggttctctgaaggcaggaacccccacaggccccagggcatagcagcgcctcaattagccgagagcaaggcctctcgtggtgatgtggctcttgttgtttgtcccgggccctggggcacccggctgagtgtcttggtccctctcccaccccacctgtgagcttggggtctcccctcagaggcctgaggagatggtgttccctgggtgctcctgagcaccagccctcactgccaggctactcttggagcagcacaaggttaggatgtgctggccaccgccttggggctggtggccgcctgggcactcagggcctcctttgggccgtcttacctcgtctctctcctccaggaggcaacgcacgggccacaggcatgttcctgcagtatacagtgccggggacggagggtgtgacccagctgaagctgacagtggtggaggacgtgactgtgggcaggaggcaggcggtggcgtggctagtggccatgcacaaggctgccaagctcctctatgaatctcgggaccagtaactctacgtggggctgagcttggagtacgtgtggtcaccaggactgagtcgcttggaacagcagagcctgctccttgcgtaccacagggattaatcctgcttgtgctgggaaatgcaactcactcatgtatttggagaaacaggagtgttcacttatctagtgcaatatgttcacagtttattaatgctttaaacagcttcatgttttagaatttgtgtattgtcaatacttaattgggggtgggagagactgagctacactactgctaaactatttttagcataatatataccatttttatgagttcgcaggtctactagaaggttctggcccatcaatattcatttcatttaattcttccacagaaccagtttgggcagtaggaactcaggcttctggtctgcagtggagcctgttcgcctctaatagccagtttacagcacttgccttagcctgtttcacagacttgtccacttaccttgtcactaatttggggcttctgggctgtgagtgatcctttgatacttcaccaaggggaacgtgggggctttgtgttttgtacttttcactcactatttcactttattaagatgactgtacagcaatttgtatataaagcttatgattaaaaactattttgaacatacgga

SEQ ID NO: 361226 - DNA, 630 bp, Homo sapiens
gacatttgcctcagcatgtcataatgatttcctctgctctaaatgctctaacgtatcattcggtttattgttggattcaaaccaaggataaagccccaaatgcaataactgagatccccaaaaaggtctgaatggtggctcatcgggagccagcacttcagccctcctcctgcaggcgtctgtgcagactaaacccctggtgcatttcctggtgagctttggcccatcctgggcctctccactaaactctgctgacggggagctcgcatcccgttatctgcaaactgtgctgacagatgcgtgtgccgtaacccatgttgctttccttccgttctctcaccggctcttggttgctccttctcgccactgcctgcccaccttcttgccatagaaaaagacattcacgcttacaccagcctccgggggagccagcctgcctctgaaggtcagcctcttcctcctcaccggggctccccgcatgcagcgggcccgttcctcccctcgccacctggcttctgtccacggggtggtccatgccaaggttctttgtgaaacctgaattcacttactttggttgacttaagagagatgttggatctgataagtgggtttataaagcataaatgaaga

SEQ ID NO: 361227 - DNA, 1629 bp, Homo sapiens
cgcgcggaccggggcggggcgggcggtgccccgggctgggcgaggggccgggtgcggggccgctggccgagaggctgaggcggcgtcatgtcctccgaggtgtccgcgcgccgcgacgccaagaagctggtgcgctccccgagcggcctgcgcatggtgcccgaacaccgcgccttcggaagcccgttcggcctggaggagccgcagtgggtcccggacaaggagtgtcggagatgtatgcagtgtgacgccaagtttgactttctcaccagaaaggtgaggcggatccccgctgcgtggtggggagcccaggggctggcgacaggaggtgcgcgtgtgcagcggccggcacaggggcctcgcgtttaggcgtggcccggggagtgccaggccagccggggccacacccggggccgcttgttccctgcccctcctcactgccaatcctcccgcatctgcccagcaccactgtcgccgctgcgggaagtgcttctgcgacaggtgctgcagccagaaggtgccgctgcggcgcatgtgctttgtggaccccgtgcggcagtgcgcggagtgcgccctggtgtccctcaaggaggcggagttctacgacaagcagctcaaagtgctcctgagcggagccaccttcctcgtcacgtttggaaactcagagaaacctgaaactatgacttgtcgtctttccaataaccagagatacttgtttctggatggagacagccactatgaaatcgaaattgtacacatttccaccgtgcagatcctcacagaaggcttccctcctggaggaggcaacgcacgggccacaggcatgttcctgcagtatacagtgccggggacggagggtgtgacccagctgaagctgacagtggtggaggacgtgactgtgggcaggaggcaggcggtggcgtggctagtggccatgcacaaggctgccaagctcctctatgaatctcgggaccagtaactctacgtggggctgagcttggagtacgtgtggtcaccaggactgagtcgcttggaacagcagagcctgctccttgcgtaccacagggattaatcctgcttgtgctgggaaatgcaactcactcatgtatttggagaaacaggagtgttcacttatctagtgcaatatgttcacagtttattaatgctttaaacagcttcatgttttagaatttgtgtattgtcaatacttaattgggggtgggagagactgagctacactactgctaaactatttttagcataatatataccatttttatgagttcgcaggtctactagaaggttctggcccatcaatattcatttcatttaattcttccacagaaccagtttgggcagtaggaactcaggcttctggtctgcagtggagcctgttcgcctctaatagccagtttacagcacttgccttagcctgtttcacagacttgtccacttaccttgtcactaatttggggcttctgggctgtgagtgatcctttgatacttcaccaaggggaacgtgggggctttgtgttttgtacttttcactcactatttcactttattaagatgactgtacagcaatttgtatataaagcttatgattaaaaactattttgaacatacgga

SEQ ID NO: 361228 - DNA, 1775 bp, Homo sapiens
cgcgcggaccggggcggggcgggcggtgccccgggctgggcgaggggccgggtgcggggccgctggccgagaggctgaggcggcgtcatgtcctccgaggtgtccgcgcgccgcgacgccaagaagctggtgcgctccccgagcggcctgcgcatggtgcccgaacaccgcgccttcggaagcccgttcggcctggaggagccgcagtgggtcccggacaaggagtgtcggagatgtatgcagtgtgacgccaagtttgactttctcaccagaaagcaccactgtcgccgctgcgggaagtgcttctgcgacaggtgctgcagccagaaggtgccgctgcggcgcatgtgctttgtggaccccgtgcggcagtgcgcggagtgcgccctggtgtccctcaaggaggcggagttctacgacaagcagctcaaagtgctcctgagcggagccaccttcctcgtcacgtttggaaactcagagaaacctgaaactatgacttgtcgtctttccaataaccagagatacttgtttctggatggagacagccactatgaaatcgaaattgtacacatttccaccgtgcagatcctcacagaaggcttccctcctggaggaggcaacgcacgggccacaggcatgttcctgcagtatacagtgccggggacggagggtgtgacccagctgaagctgacagtggtggaggacgtgactgtgggcaggaggcaggcggtggcgtggctagtggccatgcacaaggctgccaagctcctctatgaatctcgggaccagtaactctacgtggggctgagcttggagtacgtgtggtcaccaggactgagtcgcttggaacagcagagcctgctccttgcgtaccacagggattaatcctgcttgtgctgggaaatgcaactcactcatgtatttggagaaacaggagtgttcacttatctagtgcaatatgttcacagtttattaatgctttaaacagcttcatgttttagaatttgtgtattgtcaatacttaattgggggtgggagagactgagctacactactgctaaactatttttagcataatatataccatttttatgagttcgcaggtctactagaaggttctggcccatcaatattcatttcatttaattcttccacagaaccagtttgggcagtaggaactcaggcttctggtctgcagtggagcctgttcgcctctaatagccagtttacagcacttgccttagcctgtttcacagacttgtccacttaccttgtcactaatttggggcttctgggctgtgagtgatcctttgatacttcaccaaggggaacgtgggggctttgtgttttgtacttttcactcactatttcactttattaagatgactgtacagcaatttgtatataaagcttatgattaaaaactattttgaacatacggacaaggcctcgccttcctgtgtccagatcacctgaaccctcgtgccacagcgcagtctgggtccagaaagaagactcacagccgccggggtgagacgggtttattgtgcacatttacacagcgtcagcagcgtctgggctggcagcggccatgctcctgtggtcgggctgctctacaagggcgttcacttttcttcaccacactatgtacagtcagtgctccaaggtgatgggctacagtgctgcatcagtgagtctgtacacacatttttacataaattacacacgactcatacatgaaaaatagagcctaagggcctgtattttaatgagaa

SEQ ID NO: 361229 - DNA, 1496 bp, Homo sapiens
cgcgcggaccggggcggggcgggcggtgccccgggctgggcgaggggccgggtgcggggccgctggccgagaggctgaggcggcgtcatgtcctccgaggtgtccgcgcgccgcgacgccaagaagctggtgcgctccccgagcggcctgcgcatggtgcccgaacaccgcgccttcggaagcccgttcggcctggaggagccgcagtgggtcccggacaaggagtgtcggagatgtatgcagtgtgacgccaagtttgactttctcaccagaaagcaccactgtcgccgctgcgggaagtgcttctgcgacaggtgctgcagccagaaggtgccgctgcggcgcatgtgctttgtggaccccgtgcggcagtgcgcggagtgcgccctggtgtccctcaaggaggcggagttctacgacaagcagctcaaagtgctcctgagcggagccaccttcctcgtcacgtttggaaactcagagaaacctgaaactatgacttgtcgtctttccaataaccagagatacttgtttctggatggagacagccactatgaaatcgaaattgtacacatttccaccgtgcagatcctcacagaaggcttccctcctggagaaaaagacattcacgcttacaccagcctccgggggagccagcctgcctctgaaggaggcaacgcacgggccacaggcatgttcctgcagtatacagtgccggggacggagggtgtgacccagctgaagctgacagtggtggaggacgtgactgtgggcaggaggcaggcggtggcgtggctagtggccatgcacaaggctgccaagctcctctatgaatctcgggaccagtaactctacgtggggctgagcttggagtacgtgtggtcaccaggactgagtcgcttggaacagcagagcctgctccttgcgtaccacagggattaatcctgcttgtgctgggaaatgcaactcactcatgtatttggagaaacaggagtgttcacttatctagtgcaatatgttcacagtttattaatgctttaaacagcttcatgttttagaatttgtgtattgtcaatacttaattgggggtgggagagactgagctacactactgctaaactatttttagcataatatataccatttttatgagttcgcaggtctactagaaggttctggcccatcaatattcatttcatttaattcttccacagaaccagtttgggcagtaggaactcaggcttctggtctgcagtggagcctgttcgcctctaatagccagtttacagcacttgccttagcctgtttcacagacttgtccacttaccttgtcactaatttggggcttctgggctgtgagtgatcctttgatacttcaccaaggggaacgtgggggctttgtgttttgtacttttcactcactatttcactttattaagatgactgtacagcaatttgtatataaagcttatgattaaaaactattttgaacatacgga

SEQ ID NO: 361230 - DNA, 1222 bp, Homo sapiens
cgcgcggaccggggcggggcgggcggtgccccgggctgggcgaggggccgggtgcggggccgctggccgagaggctgaggcggcgtcatgtcctccgaggtgtccgcgcgccgcgacgccaagaagctggtgcgctccccgagcggcctgcgcatggtgcccgaacaccgcgccttcggaagcccgttcggcctggaggagccgcagtgggtcccggacaaggaggagccaccttcctcgtcacgtttggaaactcagagaaacctgaaactatgacttgtcgtctttccaataaccagagatacttgtttctggatggagacagccactatgaaatcgaaattgtacacatttccaccgtgcagatcctcacagaaggcttccctcctggaggaggcaacgcacgggccacaggcatgttcctgcagtatacagtgccggggacggagggtgtgacccagctgaagctgacagtggtggaggacgtgactgtgggcaggaggcaggcggtggcgtggctagtggccatgcacaaggctgccaagctcctctatgaatctcgggaccagtaactctacgtggggctgagcttggagtacgtgtggtcaccaggactgagtcgcttggaacagcagagcctgctccttgcgtaccacagggattaatcctgcttgtgctgggaaatgcaactcactcatgtatttggagaaacaggagtgttcacttatctagtgcaatatgttcacagtttattaatgctttaaacagcttcatgttttagaatttgtgtattgtcaatacttaattgggggtgggagagactgagctacactactgctaaactatttttagcataatatataccatttttatgagttcgcaggtctactagaaggttctggcccatcaatattcatttcatttaattcttccacagaaccagtttgggcagtaggaactcaggcttctggtctgcagtggagcctgttcgcctctaatagccagtttacagcacttgccttagcctgtttcacagacttgtccacttaccttgtcactaatttggggcttctgggctgtgagtgatcctttgatacttcaccaaggggaacgtgggggctttgtgttttgtacttttcactcactatttcactttattaagatgactgtacagcaatttgtatataaagcttatgattaaaaactattttgaacatacgga

SEQ ID NO: 361231 - DNA, 1110 bp, Homo sapiens
gtttctcctgggccttgaaaggaattgaaggatttaaatgtttgaatgtggtggtaagatggctactgtaggtggaagatgactcaccctttaccttgaaaggatgaaggagaaaccctgattgaggtctaagaaaaaacaatcatgacctgcggaaggctttggccagagctgtagagtgcatgagggtgagaacggggagatcccgtgaaaaggtaatacatcggctttcatatgttttaggcatgagatgagctgaatcctgatatgatttgagttagtcttcccatgacctgatggaagagctgttatctccatttaagaaaagtgaagctgcccaggtgtggtggctcacatctgtaatcccagcactgtgggaggctgaggcaggaggatcacttgagcttgggagtttgaggccagcctgggtaacatagcgagaccccatctcaataaaatagaataaaaaaaagaaaaaaaaatgaagctgagagtttatttagccagggtcacacagctggaaagtagctagtgtggaccttggcctgagatgtgatctgtctagctatgatacaacactgcttcacagataaagtaccagcttcaggaattggaagttattgatttttcttggataacatgggcacatttcagtcatatttgaattttaatttagttggattctcacttatttgtaaagctaaccggtttgtattggaaatattataaatattctgggaatctcaaatgttgattttatactagctttttagttatttaagataaatttacattttattctattaacatctctttgaaaagacgtagtgcttttttaggttgtctatttatgtgtgtatgtgagacatttcctcttgggggattctctgagactcacatttctgtagaagcttttttcagatatacttatgaaaatctgttctctgttttgagaaatcttgaaagctatgatatgttgcaactagacactctagcttcattgattggaggctaagggttcccgtatttgtgggcagtaacaacaaaattgacaatttattttgtgtaaagtatttcaaatgtcagttatttctagaggttttttttctt

SEQ ID NO: 361232 - DNA, 226 bp, Homo sapiens
gagtgagttttgatgctataatcctggatcttctacttcctagcattggaaacttgggcaaccgaactctgtgccattttattatgtgaaatgggtatttttttattaaatagttatgccacagagattttttgtgaagattaaatgtttagtatatatacagtccaaaaacctgtaattggcacatggtaaatagttaataaacatgcatcgttgttattgttaa

SEQ ID NO: 361233 - DNA, 620 bp, Homo sapiens
accaatgatttacggaatttcggagcttcggtacgccctttggacgtaagacgcatggtacagtagtcctcatcacaaccatgccacactggtgagccaccagctacctccagggttactctgaggacccaatgagcaaatacttataaaagcactttgaaaactgccttatcaatgtaagtggttgggtctacaaacatacccaattcctctagtgggatttgatctacaaaaatcaagagataagcacattttttttctgagatatgttattgacattaagccacctctcctgtctaacttaatggatggataatgctttatcagttgggacctacatgtgtgatttcctcatgcattgtcaattccaataaggatatatcatcatgaatggtttctttaggatccagttttattgctgacatcctcagtaacagccaaaaggtcgttttcagagatctaagctggagcatgatggtcaaggatacccctaaggactgtgtgcacatcattattaatggacttttcccaccatgttatttattggttgatgtatctgtcactcccagctgggacacaggggccttaaggagagagaatctcctgccccaggcctggca

SEQ ID NO: 361234 - DNA, 399 bp, Homo sapiens
ttgagagtgagtctcccattgtcctgtgcctctcctggcccaggtgtgttaccgggtactgatgcagctctgctcacactatgggcagcctgtgctgtctgtgcgggtcatgctggagatgcgtcaggcaggcattgtgcccaacaccatcacctatggctactacaataaggtacctactttggggtgaggggtgggatggcagctgtgccagggtgtgtgaggggaggctgctgctgctcccctcgctccttggagattgggctggtactgtttgcctaggtcctggaaccactgtcatccacattgcactcctgtggtgccttagcacctacagtttctcagacgaggctgctttgattcccactcatgacagccctgcctacaactaatagtgtc

SEQ ID NO: 361235 - DNA, 5909 bp, Homo sapiens
cgccggccgaggaggaggggtgggggtagcggcggcgcccgcggcccggagcgggggttgggggagtagagaaagcggggcgcgcggaggaacgctgggtccccggcgccgcgggagctgggaggaccgagccggccgagcgagcagcgcggcagcacagtccccgcgtggcgcagcgcggcggggacgcggggaccgcccggatctccttccactgcgccccgcgctctgcggtcctcggccgcctcttcttccttcactcactgcccgggcgggagcggcgcccaagtcgggtgcgccatgtctggggccgggtagccccgccgcccgccggcccgccagctcgccctccgagccacccgccagcgggccggccggccgggaagcgcgggacaggcagatgcagtgagtgaggggggggccatggcggaggagcggcccccccggctggtggattacttcgtggtagctgggcttgcagggaacggagcacccatccctgaggaaacgtgggttcctgaacccagtgggcccctgcgccctccccggccagctgagcccatcacagatgtggcagtcatcgctagggcactgggcgaggaagtgccccagggctacacatgcatccaggcttctgctgggggccaccccttggaactcagtgctggacttctgggtggaactcaacccgtcatctgctaccgcaggggccgtgacaagccccccctcgttgagctgggggtgttgtatgaggggaaggaacgtcccaagcctggcttccaagtgcttgacacgacaccctacagccactcagcaaacctggcccctccaggccccgggcacccccgcacctacctcacttaccggcgggcagcagagggggcagggctgcatgccctgggcatcactgacctctgcctggtgctgcccagtaagggcgagggcactcctcatacttactgccggctgccccgcaacctcaaccctggcatgtggggcccagcagtgtacctgtgctataaggtgggcctggcgaaggccaacacgctggtgtacgaggcaggtgagtggcccctttatccctccaatcctgtgaccctacatccctttgccctggtgcctcttggcaggcaccttaagtgtccccagagtttactttctctttgctactcgggccttctctgggatcccttggttcatttcccttggagtctgatggaccctgctccttttgggtacccccaactatgctgggggtgcagagctgctgggccgctacccggaggaggacaatgaggcgttcccgctgcccgagtcagtgcccgtcttctgcctgcccatgggggccactatcgagtgctggcctgcccagaccaagtaccccgtgcccgtcttctccacctttgtgctcacgggtgcagctggtgataaggtgtatggtgccgccctgcagttctacgaggcgttcccaagggccaggctatcagagcgacaggcacgggcactgggcctgctgagcgccgtggagcggggtcgggcactggggggcagagctgtgcgcagccggcgtgccatcgctgtgctgtcccgctggcctgccttccctgccttccgcgccttcctcaccttcctttaccgctactccgtctcaggcccccaccgcctacccttggaagcgcacatctcccacttcattcacaacgttcccttcccttccccacagagaccccgcatcctagtgcagatgtctccctatgacaacttgctcctctgtcagcctgtatcctcacccctgcccctcagtggtgccagcttcctgcagctgctgcagagcctgggccctgagctggctatcacactgctgctggctgtgctcacagagcacaagctgctagtccactcgctgcggccagacctgctcaccagcgtctgtgaggccctcgtctcgatgatcttcccactgcactggcagtgcccctacattcctctgtgcccgctggtgctggcagatgtgctgagtgccccagtgcccttcattgtgggtatccactccagctactttgatctgcatgacccgcctgctgatgtcatctgtgtagaccttgataccaacacgctcttccagactgaggaaaagaagctcctctcccctcggaccctgccccgcagaccctacaaggttctgctggccacactgacaaacctgtaccagcagctggaccagacatacactggacctgaggaggaagcatccctggagttcctactgacagactacgaggcagtgtgtggccgcagggcccggctggagcgcgaagtccaaggagccttcctccgcttcatggcctgtctgctcaagggctaccgggtcttcctgcgcccactcacccaggccccctccgagggagctcgtgatgttgacaaccttttcttcctgcagggcttcctcaaatcccgggaacgctccagccacaaactttactctcagctgctgcacacacagatgttctcacagttcattgaggagtgctcttttggctctgctcgccatgctgcccttgaattctttgactcttgtgttgaaaaggtccacccagagcaggagaagcctgagccgacacccttagtggagctagaggagctgtcaggaagtgagctcactgtctttatcacacctcccgaggagcctgccttaccagagggcagtgaatccactccccagtactgctatgatggattcccagagctacgggctgagttgtttgagtctcttcaagagcaacctggggccctgcctgtgccaggcccttcccgtagcgcccccagcagtcctgctcctcgccgtaccaaacaggagatgaaagttgcacagcggatggcacagaagtcagcagctgtgcctgagctgtgggcccggtgcctgctggggcactgctatgggctgtggttcctgtgtctgcctgcctatgtgcggtcggcaccctcccgagtgcaggcactgcacacagcctaccatgtgctgcgccagatggagagcggcaaggtggtgctccctgatgaggtgtgttaccgggtactgatgcagctctgctcacactatgggcagcctgtgctgtctgtgcgggtcatgctggagatgcgtcaggcaggcattgtgcccaacaccatcacctatggctactacaataaggctgtgttggaaagcaagtggccgtctggcacaccaggtgggcgtctgcgctgggccaagctccggaatgttgtcctgggggctgctcagttccgccagcccttgagagaacggcaacagcagcagcagcagcagcaacagcagcagcagcagcagcagcagcaggagcaggtgtcagcacatcaagaggcaggcagctcccaggcagagccctatttggagcgcccttcccctactcgccctcttcagcgccagactacttgggctgggcgaagtctgagagacccagcctcaccccctggacgcctggtgaagagtggtagcctgggcagtgcccgaggggcacagcccactgtggaggccggtgtggcccacatgatagaggccttgggggtcctggaaccccggggatcacctgtgccctggcacgatggaagtctctcagacctgagcctgacaggggaggagccgctccctggaggcagcccagggggctcaggctcagccctgagtgcccagtccactgaggccctggaagggctaagtgggcggggacccaaggctggtgggcgacaggatgaggcaggcaccccccgacgagggctgggtgcccgcctccaacagctgctcactccttcccgccactcccctgcctcccgcattcccccacctgagctgcctcctgacctgccacccccagcccgccgcagccccatggacagtcttctgcacccccgggagcgccctggatccactgcctccgagagctcagcctctctgggcagtgagtgggacctctcagaatcttctctcagcaacctgagtcttcgccgttcctcagagcgcctcagtgacacccctggatccttccagtcaccttccctggaaattctgctgtccagctgctccctgtgccgtgcctgtgattcgctggtgtatgatgaggaaatcatggctggctgggcacctgatgactctaacctcaacacaacctgccccttctgcgcctgcccctttgtgcccctgctcagtgtccagacccttgattcccggcccagtgtccccagccccaaatctgctggtgccagtggcagcaaagatgctcctgtccctggtggtcctggccctgtgctcagtgaccgaaggctctgccttgctctggatgagccccagctctgcaacgggcacatggggggagcctcccggcgggttgagagtggggcatgggcatacctgagccccctggtgctgcgtaaggagctggagtcgctggtagagaacgagggcagtgaggtgctggcgttgcctgaactgccctctgcccaccccatcatcttctggaaccttttgtggtatttccaacggctacgcctgcccagtattctaccaggcctggtgctggcctcctgtgatgggccttcgcactcccaggccccatctccttggctaacccctgatccagcctctgttcaggtacggctgctgtgggatgtactgacccctgaccccaatagctgcccacctctctatgtgctctggagggtccacagccagatcccccagcgggtggtatggccaggccctgtacctgcatcccttagtttggcactgttggagtcagtgctgcgccatgttggactcaatgaagtgcacaaggctgtggggctcctgctggaaactctagggcccccacccactggcctgcacctgcagaggggaatctaccgtgagatattattcctgacaatggctgctctgggcaaggaccacgtggacatagtggccttcgataagaagtacaagtctgcctttaacaagctggccagcagcatgggcaaggaggagctgaggcaccggcgggcgcagatgcccactcccaaggccattgactgccgaaaatgttttggagcacctccagaatgctagagaccttaagcttccctctccagcctagggtggggaagtgaggaagaagggattctagagttaaactgcttccctgttgccttcatggagttgggaacaggctgggaaggatgcccagtcaaaggctccaagcgaggacaacaggaagagggatccactgttaccaaaagtcctgattcccccatcaccaacctacccagtttgttcgtgctgatgttgggggagatctggggggagttggtacagctctgttcttcccttgtcctataccgggaactcccctccagggtacccacagatctgcattgccctggtcattttagaagtttttgttttaaaaaacaactggaaagatgcagagctactgagcctttgccctgaatgggaggtagggatgtcattctccaccaataatggtccctcttccctgacgttgctgaaggagcccaaggctctccatgcctttctacctaagtgtttgtattttattttaaattatttattctggagccacagcccccttgcttatgaggttcttatggagagtgagaaagggaagggaaatagggcaccatggtccggtggtttgtagttccttcaaagtcaggcactgggagctagaggagtctcaagctccccttaggaagaactggtgccccctccagtcctaatttttcttgcctgccccgccttggggaatgcctcacccacccaggtcctgacctgtgcaataaggattgttccctgcgaagttttgttggatgtaaatatagtaaaagctgcttctgtcttt

SEQ ID NO: 361236 - DNA, 6190 bp, Homo sapiens
cgccggccgaggaggaggggtgggggtagcggcggcgcccgcggcccggagcgggggttgggggagtagagaaagcggggcgcgcggaggaacgctgggtccccggcgccgcgggagctgggaggaccgagccggccgagcgagcagcgcggcagcacagtccccgcgtggcgcagcgcggcggggacgcggggaccgcccggatctccttccactgcgccccgcgctctgcggtcctcggccgcctcttcttccttcactcactgcccgggcgggagcggcgcccaagtcgggtgcgccatgtctggggccgggtagccccgccgcccgccggcccgccagctcgccctccgagccacccgccagcgggccggccggccgggaagcgcgggacaggcagatgcagtgagtgaggggggggccatggcggaggagcggcccccccggctggtggattacttcgtggtagctgggcttgcagggaacggagcacccatccctgaggaaacgtgggttcctgaacccagtgggcccctgcgccctccccggccagctgagcccatcacagatgtggcagtcatcgctagggcactgggcgaggaagtgccccagggctacacatgcatccaggcttctgctgggggccaccccttggaactcagtgctggacttctgggtggaactcaacccgtcatctgctaccgcaggggccgtgacaagccccccctcgttgagctgggggtgttgtatgaggggaaggaacgtcccaagcctggcttccaagtgcttgacacgacaccctacagccactcagcaaacctggcccctccaggccccgggcacccccgcacctacctcacttaccggcgggcagcagagggggcagggctgcatgccctgggcatcactgacctctgcctggtgctgcccagtaagggcgagggcactcctcatacttactgccggctgccccgcaacctcaaccctggcatgtggggcccagcagtgtacctgtgctataaggtgggcctggcgaaggccaacacgctggtgtacgaggcagagctgctgggccgctacccggaggaggacaatgaggcgttcccgctgcccgagtcagtgcccgtcttctgcctgcccatgggggccactatcgagtgctggcctgcccagaccaagtaccccgtgcccgtcttctccacctttgtgctcacgggtgcagctggtgataaggtgtatggtgccgccctgcagttctacgaggcgttcccaagggccaggctatcagagcgacaggcacgggcactgggcctgctgagcgccgtggagcggggtcgggcactggggggcagagctgtgcgcagccggcgtgccatcgctgtgctgtcccgctggcctgccttccctgccttccgcgccttcctcaccttcctttaccgctactccgtctcaggcccccaccgcctacccttggaagcgcacatctcccacttcattcacaacgttcccttcccttccccacagagaccccgcatcctagtgcagatgtctccctatgacaacttgctcctctgtcagcctgtatcctcacccctgcccctcaggtatgtgatcagattgtggggaggggagcctttaatgaccaaggacatggtaggtgctgggcaggtgggtgcagctgttgaggtttatgcaggctgggtccaggtggtggctgtgcctggcatctggggaagggtccccagggtatcctggtgaccctttccccacctcggcattgcctgcagtggtgccagcttcctgcagctgctgcagagcctgggccctgagctggctatcacactgctgctggctgtgctcacagagcacaagctgctagtccactcgctgcggccagacctgctcaccagcgtctgtgaggccctcgtctcggtgagtgccgccccgcctggcccatcttccccagaaccatggttctttctggtgcccctatccctgcctggactcttcccttttccttccttgtggaggatcctcagcccctttccctgggcacagcctgcaggaacacatagcttccatcaggagctcttctctagagcctacttccaacagcctctctcaacaggcaccaactccccaaggccaatgccctctctttctctctcctgtgcctcccactgctgcctcaaccccctgttcactggttctcactgcctggtgcttcagatgatcttcccactgcactggcagtgcccctacattcctctgtgcccgctggtgctggcagatgtgctgagtgccccagtgcccttcattgtgggtatccactccagctactttgatctgcatgacccgcctgctgatgtcatctgtgtagaccttgataccaacacgctcttccagactgaggaaaagaagctcctctcccctcggaccctgccccgcagaccctacaaggttctgctggccacactgacaaacctgtaccagcagctggaccagacatacactggacctgaggaggaagcatccctggagttcctactgacagactacgaggcagtgtgtggccgcagggcccggctggagcgcgaagtccaaggagccttcctccgcttcatggcctgtctgctcaagggctaccgggtcttcctgcgcccactcacccaggccccctccgagggagctcgtgatgttgacaaccttttcttcctgcagggcttcctcaaatcccgggaacgctccagccacaaactttactctcagctgctgcacacacagatgttctcacagttcattgaggagtgctcttttggctctgctcgccatgctgcccttgaattctttgactcttgtgttgaaaaggtccacccagagcaggagaagcctgagccgacacccttagtggagctagaggagctgtcaggaagtgagctcactgtctttatcacacctcccgaggagcctgccttaccagagggcagtgaatccactccccagtactgctatgatggattcccagagctacgggctgagttgtttgagtctcttcaagagcaacctggggccctgcctgtgccaggcccttcccgtagcgcccccagcagtcctgctcctcgccgtaccaaacaggagatgaaagttgcacagcggatggcacagaagtcagcagctgtgcctgagctgtgggcccggtgcctgctggggcactgctatgggctgtggttcctgtgtctgcctgcctatgtgcggtcggcaccctcccgagtgcaggcactgcacacagcctaccatgtgctgcgccagatggagagcggcaaggtggtgctccctgatgaggtgtgttaccgggtactgatgcagctctgctcacactatgggcagcctgtgctgtctgtgcgggtcatgctggagatgcgtcaggcaggcattgtgcccaacaccatcacctatggctactacaataaggctgtgttggaaagcaagtggccgtctggcacaccaggtgggcgtctgcgctgggccaagctccggaatgttgtcctgggggctgctcagttccgccagcccttgagagaacggcaacagcagcagcagcagcagcaacagcagcagcagcagcagcagcagcaggagcaggtgtcagcacatcaagaggcaggcagctcccaggcagagccctatttggagcgcccttcccctactcgccctcttcagcgccagactacttgggctgggcgaagtctgagagacccagcctcaccccctggacgcctggtgaagagtggtagcctgggcagtgcccgaggggcacagcccactgtggaggccggtgtggcccacatgatagaggccttgggggtcctggaaccccggggatcacctgtgccctggcacgatggaagtctctcagacctgagcctgacaggggaggagccgctccctggaggcagcccagggggctcaggctcagccctgagtgcccagtccactgaggccctggaagggctaagtgggcggggacccaaggctggtgggcgacaggatgaggcaggcaccccccgacgagggctgggtgcccgcctccaacagctgctcactccttcccgccactcccctgcctcccgcattcccccacctgagctgcctcctgacctgccacccccagcccgccgcagccccatggacagtcttctgcacccccgggagcgccctggatccactgcctccgagagctcagcctctctgggcagtgagtgggacctctcagaatcttctctcagcaacctgagtcttcgccgttcctcagagcgcctcagtgacacccctggatccttccagtcaccttccctggaaattctgctgtccagctgctccctgtgccgtgcctgtgattcgctggtgtatgatgaggaaatcatggctggctgggcacctgatgactctaacctcaacacaacctgccccttctgcgcctgcccctttgtgcccctgctcagtgtccagacccttgattcccggcccagtgtccccagccccaaatctgctggtgccagtggcagcaaagatgctcctgtccctggtggtcctggccctgtgctcagtgaccgaaggctctgccttgctctggatgagccccagctctgcaacgggcacatggggggagcctcccggcgggttgagagtggggcatgggcatacctgagccccctggtgctgcgtaaggagctggagtcgctggtagagaacgagggcagtgaggtgctggcgttgcctgaactgccctctgcccaccccatcatcttctggaaccttttgtggtatttccaacggctacgcctgcccagtattctaccaggcctggtgctggcctcctgtgatgggccttcgcactcccaggccccatctccttggctaacccctgatccagcctctgttcaggtacggctgctgtgggatgtactgacccctgaccccaatagctgcccacctctctatgtgctctggagggtccacagccagatcccccagcgggtggtatggccaggccctgtacctgcatcccttagtttggcactgttggagtcagtgctgcgccatgttggactcaatgaagtgcacaaggctgtggggctcctgctggaaactctagggcccccacccactggcctgcacctgcagaggggaatctaccgtgagatattattcctgacaatggctgctctgggcaaggaccacgtggacatagtggccttcgataagaagtacaagtctgcctttaacaagctggccagcagcatgggcaaggaggagctgaggcaccggcgggcgcagatgcccactcccaaggccattgactgccgaaaatgttttggagcacctccagaatgctagagaccttaagcttccctctccagcctagggtggggaagtgaggaagaagggattctagagttaaactgcttccctgttgccttcatggagttgggaacaggctgggaaggatgcccagtcaaaggctccaagcgaggacaacaggaagagggatccactgttaccaaaagtcctgattcccccatcaccaacctacccagtttgttcgtgctgatgttgggggagatctggggggagttggtacagctctgttcttcccttgtcctataccgggaactcccctccagggtacccacagatctgcattgccctggtcattttagaagtttttgttttaaaaaacaactggaaagatgcagagctactgagcctttgccctgaatgggaggtagggatgtcattctccaccaataatggtccctcttccctgacgttgctgaaggagcccaaggctctccatgcctttctacctaagtgtttgtattttattttaaattatttattctggagccacagcccccttgcttatgaggttcttatggagagtgagaaagggaagggaaatagggcaccatggtccggtggtttgtagttccttcaaagtcaggcactgggagctagaggagtctcaagctccccttaggaagaactggtgccccctccagtcctaatttttcttgcctgccccgccttggggaatgcctcacccacccaggtcctgacctgtgcaataaggattgttccctgcgaagttttgttggatgtaaatatagtaaaagctgcttctgtcttt

SEQ ID NO: 361237 - DNA, 3983 bp, Homo sapiens
ctcctcaatgaactgtgagaacatctgtgtgtgcagcagctgagagtaaagtttgtggctggagcgttcccgggaactgagggagattccaattccaactgaagctagaaggaagggcagacagtattcctgaacatgtgggaaatatcaagcttgaacctgttagttgaaggtaatactttagttgctactggtgcaaggtctgccagaggctggaggtggagatggaggcatgagagcagagttgagggtaacactatgggagccagccctgactcttaggctgccctggcctccagcatacactggacctgaggaggaagcatccctggagttcctactgacagactacgaggcagtgtgtggccgcagggcccggctggagcgcgaagtccaaggagccttcctccgcttcatggcctgtctgctcaagggctaccgggtcttcctgcgcccactcacccaggccccctccgagggagctcgtgatgttgacaaccttttcttcctgcagggcttcctcaaatcccgggaacgctccagccacaaactttactctcagctgctgcacacacagatgttctcacagttcattgaggagtgctcttttggctctgctcgccatgctgcccttgaattctttgactcttgtgttgaaaaggtccacccagagcaggagaagcctgagccgacacccttagtggagctagaggagctgtcaggaagtgagctcactgtctttatcacacctcccgaggagcctgccttaccagagggcagtgaatccactccccagtactgctatgatggattcccagagctacgggctgagttgtttgagtctcttcaagagcaacctggggccctgcctgtgccaggcccttcccgtagcgcccccagcagtcctgctcctcgccgtaccaaacaggagatgaaagttgcacagcggatggcacagaagtcagcagctgtgcctgagctgtgggcccggtgcctgctggggcactgctatgggctgtggttcctgtgtctgcctgcctatgtgcggtcggcaccctcccgagtgcaggcactgcacacagcctaccatgtgctgcgccagatggagagcggcaaggtggtgctccctgatgaggtgtgttaccgggtactgatgcagctctgctcacactatgggcagcctgtgctgtctgtgcgggtcatgctggagatgcgtcaggcaggcattgtgcccaacaccatcacctatggctactacaataaggctgtgttggaaagcaagtggccgtctggcacaccaggtgggcgtctgcgctgggccaagctccggaatgttgtcctgggggctgctcagttccgccagcccttgagagaacggcaacagcagcagcagcagcagcaacagcagcagcagcagcagcagcagcaggagcaggtgtcagcacatcaagaggcaggcagctcccaggcagagccctatttggagcgcccttcccctactcgccctcttcagcgccagactacttgggctgggcgaagtctgagagacccagcctcaccccctggacgcctggtgaagagtggtagcctgggcagtgcccgaggggcacagcccactgtggaggccggtgtggcccacatgatagaggccttgggggtcctggaaccccggggatcacctgtgccctggcacgatggaagtctctcagacctgagcctgacaggggaggagccgctccctggaggcagcccagggggctcaggctcagccctgagtgcccagtccactgaggccctggaagggctaagtgggcggggacccaaggctggtgggcgacaggatgaggcaggcaccccccgacgagggctgggtgcccgcctccaacagctgctcactccttcccgccactcccctgcctcccgcattcccccacctgagctgcctcctgacctgccacccccagcccgccgcagccccatggacagtcttctgcacccccgggagcgccctggatccactgcctccgagagctcagcctctctgggcagtgagtgggacctctcagaatcttctctcagcaacctgagtcttcgccgttcctcagagcgcctcagtgacacccctggatccttccagtcaccttccctggaaattctgctgtccagctgctccctgtgccgtgcctgtgattcgctggtgtatgatgaggaaatcatggctggctgggcacctgatgactctaacctcaacacaacctgccccttctgcgcctgcccctttgtgcccctgctcagtgtccagacccttgattcccggcccagtgtccccagccccaaatctgctggtgccagtggcagcaaagatgctcctgtccctggtggtcctggccctgtgctcagtgaccgaaggctctgccttgctctggatgagccccagctctgcaacgggcacatggggggagcctcccggcgggttgagagtggggcatgggcatacctgagccccctggtgctgcgtaaggagctggagtcgctggtagagaacgagggcagtgaggtgctggcgttgcctgaactgccctctgcccaccccatcatcttctggaaccttttgtggtatttccaacggctacgcctgcccagtattctaccaggcctggtgctggcctcctgtgatgggccttcgcactcccaggccccatctccttggctaacccctgatccagcctctgttcaggtacggctgctgtgggatgtactgacccctgaccccaatagctgcccacctctctatgtgctctggagggtccacagccagatcccccagcgggtggtatggccaggccctgtacctgcatcccttagtttggcactgttggagtcagtgctgcgccatgttggactcaatgaagtgcacaaggctgtggggctcctgctggaaactctagggcccccacccactggcctgcacctgcagaggggaatctaccgtgagatattattcctgacaatggctgctctgggcaaggaccacgtggacatagtggccttcgataagaagtacaagtctgcctttaacaagctggccagcagcatgggcaaggaggagctgaggcaccggcgggcgcagatgcccactcccaaggccattgactgccgaaaatgttttggagcacctccagaatgctagagaccttaagcttccctctccagcctagggtggggaagtgaggaagaagggattctagagttaaactgcttccctgttgccttcatggagttgggaacaggctgggaaggatgcccagtcaaaggctccaagcgaggacaacaggaagagggatccactgttaccaaaagtcctgattcccccatcaccaacctacccagtttgttcgtgctgatgttgggggagatctggggggagttggtacagctctgttcttcccttgtcctataccgggaactcccctccagggtacccacagatctgcattgccctggtcattttagaagtttttgttttaaaaaacaactggaaagatgcagagctactgagcctttgccctgaatgggaggtagggatgtcattctccaccaataatggtccctcttccctgacgttgctgaaggagcccaaggctctccatgcctttctacctaagtgtttgtattttattttaaattatttattctggagccacagcccccttgcttatgaggttcttatggagagtgagaaagggaagggaaatagggcaccatggtccggtggtttgtagttccttcaaagtcaggcactgggagctagaggagtctcaagctccccttaggaagaactggtgccccctccagtcctaatttttcttgcctgccccgccttggggaatgcctcacccacccaggtcctgacctgtgcaataaggattgttccctgcgaagttttgttggatgtaaatatagtaaaagctgcttctgtcttt

SEQ ID NO: 361238 - DNA, 5998 bp, Homo sapiens
cgccggccgaggaggaggggtgggggtagcggcggcgcccgcggcccggagcgggggttgggggagtagagaaagcggggcgcgcggaggaacgctgggtccccggcgccgcgggagctgggaggaccgagccggccgagcgagcagcgcggcagcacagtccccgcgtggcgcagcgcggcggggacgcggggaccgcccggatctccttccactgcgccccgcgctctgcggtcctcggccgcctcttcttccttcactcactgcccgggcgggagcggcgcccaagtcgggtgcgccatgtctggggccgggtagccccgccgcccgccggcccgccagctcgccctccgagccacccgccagcgggccggccggccgggaagcgcgggacaggcagatgcagtgagtgaggggggggccatggcggaggagcggcccccccggctggtggattacttcgtggtagctgggcttgcagggaacggagcacccatccctgaggaaacgtgggttcctgaacccagtgggcccctgcgccctccccggccagctgagcccatcacagatgtggcagtcatcgctagggcactgggcgaggaagtgccccagggctacacatgcatccaggcttctgctgggggccaccccttggaactcagtgctggacttctgggtggaactcaacccgtcatctgctaccgcaggggccgtgacaagccccccctcgttgagctgggggtgttgtatgaggggaaggaacgtcccaagcctggcttccaagtgcttgacacgacaccctacagccactcagcaaacctggcccctccaggccccgggcacccccgcacctacctcacttaccggcgggcagcagagggggcagggctgcatgccctgggcatcactgacctctgcctggtgctgcccagtaagggcgagggcactcctcatacttactgccggctgccccgcaacctcaaccctggcatgtggggcccagcagtgtacctgtgctataaggtgggcctggcgaaggccaacacgctggtgtacgaggcaggtgagtggcccctttatccctccaatcctgtgaccctacatccctttgccctggtgcctcttggcaggcaccttaagtgtccccagagtttactttctctttgctactcgggccttctctgggatcccttggttcatttcccttggagtctgatggaccctgctccttttgggtacccccaactatgctgggggtgcagagctgctgggccgctacccggaggaggacaatgaggcgttcccgctgcccgagtcagtgcccgtcttctgcctgcccatgggggccactatcgagtgctggcctgcccagaccaagtaccccgtgcccgtcttctccacctttgtgctcacgggtgcagctggtgataaggtgtatggtgccgccctgcagttctacgaggcgttcccaagggccaggctatcagagcgacaggcacgggcactgggcctgctgagcgccgtggagcggggtcgggcactggggggcagagctgtgcgcagccggcgtgccatcgctgtgctgtcccgctggcctgccttccctgccttccgcgccttcctcaccttcctttaccgctactccgtctcaggcccccaccgcctacccttggaagcgcacatctcccacttcattcacaacgttcccttcccttccccacagagaccccgcatcctagtgcagatgtctccctatgacaacttgctcctctgtcagcctgtatcctcacccctgcccctcagtggtgccagcttcctgcagctgctgcagagcctgggccctgagctggctatcacactgctgctggctgtgctcacagagcacaagctgctagtccactcgctgcggccagacctgctcaccagcgtctgtgaggccctcgtctcgatgatcttcccactgcactggcagtgcccctacattcctctgtgcccgctggtgctggcagatgtgctgagtgccccagtgcccttcattgtgggtatccactccagctactttgatctgcatgacccgcctgctgatgtcatctgtgtagaccttgataccaacacgctcttccagactgaggaaaagaagctcctctcccctcggaccctgccccgcagaccctacaaggttctgctggccacactgacaaacctgtaccagcagctggaccagacatacactggacctgaggaggaagcatccctggagttcctactgacagactacgaggcagtgtgtggccgcagggcccggctggagcgcgaagtccaaggagccttcctccgcttcatggcctgtctgctcaagggctaccgggtcttcctgcgcccactcacccaggccccctccgagggagctcgtgatgttgacaaccttttcttcctgcagggcttcctcaaatcccgggaacgctccagccacaaactttactctcagctgctgcacacacagatgttctcacagttcattgaggagtgctcttttggctctgctcgccatgctgcccttgaattctttgactcttgtgttgaaaaggtccacccagagcaggagaagcctgagccgacacccttagtggagctagaggagctgtcaggaagtgagctcactgtctttatcacacctcccgaggagcctgccttaccagagggcagtgaatccactccccagtactgctatgatggattcccagagctacgggctgagttgtttgagtctcttcaagagcaacctggggccctgcctgtgccaggcccttcccgtagcgcccccagcagtcctgctcctcgccgtaccaaacaggagatgaaagttgcacagcggatggcacagaagtcagcagctgtgcctgagctgtgggcccggtgcctgctggggcactgctatgggctgtggttcctgtgtctgcctgcctatgtgcggtcggcaccctcccgagtgcaggcactgcacacagcctaccatgtgctgcgccagatggagagcggcaaggtggtgctccctgatgaggtgtgttaccgggtactgatgcagctctgctcacactatgggcagcctgtgctgtctgtgcgggtcatgctggagatgcgtcaggcaggcattgtgcccaacaccatcacctatggctactacaataaggctgtgttggaaagcaagtggccgtctggcacaccaggtgggcgtctgcgctgggccaagctccggaatgttgtcctgggggctgctcagttccgccagcccttgagagaacggcaacagcagcagcagcagcagcaacagcagcagcagcagcagcagcagcaggagcaggtgtcagcacatcaagaggcaggcagctcccaggcagagccctatttggagcgcccttcccctactcgccctcttcagcgccagactacttgggctgggcgaagtctgagagacccagcctcaccccctggacgcctggtgaagagtggtagcctgggcagtgcccgaggggcacagcccactgtggaggccggtgtggcccacatgatagaggccttgggggtcctggaaccccggggatcacctgtgccctggcacgatggaagtctctcagacctgagcctgacaggggaggagccgctccctggaggcagcccagggggctcaggctcagccctgagtgcccagtccactgaggccctggaagggctaagtgggcggggacccaaggctggtgggcgacaggatgaggcaggcaccccccgacgagggctgggtgcccgcctccaacagctgctcactccttcccgccactcccctgcctcccgcattcccccacctgagctgcctcctgacctgccacccccagcccgccgcagccccatggacagtcttctgcacccccgggagcgccctggatccactgcctccgagagctcagcctctctgggcagtgagtgggacctctcagaatcttctctcagcaacctgagtcttcgccgttcctcagagcgcctcagtgacacccctggatccttccagtcaccttccctggaaattctgctgtccagctgctccctgtgccgtgcctgtgattcgctggtgtatgatgaggaaatcatggctggctgggcacctgatgactctaacctcaacacaacctgccccttctgcgcctgcccctttgtgcccctgctcagtgtccagacccttgattcccggcccagtgtccccagccccaaatctgctggtgccagtggcagcaaagatgctcctgtccctggtggtcctggccctgtgctcagtgaccgaaggctctgccttgctctggatgagccccagctctgcaacgggcacatggggggagcctcccggcgggttgagagtggggcatgggcatacctgagccccctggtgctgcgtaaggagctggagtcgctggtagagaacgagggcagtgaggtgctggcgttgcctgaactgccctctgcccaccccatcatcttctggaaccttttgtggtatttccaacggctacgcctgcccagtattctaccaggcctggtgctggcctcctgtgatgggccttcgcactcccaggccccatctccttggctaacccctgatccagcctctgttcaggtacggctgctgtgggatgtactgacccctgaccccaatagctgcccacctctctatgtgctctggagggtccacagtgagtctggtatttggcctgggtggggagggtgggtcccatacccagagggctcagtgattctggtggccttctttcctttcatccaggccagatcccccagcgggtggtatggccaggccctgtacctgcatcccttagtttggcactgttggagtcagtgctgcgccatgttggactcaatgaagtgcacaaggctgtggggctcctgctggaaactctagggcccccacccactggcctgcacctgcagaggggaatctaccgtgagatattattcctgacaatggctgctctgggcaaggaccacgtggacatagtggccttcgataagaagtacaagtctgcctttaacaagctggccagcagcatgggcaaggaggagctgaggcaccggcgggcgcagatgcccactcccaaggccattgactgccgaaaatgttttggagcacctccagaatgctagagaccttaagcttccctctccagcctagggtggggaagtgaggaagaagggattctagagttaaactgcttccctgttgccttcatggagttgggaacaggctgggaaggatgcccagtcaaaggctccaagcgaggacaacaggaagagggatccactgttaccaaaagtcctgattcccccatcaccaacctacccagtttgttcgtgctgatgttgggggagatctggggggagttggtacagctctgttcttcccttgtcctataccgggaactcccctccagggtacccacagatctgcattgccctggtcattttagaagtttttgttttaaaaaacaactggaaagatgcagagctactgagcctttgccctgaatgggaggtagggatgtcattctccaccaataatggtccctcttccctgacgttgctgaaggagcccaaggctctccatgcctttctacctaagtgtttgtattttattttaaattatttattctggagccacagcccccttgcttatgaggttcttatggagagtgagaaagggaagggaaatagggcaccatggtccggtggtttgtagttccttcaaagtcaggcactgggagctagaggagtctcaagctccccttaggaagaactggtgccccctccagtcctaatttttcttgcctgccccgccttggggaatgcctcacccacccaggtcctgacctgtgcaataaggattgttccctgcgaagttttgttggatgtaaatatagtaaaagctgcttctgtcttt

SEQ ID NO: 361239 - DNA, 6253 bp, Homo sapiens
  misc_feature (6151)..(6151): n is a, c, g, or t
cgccggccgaggaggaggggtgggggtagcggcggcgcccgcggcccggagcgggggttgggggagtagagaaagcggggcgcgcggaggaacgctgggtccccggcgccgcgggagctgggaggaccgagccggccgagcgagcagcgcggcagcacagtccccgcgtggcgcagcgcggcggggacgcggggaccgcccggatctccttccactgcgccccgcgctctgcggtcctcggccgcctcttcttccttcactcactgcccgggcgggagcggcgcccaagtcgggtgcgccatgtctggggccgggtagccccgccgcccgccggcccgccagctcgccctccgagccacccgccagcgggccggccggccgggaagcgcgggacaggcagatgcagtgagtgaggggggggccatggcggaggagcggcccccccggctggtggattacttcgtggtagctgggcttgcagggaacggagcacccatccctgaggaaacgtgggttcctgaacccagtgggcccctgcgccctccccggccagctgagcccatcacagatgtggcagtcatcgctagggcactgggcgaggaagtgccccagggctacacatgcatccaggcttctgctgggggccaccccttggaactcagtgctggacttctgggtggaactcaacccgtcatctgctaccgcaggggccgtgacaagccccccctcgttgagctgggggtgttgtatgaggggaaggaacgtcccaagcctggcttccaagtgcttgacacgacaccctacagccactcagcaaacctggcccctccaggccccgggcacccccgcacctacctcacttaccggcgggcagcagagggggcagggctgcatgccctgggcatcactgacctctgcctggtgctgcccagtaagggcgagggcactcctcatacttactgccggctgccccgcaacctcaaccctggcatgtggggcccagcagtgtacctgtgctataaggtgggcctggcgaaggccaacacgctggtgtacgaggcaggtgagtggcccctttatccctccaatcctgtgaccctacatccctttgccctggtgcctcttggcaggcaccttaagtgtccccagagtttactttctctttgctactcgggccttctctgggatcccttggttcatttcccttggagtctgatggaccctgctccttttgggtacccccaactatgctgggggtgcagagctgctgggccgctacccggaggaggacaatgaggcgttcccgctgcccgagtcagtgcccgtcttctgcctgcccatgggggccactatcgagtgctggcctgcccagaccaagtaccccgtgcccgtcttctccacctttgtgctcacgggtgcagctggtgataaggtgtatggtgccgccctgcagttctacgaggcgttcccaagggccaggctatcagagcgacaggcacgggcactgggcctgctgagcgccgtggagcggggtcgggcactggggggcagagctgtgcgcagccggcgtgccatcgctgtgctgtcccgctggcctgccttccctgccttccgcgccttcctcaccttcctttaccgctactccgtctcaggcccccaccgcctacccttggaagcgcacatctcccacttcattcacaacgttcccttcccttccccacagagaccccgcatcctagtgcagatgtctccctatgacaacttgctcctctgtcagcctgtatcctcacccctgcccctcagtggtgccagcttcctgcagctgctgcagagcctgggccctgagctggctatcacactgctgctggctgtgctcacagagcacaagctgctagtccactcgctgcggccagacctgctcaccagcgtctgtgaggccctcgtctcgatgatcttcccactgcactggcagtgcccctacattcctctgtgcccgctggtgctggcagatgtgctgagtgccccagtgcccttcattgtgggtatccactccagctactttgatctgcatgacccgcctgctgatgtcatctgtgtagaccttgataccaacacgctcttccagactgaggaaaagaagctcctctcccctcggaccctgccccgcagaccctacaaggttctgctggccacactgacaaacctgtaccagcagctggaccagacatacactggacctgaggaggaagcatccctggagttcctactgacagactacgaggcagtgtgtggccgcagggcccggctggagcgcgaagtccaaggagccttcctccgcttcatggcctgtctgctcaagggctaccgggtcttcctgcgcccactcacccaggccccctccgagggagctcgtgatgttgacaaccttttcttcctgcagggcttcctcaaatcccgggaacgctccagccacaaactttactctcagctgctgcacacacagatgttctcacagttcattgaggagtgctcttttggctctgctcgccatgctgcccttgaattctttgactcttgtgttgaaaaggtccacccagagcaggagaagcctgagccgacacccttagtggagctagaggagctgtcaggaagtgagctcactgtctttatcacacctcccgaggagcctgccttaccagagggcagtgaatccactccccagtactgctatgatggattcccagagctacgggctgagttgtttgagtctcttcaagagcaacctggggccctgcctgtgccaggcccttcccgtagcgcccccagcagtcctgctcctcgccgtaccaaacaggagatgaaagttgcacagcggatggcacagaagtcagcagctgtgcctgagctgtgggcccggtgcctgctggggcactgctatgggctgtggttcctgtgtctgcctgcctatgtgcggtcggcaccctcccgagtgcaggcactgcacacagcctaccatgtgctgcgccagatggagagcggcaaggtggtgctccctgatgaggtgtgttaccgggtactgatgcagctctgctcacactatgggcagcctgtgctgtctgtgcgggtcatgctggagatgcgtcaggcaggcattgtgcccaacaccatcacctatggctactacaataaggctgtgttggaaagcaagtggccgtctggcacaccaggtgggcgtctgcgctgggccaagctccggaatgttgtcctgggggctgctcagttccgccagcccttgagagaacggcaacagcagcagcagcagcagcaacagcagcagcagcagcagcagcagcaggagcaggtgtcagcacatcaagaggcaggcagctcccaggcagagccctatttggagcgcccttcccctactcgccctcttcagcgccagactacttgggctgggcgaagtctgagagacccagcctcaccccctggacgcctggtgaagagtggtagcctgggcagtgcccgaggggcacagcccactgtggaggccggtgtggcccacatgatagaggccttgggggtcctggaaccccggggatcacctgtgccctggcacgatggaagtctctcagacctgagcctgacaggggaggagccgctccctggaggcagcccagggggctcaggctcagccctgagtgcccagtccactgaggccctggaagggctaagtgggcggggacccaaggctggtgggcgacaggatgaggcaggcaccccccgacgagggctgggtgcccgcctccaacagctgctcactccttcccgccactcccctgcctcccgcattcccccacctgagctgcctcctgacctgccacccccagcccgccgcagccccatggacagtcttctgcacccccgggagcgccctggatccactgcctccgagagctcagcctctctgggcagtgagtgggacctctcagaatcttctctcagcaacctgagtcttcgccgttcctcagagcgcctcagtgacacccctggatccttccagtcaccttccctggaaattctgctgtccagctgctccctgtgccgtgcctgtgattcgctggtgtatgatgaggaaatcatggctggctgggcacctgatgactctaacctcaacacaacctgccccttctgcgcctgcccctttgtgcccctgctcagtgtccagacccttgattcccggcccagtgtccccagccccaaatctgctggtgccagtggcagcaaagatgctcctgtccctggtggtcctggccctgtgctcagtgaccgaaggctctgccttgctctggatgagccccagctctgcaacgggcacatggggggagcctcccggcgggttgagagtggggcatgggcatacctgagccccctggtgctgcgtaaggagctggagtcgctggtagagaacgagggcagtgaggtgctggcgttgcctgaactgccctctgcccaccccatcatcttctggaaccttttgtggtatttccaacggctacgcctgcccagtattctaccaggcctggtgctggcctcctgtgatgggccttcgcactcccaggccccatctccttggctaacccctgatccagcctctgttcaggtacggctgctgtgggatgtactgacccctgaccccaatagctgcccacctctctatgtgctctggagggtccacagccagatcccccagcgggtggtatggccaggccctgtacctgcatcccttagtttggcactgttggagtcagtgctgcgccatgttggactcaatgaagtgcacaaggctgtggggctcctgctggaaactctagggcccccacccactggcctgcacctgcagaggggaatctaccgtgagatattattcctgacaatggctgctctgggcaaggaccacgtggacatagtggccttcgataagaagtacaagtctgcctttaacaagctggccagcagcatgggcaaggaggagctgaggcaccggcgggcgcagatgcccactcccaaggccattgactgccgaaaatgttttggagcacctccagaatgctagagaccttaagcttccctctccagcctagggtggggaagtgaggaagaagggattctagagttaaactgcttccctgttgccttcatggagttgggaacaggctgggaaggatgcccagtcaaaggctccaagcgaggacaacaggaagagggatccactgttaccaaaagtcctgattcccccatcaccaacctacccagtttgttcgtgctgatgttgggggagatctggggggagttggtacagctctgttcttcccttgtcctataccgggaactcccctccagggtacccacagatctgcattgccctggtcattttagaagtttttgttttaaaaaacaactggaaagatgcagagctactgagcctttgccctgaatgggaggtagggatgtcattctccaccaataatggtccctcttccctgacgttgctgaaggagcccaaggctctccatgcctttctacctaagtgtttgtattttattttaaattatttattctggagccacagcccccttgcttatgaggttcttatggagagtgagaaagggaagggaaatagggcaccatggtccggtggtttgtagttccttcaaagtcaggcactgggagctagaggagtctcaagctccccttaggaagaactggtgccccctccagtcctaatttttcttgcctgccccgccttggggaatgcctcacccacccaggtcctgacctgtgcaataaggattgttccctgcgaagttttgttggatgtaaatatagtaaaagctgcttctgtctttagaaaaaaaacaacaacaaaaaaaaaattttggggggcctgggcccgaaaaattttttaaacctcgttgggggcggggcccatttgttactcgacctgggcctaacgcgcccaaggaaaccgcccaggattagtgtgcggtctcccccataaaaagcggggccccgctttttgaacaaccgaaggccttcgggcttccggtttacacagggtcaggcgatcgatacaaccccccggtcgggntagtaaatacacccgtgggtaaccatactgagaaagacacaaacacaaacaaaaacgcagaacaaccgggcataccaaacagcaccaaaacaatccataagc

SEQ ID NO: 361240 - DNA, 4678 bp, Homo sapiens
cgccggccgaggaggaggggtgggggtagcggcggcgcccgcggcccggagcgggggttgggggagtagagaaagcggggcgcgcggaggaacgctgggtccccggcgccgcgggagctgggaggaccgagccggccgagcgagcagcgcggcagcacagtccccgcgtggcgcagcgcggcggggacgcggggaccgcccggatctccttccactgcgccccgcgctctgcggtcctcggccgcctcttcttccttcactcactgcccgggcgggagcggcgcccaagtcgggtgcgccatgtctggggccgggtagccccgccgcccgccggcccgccagctcgccctccgagccacccgccagcgggccggccggccgggaagcgcgggacaggcagatgcagtgagtgaggggggggccatggcggaggagcggcccccccggctggtggattacttcgtggtagctgggcttgcagggaacggagcacccatccctgaggaaacgtgggttcctgaacccagtgggcccctgcgccctccccggccagctgagcccatcacagatgtggcagtcatcgctagggcactgggcgaggaagtgccccagggctacacatgcatccaggcttctgctgggggccaccccttggaactcagtgctggacttctgggtggaactcaacccgtcatctgctaccgcaggggccgtgacaagccccccctcgttgagctgggggtgttgtatgaggggaaggaacgtcccaagcctggcttccaagtgcttgacacgacaccctacagccactcagcaaacctggcccctccaggccccgggcacccccgcacctacctcacttaccggcgggcagcagagggggcagggctgcatgccctgggcatcactgacctctgcctggtgctgcccagtaagggcgagggcactcctcatacttactgccggctgccccgcaacctcaaccctggcatgtggggcccagcagtgtacctgtgctataaggtgggcctggcgaaggccaacacgctggtgtacgaggcaggtgagtggcccctttatccctccaatcctgtgaccctacatccctttgccctggtgcctcttggcaggcaccttaagtgtccccagagtttactttctctttgctactcgggccttctctgggatcccttggttcatttcccttggagtctgatggaccctgctccttttgggtacccccaactatgctgggggtgcagagctgctgggccgctacccggaggaggacaatgaggcgttcccgctgcccgagtcagtgcccgtcttctgcctgcccatgggggccactatcgagtgctggcctgcccagaccaagtaccccgtgcccgtcttctccacctttgtgctcacgggtgcagctggtgataaggtgtatggtgccgccctgcagttctacgaggcgttcccaagggccaggctatcagagcgacaggcacgggcactgggcctgctgagcgccgtggagcggggtcgggcactggggggcagagctgtgcgcagccggcgtgccatcgctgtgctgtcccgctggcctgccttccctgccttccgcgccttcctcaccttcctttaccgctactccgtctcaggcccccaccgcctacccttggaagcgcacatctcccacttcattcacaacgttcccttcccttccccacagagaccccgcatcctagtgcagatgtctccctatgacaacttgctcctctgtcagcctgtatcctcacccctgcccctcagtggtgccagcttcctgcagctgctgcagagcctgggccctgagctggctatcacactgctgctggctgtgctcacagagcacaagctgctagtccactcgctgcggccagacctgctcaccagcgtctgtgaggccctcgtctcgatgatcttcccactgcactggcagtgcccctacattcctctgtgcccgctggtgctggcagatgtgctgagtgccccagtgcccttcattgtgggtatccactccagctactttgatctgcatgacccgcctgctgatgtcatctgtgtagaccttgataccaacacgctcttccagactgaggaaaagaagctcctctcccctcggaccctgccccgcagaccctacaaggttctgctggccacactgacaaacctgtaccagcagctggaccagacatacactggacctgaggaggaagcatccctggagttcctactgacagactacgaggcagtgtgtggccgcagggcccggctggagcgcgaagtccaaggagccttcctccgcttcatggcctgtctgctcaagggctaccgggtcttcctgcgcccactcacccaggccccctccgagggagctcgtgatgttgacaaccttttcttcctgcagggcttcctcaaatcccgggaacgctccagccacaaactttactctcagctgctgcacacacagatgttctcacagttcattgaggagtgctcttttggctctgctcgccatgctgcccttgaattctttgactcttgtgttgaaaaggtccacccagagcaggagaagcctgagccgacacccttagtggagctagaggagctgtcaggaagtgagctcactgtctttatcacacctcccgaggagcctgccttaccagagggcagtgaatccactccccagtactgctatgatggattcccagagctacgggctgagttgtttgagtctcttcaagagcaacctggggccctgcctgtgccaggcccttcccgtagcgcccccagcagtcctgctcctcgccgtaccaaacaggagatgaaagttgcacagcggatggcacagaagtcagcagctgtgcctgagctgtgggcccggtgcctgctggggcactgctatgggctgtggttcctgtgtctgcctgcctatgtgcggtcggcaccctcccgagtgcaggcactgcacacagcctaccatgtgctgcgccagatggagagcggcaaggtggtgctccctgatgaggtgtgttaccgggtactgatgcagctctgctcacactatgggcagcctgtgctgtctgtgcgggtcatgctggagatgcgtcaggcaggcattgtgcccaacaccatcacctatggctactacaataaggctgtgttggaaagcaagtggccgtctggcacaccaggtgggcgtctgcgctgggccaagctccggaatgttgtcctgggggctgctcagttccgccagcccttgagagaacggcaacagcagcagcagcagcagcaacagcagcagcagcagcagcagcagcaggagcaggtgtcagcacatcaagaggcaggcagctcccaggcagagccctatttggagcgcccttcccctactcgccctcttcagcgccagactacttgggctgggcgaagtctgagagacccagcctcaccccctggacgcctggtgaagagtggtagcctgggcagtgcccgaggggcacagcccactgtggaggccggtgtggcccacatgatagaggccttgggggtcctggaaccccggggatcacctgtgccctggcacgatggaagtctctcagacctgagcctgacaggggaggagccgctccctggaggcagcccagggggctcaggctcagccctgagtgcccagtccactgaggccctggaagggctaagtgggcggggacccaaggctggtgggcgacaggatgaggcaggcaccccccgacgagggctgggtgcccgcctccaacagctgctcactccttcccgccactcccctgcctcccgcattcccccacctgagctgcctcctgacctgccacccccagcccgccgcagccccatggacagtcttctgcacccccgggagcgccctggatccactgcctccgagagctcagcctctctgggcagtgagtgggacctctcagaatcttctctcagcaacctgagtcttcgccgttcctcagagcgcctcagtgacacccctggatccttccagtcaccttccctggaaattctgctgtccagctgctccctgtgccgtgcctgtgattcgctggtgtatgatgaggaaatcatggctggctgggcacctgatgactctaacctcaacacaacctgccccttctgcgcctgcccctttgtgcccctgctcagtgtccagacccttgattcccggcccagtgtccccagccccaaatctgctggtgccagtggcagcaaagatgctcctgtccctggtggtcctggccctgtgctcagtgaccgaaggctctgccttgctctggatgagccccagctctgcaacgggcacatggggggagcctcccggcgggttgagagtggggcatgggcatacctgagccccctggtgctgcgtaaggagctggagtcgctggtagagaacgagggcagtgaggtgctggcgttgcctgaactgccctctgcccaccccatcatcttctggaaccttttgtggtatttgttggcatagtggtagttgctaaaactgtgataaaaagaagttaagagaaactgtgtgaaagtaagcctgtcacacttgtataaagaaggttagttccccaccacctcagggccagaaccacaaatatcg

SEQ ID NO: 361241 - DNA, 3361 bp, Homo sapiens
cgccggccgaggaggaggggtgggggtagcggcggcgcccgcggcccggagcgggggttgggggagtagagaaagcggggcgcgcggaggaacgctgggtccccggcgccgcgggagctgggaggaccgagccggccgagcgagcagcgcggcagcacagtccccgcgtggcgcagcgcggcggggacgcggggaccgcccggatctccttccactgcgccccgcgctctgcggtcctcggccgcctcttcttccttcactcactgcccgggcgggagcggcgcccaagtcgggtgcgccatgtctggggccgggtagccccgccgcccgccggcccgccagctcgccctccgagccacccgccagcgggccggccggccgggaagcgcgggacaggcagatgcagtgagtgaggggggggccatggcggaggagcggcccccccggctggtggattacttcgtggtagctgggcttgcagggaacggagcacccatccctgaggaaacgtgggttcctgaacccagtgggcccctgcgccctccccggccagctgagcccatcacagatgtggcagtcatcgctagggcactgggcgaggaagtgccccagggctacacatgcatccaggcttctgctgggggccaccccttggaactcagtgctggacttctgggtggaactcaacccgtcatctgctaccgcaggggccgtgacaagccccccctcgttgagctgggggtgttgtatgaggggaaggaacgtcccaagcctggcttccaagtgcttgacacgacaccctacagccactcagcaaacctggcccctccaggccccgggcacccccgcacctacctcacttaccggcgggcagcagagggggcagggctgcatgccctgggcatcactgacctctgcctggtgctgcccagtaagggcgagggcactcctcatacttactgccggctgccccgcaacctcaaccctggcatgtggggcccagcagtgtacctgtgctataaggtgggcctggcgaaggccaacacgctggtgtacgaggcaggtgagtggcccctttatccctccaatcctgtgaccctacatccctttgccctggtgcctcttggcaggcaccttaagtgtccccagagtttactttctctttgctactcgggccttctctgggatcccttggttcatttcccttggagtctgatggaccctgctccttttgggtacccccaactatgctgggggtgcagagctgctgggccgctacccggaggaggacaatgaggcgttcccgctgcccgagtcagtgcccgtcttctgcctgcccatgggggccactatcgagtgctggcctgcccagaccaagtaccccgtgcccgtcttctccacctttgtgctcacgggtgcagctggtgataaggtgtatggtgccgccctgcagttctacgaggcgttcccaagggccaggctatcagagcgacaggcacgggcactgggcctgctgagcgccgtggagcggggtcgggcactggggggcagagctgtgcgcagccggcgtgccatcgctgtgctgtcccgctggcctgccttccctgccttccgcgccttcctcaccttcctttaccgctactccgtctcaggcccccaccgcctacccttggaagcgcacatctcccacttcattcacaacgttcccttcccttccccacagagaccccgcatcctagtgcagatgtctccctatgacaacttgctcctctgtcagcctgtatcctcacccctgcccctcagtggtgccagcttcctgcagctgctgcagagcctgggccctgagctggctatcacactgctgctggctgtgctcacagagcacaagctgctagtccactcgctgcggccagacctgctcaccagcgtctgtgaggccctcgtctcgatgatcttcccactgcactggcagtgcccctacattcctctgtgcccgctggtgctggcagatgtgctgagtgccccagtgcccttcattgtgggtatccactccagctactttgatctgcatgacccgcctgctgatgtcatctgtgtagaccttgataccaacacgctcttccagactgaggaaaagaagctcctctcccctcggaccctgccccgcagaccctacaaggttctgctggccacactgacaaacctgtaccagcagctggaccagacatacactggacctgaggaggaagcatccctggagttcctactgacagactacgaggcagtgtgtggccgcagggcccggctggagcgcgaagtccaaggagccttcctccgcttcatggcctgtctgctcaagggctaccgggtcttcctgcgcccactcacccaggccccctccgagggagctcgtgatgttgacaaccttttcttcctgcagggcttcctcaaatcccgggaacgctccagccacaaactttactctcagctgctgcacacacagatgttctcacagttcattgaggagtgctcttttggctctgctcgccatgctgcccttgaattctttgactcttgtgttgaaaaggtccacccagagcaggagaagcctgagccgacacccttagtggagctagaggagctgtcaggaagtgagctcactgtctttatcacacctcccgaggagcctgccttaccagagggcagtgaatccactccccagtactgctatgatggattcccagagctacgggctgagttgtttgagtctcttcaagagcaacctggggccctgcctgtgccaggcccttcccgtagcgcccccagcagtcctgctcctcgccgtaccaaacaggagatgaaagttgcacagcggatggcacagaagtcagcagctgtgcctgagctgtgggcccggtgcctgctggggcactgctatgggctgtggttcctgtgtctgcctgcctatgtgcggtcggcaccctcccgagtgcaggcactgcacacagcctaccatgtgctgcgccatgcctttctacctaagtgtttgtattttattttaaattatttattctggagccacagcccccttgcttatgaggttcttatggagagtgagaaagggaagggaaatagggcaccatggtccggtggtttgtagttccttcaaagtcaggcactgggagctagaggagtctcaagctccccttaggaagaactggtgccccctccagtcctaatttttcttgcctgccccgccttggggaatgcctcacccacccaggtcctgacctgtgcaataaggattgttccctgcgaagttttgttggatgtaaatatagtaaaagctgcttctgtcttt

SEQ ID NO: 361242 - DNA, 3417 bp, Homo sapiens
cgccggccgaggaggaggggtgggggtagcggcggcgcccgcggcccggagcgggggttgggggagtagagaaagcggggcgcgcggaggaacgctgggtccccggcgccgcgggagctgggaggaccgagccggccgagcgagcagcgcggcagcacagtccccgcgtggcgcagcgcggcggggacgcggggaccgcccggatctccttccactgcgccccgcgctctgcggtcctcggccgcctcttcttccttcactcactgcccgggcgggagcggcgcccaagtcgggtgcgccatgtctggggccgggtagccccgccgcccgccggcccgccagctcgccctccgagccacccgccagcgggccggccggccgggaagcgcgggacaggcagatgcagtgagtgaggggggggccatggcggaggagcggcccccccggctggtggattacttcgtggtagctgggcttgcagggaacggagcacccatccctgaggaaacgtgggttcctgaacccagtgggcccctgcgccctccccggccagctgagcccatcacagatgtggcagtcatcgctagggcactgggcgaggaagtgccccagggctacacatgcatccaggcttctgctgggggccaccccttggaactcagtgctggacttctgggtggaactcaacccgtcatctgctaccgcaggggccgtgacaagccccccctcgttgagctgggggtgttgtatgaggggaaggaacgtcccaagcctggcttccaagtgcttgacacgacaccctacagccactcagcaaacctggcccctccaggccccgggcacccccgcacctacctcacttaccggcgggcagcagagggggcagggctgcatgccctgggcatcactgacctctgcctggtgctgcccagtaagggcgagggcactcctcatacttactgccggctgccccgcaacctcaaccctggcatgtggggcccagcagtgtacctgtgctataaggtgggcctggcgaaggccaacacgctggtgtacgaggcaggtgagtggcccctttatccctccaatcctgtgaccctacatccctttgccctggtgcctcttggcaggcaccttaagtgtccccagagtttactttctctttgctactcgggccttctctgggatcccttggttcatttcccttggagtctgatggaccctgctccttttgggtacccccaactatgctgggggtgcagagctgctgggccgctacccggaggaggacaatgaggcgttcccgctgcccgagtcagtgcccgtcttctgcctgcccatgggggccactatcgagtgctggcctgcccagaccaagtaccccgtgcccgtcttctccacctttgtgctcacgggtgcagctggtgataaggtgtatggtgccgccctgcagttctacgaggcgttcccaagggccaggctatcagagcgacaggcacgggcactgggcctgctgagcgccgtggagcggggtcgggcactggggggcagagctgtgcgcagccggcgtgccatcgctgtgctgtcccgctggcctgccttccctgccttccgcgccttcctcaccttcctttaccgctactccgtctcaggcccccaccgcctacccttggaagcgcacatctcccacttcattcacaacgttcccttcccttccccacagagaccccgcatcctagtgcagatgtctccctatgacaacttgctcctctgtcagcctgtatcctcacccctgcccctcagtggtgccagcttcctgcagctgctgcagagcctgggccctgagctggctatcacactgctgctggctgtgctcacagagcacaagctgctagtccactcgctgcggccagacctgctcaccagcgtctgtgaggccctcgtctcgatgatcttcccactgcactggcagtgcccctacattcctctgtgcccgctggtgctggcagatgtgctgagtgccccagtgcccttcattgtgggtatccactccagctactttgatctgcatgacccgcctgctgatgtcatctgtgtagaccttgataccaacacgctcttccagactgaggaaaagaagctcctctcccctcggaccctgccccgcagaccctacaaggttctgctggccacactgacaaacctgtaccagcagctggaccagacatacactggacctgaggaggaagcatccctggagttcctactgacagactacgaggcagtgtgtggccgcagggcccggctggagcgcgaagtccaaggagccttcctccgcttcatggcctgtctgctcaagggctaccgggtcttcctgcgcccactcacccaggccccctccgagggagctcgtgatgttgacaaccttttcttcctgcagggcttcctcaaatcccgggaacgctccagccacaaactttactctcagctgctgcacacacagatgttctcacagttcattgaggagtgctcttttggctctgctcgccatgctgcccttgaattctttgactcttgtgttgaaaaggtccacccagagcaggagaagcctgagccgacacccttagtggagctagaggagctgtcaggaagtgagctcactgtctttatcacacctcccgaggagcctgccttaccagagggcagtgaatccactccccagtactgctatgatggattcccagagctacgggctgagttgtttgagtctcttcaagagcaacctggggccctgcctgtgccaggcccttcccgtagcgcccccagcagtcctgctcctcgccgtaccaaacaggagatgaaagttgcacagcggatggcacagaagtcagcagctgtgcctgagctgtgggcccggtgcctgctggggcactgctatgggctgtggttcctgtgtctgcctgcctatgtgcggtcggcaccctcccgagtgcaggcactgcacacagcctaccatgtgctgcgccagatggagagcggcaaggtggtgctccctgatgaggtgtgttaccgggtactgatgcagctctgctcacactatgggcagcctgtgctgtctgtgcgggtcatgctggagatgcgtcaggcaggcattgtgcccaacaccatcacctatggctactacaataaggtacctactttggggtgaggggtgggatggcagctgtgccagggtgtgtgaggggaggctgctgctgctcccctcgctccttggagattgggctggtactgtttgcctaggtcctggaaccactgtcatccacattgcactcctgtggtgccttagcacctacagtttctcagacgaggctgctttgattcccactcatgacagccctgcctacaactaatagtgtc

SEQ ID NO: 361243 - DNA, 2530 bp, Homo sapiens
cgccggccgaggaggaggggtgggggtagcggcggcgcccgcggcccggagcgggggttgggggagtagagaaagcggggcgcgcggaggaacgctgggtccccggcgccgcgggagctgggaggaccgagccggccgagcgagcagcgcggcagcacagtccccgcgtggcgcagcgcggcggggacgcggggaccgcccggatctccttccactgcgccccgcgctctgcggtcctcggccgcctcttcttccttcactcactgcccgggcgggagcggcgcccaagtcgggtgcgccatgtctggggccgggtagccccgccgcccgccggcccgccagctcgccctccgagccacccgccagcgggccggccggccgggaagcgcgggacaggcagatgcagtgagtgaggggggggccatggcggaggagcggcccccccggctggtggattacttcgtggtagctgggcttgcagggaacggagcacccatccctgaggaaacgtgggttcctgaacccagtgggcccctgcgccctccccggccagctgagcccatcacagatgtggcagtcatcgctagggcactgggcgaggaagtgccccagggctacacatgcatccaggcttctgctgggggccaccccttggaactcagtgctggacttctgggtggaactcaacccgtcatctgctaccgcaggggccgtgacaagccccccctcgttgagctgggggtgttgtatgaggggaaggaacgtcccaagcctggcttccaagtgcttgacacgacaccctacagccactcagcaaacctggcccctccaggccccgggcacccccgcacctacctcacttaccggcgggcagcagagggggcagggctgcatgccctgggcatcactgacctctgcctggtgctgcccagtaagggcgagggcactcctcatacttactgccggctgccccgcaacctcaaccctggcatgtggggcccagcagtgtacctgtgctataaggtgggcctggcgaaggccaacacgctggtgtacgaggcagagctgctgggccgctacccggaggaggacaatgaggcgttcccgctgcccgagtcagtgcccgtcttctgcctgcccatgggggccactatcgagtgctggcctgcccagaccaagtaccccgtgcccgtcttctccacctttgtgctcacgggtgcagctggtgataaggtgtatggtgccgccctgcagttctacgaggcgttcccaagggccaggctatcagagcgacaggcacgggcactgggcctgctgagcgccgtggagcggggtcgggcactggggggcagagctgtgcgcagccggcgtgccatcgctgtgctgtcccgctggcctgccttccctgccttccgcgccttcctcaccttcctttaccgctactccgtctcaggcccccaccgcctacccttggaagcgcacatctcccacttcattcacaacgttcccttcccttccccacagagaccccgcatcctagtgcagatgtctccctatgacaacttgctcctctgtcagcctgtatcctcacccctgcccctcaggtatgtgatcagattgtggggaggggagcctttaatgaccaaggacatggtaggtgctgggcaggtgggtgcagctgttgaggtttatgcaggctgggtccaggtggtggctgtgcctggcatctggggaagggtccccagggtatcctggtgaccctttccccacctcggcattgcctgcagtggtgccagcttcctgcagctgctgcagagcctgggccctgagctggctatcacactgctgctggctgtgctcacagagcacaagctgctagtccactcgctgcggccagacctgctcaccagcgtctgtgaggccctcgtctcggtgagtgccgccccgcctggcccatcttccccagaaccatggttctttctggtgcccctatccctgcctggactcttcccttttccttccttgtggaggatcctcagcccctttccctgggcacagcctgcaggaacacatagcttccatcaggagctcttctctagagcctacttccaacagcctctctcaacaggcaccaactccccaaggccaatgccctctctttctctctcctgtgcctcccactgctgcctcaaccccctgttcactggttctcactgcctggtgcttcagatgatcttcccactgcactggcagtgcccctacattcctctgtgcccgctggtgctggcagatgtgctgagtgccccagtgcccttcattgtgggtatccactccagctactttgatctgcatgacccgcctgctgatgtcatctgtgtagaccttgataccaacacgctcttccagactgaggaaaagaagctcctctcccctcggaccctgccccgcagaccctacaaggttctgctggccacactgacaaacctgtaccagcagctggaccagaggagcagcaggaggattccacaaa

SEQ ID NO: 361244 - DNA, 876 bp, Homo sapiens
cgccggccgaggaggaggggtgggggtagcggcggcgcccgcggcccggagcgggggttgggggagtagagaaagcggggcgcgcggaggaacgctgggtccccggcgccgcgggagctgggaggaccgagccggccgagcgagcagcgcggcagcacagtccccgcgtggcgcagcgcggcggggacgcggggaccgcccggatctccttccactgcgccccgcgctctgcggtcctcggccgcctcttcttccttcactcactgcccgggcgggagcggcgcccaagtcgggtgcgccatgtctggggccgggtagccccgccgcccgccggcccgccagctcgccctccgagccacccgccagcgggccggccggccgggaagcgcgggacaggcagatgcagtgagtgaggggggggccatggcggaggagcggcccccccggctggtggattacttcgtggtagctgggcttgcagggaacggagcacccatccctgaggaaacgtgggttcctgaacccagtgggcccctgcgccctccccggccagctgagcccatcacagatgtggcagtcatcgctagggcactgggcgaggaagtgccccagggctacacatgcatccaggcttctgctgggggccaccccttggaactcagtgctggacttctgggtggaactcaacccgtcatctgctaccgcaggggccgtgacaagccccccctcgttgagctgggggtgttgtatgaggggaaggaacgtcccaagcctgcactcttacgaaaagcggctgtactgaggacagcggtggaggccgaggtggtggaggggatgcaccccagtgtccactttcggacacaagcctccctccag

SEQ ID NO: 361245 - DNA, 764 bp, Homo sapiens
tagataagtaagaaagacctggcattgtactcaccctgatgtgtcccctgtcctacctaggagatgaaagttgcacagcggatggcacagaagtcagcagctgtgcctgagctgtgggcccggtgcctgctggggcactgctatgggctgtggttcctgtgtctgcctgcctatgtgcggtcggcaccctcccgagtgcaggcactgcacacagcctaccatgtgctgcgccagatggagagcggcaaggtggtgctccctgatgaggtaggcaatctatgtgaccatgctcatacccaggcccagtgagccttgtgcagctggagagggctgtgagagggaaacttggtggagactaaggaaagaagttgcagagccccagagctgggcagattatctataaacattcgtcgagtgaataagcatgttcagggtttagcagtgaagactgtagggtggcagggtcagcagaaagggtgggtggctctgaggtagccccaggacctgccaggggccagtgatgtctgtgagaattggggaggcaggaagagggtgcttgctgagactttggttttggttgagagtgagtctcccattgtcctgtgcctctcctggcccaggtgtgttaccgggtactgatgcagctctgctcacactatgggcagcctgtgctgtctgtgcgggtcatgctggagatgcgtcaggcaggcattgtgcccaacaccatcacctatggctactacaataaggtacctactttgggg

SEQ ID NO: 361246 - DNA, 5519 bp, Homo sapiens
cgccggccgaggaggaggggtgggggtagcggcggcgcccgcggcccggagcgggggttgggggagtagagaaagcggggcgcgcggaggaacgctgggtccccggcgccgcgggagctgggaggaccgagccggccgagcgagcagcgcggcagcacagtccccgcgtggcgcagcgcggcggggacgcggggaccgcccggatctccttccactgcgccccgcgctctgcggtcctcggccgcctcttcttccttcactcactgcccgggcgggagcggcgcccaagtcgggtgcgccatgtctggggccgggtagccccgccgcccgccggcccgccagctcgccctccgagccacccgccagcgggccggccggccgggaagcgcgggacaggcagatgcagtgagtgaggggggggccatggcggaggagcggcccccccggctggtggattacttcgtggtagctgggcttgcagggaacggagcacccatccctgaggaaacgtgggttcctgaacccagtgggcccctgcgccctccccggccagctgagcccatcacagatgtggcagtcatcgctagggcactgggcgaggaagtgccccagggctacacatgcatccaggcttctgctgggggccaccccttggaactcagtgctggacttctgggtggaactcaacccgtcatctgctaccgcaggggccgtgacaagccccccctcgttgagctgggggtgttgtatgaggggaaggaacgtcccaagcctggcttccaagtgcttgacacgacaccctacagccactcagcaaacctggcccctccaggccccgggcacccccgcacctacctcacttaccggcgggcagcagagggggcagggctgcatgccctgggcatcactgacctctgcctggtgctgcccagtaagggcgagggcactcctcatacttactgccggctgccccgcaacctcaaccctggcatgtggggcccagcagtgtacctgtgctataaggtgggcctggcgaaggccaacacgctggtgtacgaggcagttctacgaggcgttcccaagggccaggctatcagagcgacaggcacgggcactgggcctgctgagcgccgtggagcggggtcgggcactggggggcagagctgtgcgcagccggcgtgccatcgctgtgctgtcccgctggcctgccttccctgccttccgcgccttcctcaccttcctttaccgctactccgtctcaggcccccaccgcctacccttggaagcgcacatctcccacttcattcacaacgttcccttcccttccccacagagaccccgcatcctagtgcagatgtctccctatgacaacttgctcctctgtcagcctgtatcctcacccctgcccctcagtggtgccagcttcctgcagctgctgcagagcctgggccctgagctggctatcacactgctgctggctgtgctcacagagcacaagctgctagtccactcgctgcggccagacctgctcaccagcgtctgtgaggccctcgtctcgatgatcttcccactgcactggcagtgcccctacattcctctgtgcccgctggtgctggcagatgtgctgagtgccccagtgcccttcattgtgggtatccactccagctactttgatctgcatgacccgcctgctgatgtcatctgtgtagaccttgataccaacacgctcttccagactgaggaaaagaagctcctctcccctcggaccctgccccgcagaccctacaaggttctgctggccacactgacaaacctgtaccagcagctggaccagacatacactggacctgaggaggaagcatccctggagttcctactgacagactacgaggcagtgtgtggccgcagggcccggctggagcgcgaagtccaaggagccttcctccgcttcatggcctgtctgctcaagggctaccgggtcttcctgcgcccactcacccaggccccctccgagggagctcgtgatgttgacaaccttttcttcctgcagggcttcctcaaatcccgggaacgctccagccacaaactttactctcagctgctgcacacacagatgttctcacagttcattgaggagtgctcttttggctctgctcgccatgctgcccttgaattctttgactcttgtgttgaaaaggtccacccagagcaggagaagcctgagccgacacccttagtggagctagaggagctgtcaggaagtgagctcactgtctttatcacacctcccgaggagcctgccttaccagagggcagtgaatccactccccagtactgctatgatggattcccagagctacgggctgagttgtttgagtctcttcaagagcaacctggggccctgcctgtgccaggcccttcccgtagcgcccccagcagtcctgctcctcgccgtaccaaacaggagatgaaagttgcacagcggatggcacagaagtcagcagctgtgcctgagctgtgggcccggtgcctgctggggcactgctatgggctgtggttcctgtgtctgcctgcctatgtgcggtcggcaccctcccgagtgcaggcactgcacacagcctaccatgtgctgcgccagatggagagcggcaaggtggtgctccctgatgaggtgtgttaccgggtactgatgcagctctgctcacactatgggcagcctgtgctgtctgtgcgggtcatgctggagatgcgtcaggcaggcattgtgcccaacaccatcacctatggctactacaataaggctgtgttggaaagcaagtggccgtctggcacaccaggtgggcgtctgcgctgggccaagctccggaatgttgtcctgggggctgctcagttccgccagcccttgagagaacggcaacagcagcagcagcagcagcaacagcagcagcagcagcagcagcagcaggagcaggtgtcagcacatcaagaggcaggcagctcccaggcagagccctatttggagcgcccttcccctactcgccctcttcagcgccagactacttgggctgggcgaagtctgagagacccagcctcaccccctggacgcctggtgaagagtggtagcctgggcagtgcccgaggggcacagcccactgtggaggccggtgtggcccacatgatagaggccttgggggtcctggaaccccggggatcacctgtgccctggcacgatggaagtctctcagacctgagcctgacaggggaggagccgctccctggaggcagcccagggggctcaggctcagccctgagtgcccagtccactgaggccctggaagggctaagtgggcggggacccaaggctggtgggcgacaggatgaggcaggcaccccccgacgagggctgggtgcccgcctccaacagctgctcactccttcccgccactcccctgcctcccgcattcccccacctgagctgcctcctgacctgccacccccagcccgccgcagccccatggacagtcttctgcacccccgggagcgccctggatccactgcctccgagagctcagcctctctgggcagtgagtgggacctctcagaatcttctctcagcaacctgagtcttcgccgttcctcagagcgcctcagtgacacccctggatccttccagtcaccttccctggaaattctgctgtccagctgctccctgtgccgtgcctgtgattcgctggtgtatgatgaggaaatcatggctggctgggcacctgatgactctaacctcaacacaacctgccccttctgcgcctgcccctttgtgcccctgctcagtgtccagacccttgattcccggcccagtgtccccagccccaaatctgctggtgccagtggcagcaaagatgctcctgtccctggtggtcctggccctgtgctcagtgaccgaaggctctgccttgctctggatgagccccagctctgcaacgggcacatggggggagcctcccggcgggttgagagtggggcatgggcatacctgagccccctggtgctgcgtaaggagctggagtcgctggtagagaacgagggcagtgaggtgctggcgttgcctgaactgccctctgcccaccccatcatcttctggaaccttttgtggtatttccaacggctacgcctgcccagtattctaccaggcctggtgctggcctcctgtgatgggccttcgcactcccaggccccatctccttggctaacccctgatccagcctctgttcaggtacggctgctgtgggatgtactgacccctgaccccaatagctgcccacctctctatgtgctctggagggtccacagccagatcccccagcgggtggtatggccaggccctgtacctgcatcccttagtttggcactgttggagtcagtgctgcgccatgttggactcaatgaagtgcacaaggctgtggggctcctgctggaaactctagggcccccacccactggcctgcacctgcagaggggaatctaccgtgagatattattcctgacaatggctgctctgggcaaggaccacgtggacatagtggccttcgataagaagtacaagtctgcctttaacaagctggccagcagcatgggcaaggaggagctgaggcaccggcgggcgcagatgcccactcccaaggccattgactgccgaaaatgttttggagcacctccagaatgctagagaccttaagcttccctctccagcctagggtggggaagtgaggaagaagggattctagagttaaactgcttccctgttgccttcatggagttgggaacaggctgggaaggatgcccagtcaaaggctccaagcgaggacaacaggaagagggatccactgttaccaaaagtcctgattcccccatcaccaacctacccagtttgttcgtgctgatgttgggggagatctggggggagttggtacagctctgttcttcccttgtcctataccgggaactcccctccagggtacccacagatctgcattgccctggtcattttagaagtttttgttttaaaaaacaactggaaagatgcagagctactgagcctttgccctgaatgggaggtagggatgtcattctccaccaataatggtccctcttccctgacgttgctgaaggagcccaaggctctccatgcctttctacctaagtgtttgtattttattttaaattatttattctggagccacagcccccttgcttatgaggttcttatggagagtgagaaagggaagggaaatagggcaccatggtccggtggtttgtagttccttcaaagtcaggcactgggagctagaggagtctcaagctccccttaggaagaactggtgccccctccagtcctaatttttcttgcctgccccgccttggggaatgcctcacccacccaggtcctgacctgtgcaataaggattgttccctgcgaagttttgttggatgtaaatatagtaaaagctgcttctgtcttt

SEQ ID NO: 361247 - DNA, 5710 bp, Homo sapiens
cgccggccgaggaggaggggtgggggtagcggcggcgcccgcggcccggagcgggggttgggggagtagagaaagcggggcgcgcggaggaacgctgggtccccggcgccgcgggagctgggaggaccgagccggccgagcgagcagcgcggcagcacagtccccgcgtggcgcagcgcggcggggacgcggggaccgcccggatctccttccactgcgccccgcgctctgcggtcctcggccgcctcttcttccttcactcactgcccgggcgggagcggcgcccaagtcgggtgcgccatgtctggggccgggtagccccgccgcccgccggcccgccagctcgccctccgagccacccgccagcgggccggccggccgggaagcgcgggacaggcagatgcagtgagtgaggggggggccatggcggaggagcggcccccccggctggtggattacttcgtggtagctgggcttgcagggaacggagcacccatccctgaggaaacgtgggttcctgaacccagtgggcccctgcgccctccccggccagctgagcccatcacagatgtggcagtcatcgctagggcactgggcgaggaagtgccccagggctacacatgcatccaggcttctgctgggggccaccccttggaactcagtgctggacttctgggtggaactcaacccgtcatctgctaccgcaggggccgtgacaagccccccctcgttgagctgggggtgttgtatgaggggaaggaacgtcccaagcctggcttccaagtgcttgacacgacaccctacagccactcagcaaacctggcccctccaggccccgggcacccccgcacctacctcacttaccggcgggcagcagagggggcagggctgcatgccctgggcatcactgacctctgcctggtgctgcccagtaagggcgagggcactcctcatacttactgccggctgccccgcaacctcaaccctggcatgtggggcccagcagtgtacctgtgctataaggtgggcctggcgaaggccaacacgctggtgtacgaggcagagctgctgggccgctacccggaggaggacaatgaggcgttcccgctgcccgagtcagtgcccgtcttctgcctgcccatgggggccactatcgagtgctggcctgcccagaccaagtaccccgtgcccgtcttctccacctttgtgctcacgggtgcagctggtgataaggtgtatggtgccgccctgcagttctacgaggcgttcccaagggccaggctatcagagcgacaggcacgggcactgggcctgctgagcgccgtggagcggggtcgggcactggggggcagagctgtgcgcagccggcgtgccatcgctgtgctgtcccgctggcctgccttccctgccttccgcgccttcctcaccttcctttaccgctactccgtctcaggcccccaccgcctacccttggaagcgcacatctcccacttcattcacaacgttcccttcccttccccacagagaccccgcatcctagtgcagatgtctccctatgacaacttgctcctctgtcagcctgtatcctcacccctgcccctcagtggtgccagcttcctgcagctgctgcagagcctgggccctgagctggctatcacactgctgctggctgtgctcacagagcacaagctgctagtccactcgctgcggccagacctgctcaccagcgtctgtgaggccctcgtctcgatgatcttcccactgcactggcagtgcccctacattcctctgtgcccgctggtgctggcagatgtgctgagtgccccagtgcccttcattgtgggtatccactccagctactttgatctgcatgacccgcctgctgatgtcatctgtgtagaccttgataccaacacgctcttccagactgaggaaaagaagctcctctcccctcggaccctgccccgcagaccctacaaggttctgctggccacactgacaaacctgtaccagcagctggaccagacatacactggacctgaggaggaagcatccctggagttcctactgacagactacgaggcagtgtgtggccgcagggcccggctggagcgcgaagtccaaggagccttcctccgcttcatggcctgtctgctcaagggctaccgggtcttcctgcgcccactcacccaggccccctccgagggagctcgtgatgttgacaaccttttcttcctgcagggcttcctcaaatcccgggaacgctccagccacaaactttactctcagctgctgcacacacagatgttctcacagttcattgaggagtgctcttttggctctgctcgccatgctgcccttgaattctttgactcttgtgttgaaaaggtccacccagagcaggagaagcctgagccgacacccttagtggagctagaggagctgtcaggaagtgagctcactgtctttatcacacctcccgaggagcctgccttaccagagggcagtgaatccactccccagtactgctatgatggattcccagagctacgggctgagttgtttgagtctcttcaagagcaacctggggccctgcctgtgccaggcccttcccgtagcgcccccagcagtcctgctcctcgccgtaccaaacaggagatgaaagttgcacagcggatggcacagaagtcagcagctgtgcctgagctgtgggcccggtgcctgctggggcactgctatgggctgtggttcctgtgtctgcctgcctatgtgcggtcggcaccctcccgagtgcaggcactgcacacagcctaccatgtgctgcgccagatggagagcggcaaggtggtgctccctgatgaggtgtgttaccgggtactgatgcagctctgctcacactatgggcagcctgtgctgtctgtgcgggtcatgctggagatgcgtcaggcaggcattgtgcccaacaccatcacctatggctactacaataaggctgtgttggaaagcaagtggccgtctggcacaccaggtgggcgtctgcgctgggccaagctccggaatgttgtcctgggggctgctcagttccgccagcccttgagagaacggcaacagcagcagcagcagcagcaacagcagcagcagcagcagcagcagcaggagcaggtgtcagcacatcaagaggcaggcagctcccaggcagagccctatttggagcgcccttcccctactcgccctcttcagcgccagactacttgggctgggcgaagtctgagagacccagcctcaccccctggacgcctggtgaagagtggtagcctgggcagtgcccgaggggcacagcccactgtggaggccggtgtggcccacatgatagaggccttgggggtcctggaaccccggggatcacctgtgccctggcacgatggaagtctctcagacctgagcctgacaggggaggagccgctccctggaggcagcccagggggctcaggctcagccctgagtgcccagtccactgaggccctggaagggctaagtgggcggggacccaaggctggtgggcgacaggatgaggcaggcaccccccgacgagggctgggtgcccgcctccaacagctgctcactccttcccgccactcccctgcctcccgcattcccccacctgagctgcctcctgacctgccacccccagcccgccgcagccccatggacagtcttctgcacccccgggagcgccctggatccactgcctccgagagctcagcctctctgggcagtgagtgggacctctcagaatcttctctcagcaacctgagtcttcgccgttcctcagagcgcctcagtgacacccctggatccttccagtcaccttccctggaaattctgctgtccagctgctccctgtgccgtgcctgtgattcgctggtgtatgatgaggaaatcatggctggctgggcacctgatgactctaacctcaacacaacctgccccttctgcgcctgcccctttgtgcccctgctcagtgtccagacccttgattcccggcccagtgtccccagccccaaatctgctggtgccagtggcagcaaagatgctcctgtccctggtggtcctggccctgtgctcagtgaccgaaggctctgccttgctctggatgagccccagctctgcaacgggcacatggggggagcctcccggcgggttgagagtggggcatgggcatacctgagccccctggtgctgcgtaaggagctggagtcgctggtagagaacgagggcagtgaggtgctggcgttgcctgaactgccctctgcccaccccatcatcttctggaaccttttgtggtatttccaacggctacgcctgcccagtattctaccaggcctggtgctggcctcctgtgatgggccttcgcactcccaggccccatctccttggctaacccctgatccagcctctgttcaggtacggctgctgtgggatgtactgacccctgaccccaatagctgcccacctctctatgtgctctggagggtccacagccagatcccccagcgggtggtatggccaggccctgtacctgcatcccttagtttggcactgttggagtcagtgctgcgccatgttggactcaatgaagtgcacaaggctgtggggctcctgctggaaactctagggcccccacccactggcctgcacctgcagaggggaatctaccgtgagatattattcctgacaatggctgctctgggcaaggaccacgtggacatagtggccttcgataagaagtacaagtctgcctttaacaagctggccagcagcatgggcaaggaggagctgaggcaccggcgggcgcagatgcccactcccaaggccattgactgccgaaaatgttttggagcacctccagaatgctagagaccttaagcttccctctccagcctagggtggggaagtgaggaagaagggattctagagttaaactgcttccctgttgccttcatggagttgggaacaggctgggaaggatgcccagtcaaaggctccaagcgaggacaacaggaagagggatccactgttaccaaaagtcctgattcccccatcaccaacctacccagtttgttcgtgctgatgttgggggagatctggggggagttggtacagctctgttcttcccttgtcctataccgggaactcccctccagggtacccacagatctgcattgccctggtcattttagaagtttttgttttaaaaaacaactggaaagatgcagagctactgagcctttgccctgaatgggaggtagggatgtcattctccaccaataatggtccctcttccctgacgttgctgaaggagcccaaggctctccatgcctttctacctaagtgtttgtattttattttaaattatttattctggagccacagcccccttgcttatgaggttcttatggagagtgagaaagggaagggaaatagggcaccatggtccggtggtttgtagttccttcaaagtcaggcactgggagctagaggagtctcaagctccccttaggaagaactggtgccccctccagtcctaatttttcttgcctgccccgccttggggaatgcctcacccacccaggtcctgacctgtgcaataaggattgttccctgcgaagttttgttggatgtaaatatagtaaaagctgcttctgtcttt

SEQ ID NO: 361248 - DNA, 5540 bp, Homo sapiens
cgccggccgaggaggaggggtgggggtagcggcggcgcccgcggcccggagcgggggttgggggagtagagaaagcggggcgcgcggaggaacgctgggtccccggcgccgcgggagctgggaggaccgagccggccgagcgagcagcgcggcagcacagtccccgcgtggcgcagcgcggcggggacgcggggaccgcccggatctccttccactgcgccccgcgctctgcggtcctcggccgcctcttcttccttcactcactgcccgggcgggagcggcgcccaagtcgggtgcgccatgtctggggccgggtagccccgccgcccgccggcccgccagctcgccctccgagccacccgccagcgggccggccggccgggaagcgcgggacaggcagatgcagtgagtgaggggggggccatggcggaggagcggcccccccggctggtggattacttcgtggtagctgggcttgcagggaacggagcacccatccctgaggaaacgtgggttcctgaacccagtgggcccctgcgccctccccggccagctgagcccatcacagatgtggcagtcatcgctagggcactgggcgaggaagtgccccagggctacacatgcatccaggcttctgctgggggccaccccttggaactcagtgctggacttctgggtggaactcaacccgtcatctgctaccgcaggggccgtgacaagccccccctcgttgagctgggggtgttgtatgaggggaaggaacgtcccaagcctggcttccaagtgcttgacacgacaccctacagccactcagcaaacctggcccctccaggccccgggcacccccgcacctacctcacttaccggcgggcagcagagggggcagggctgcatgccctgggcatcactgacctctgcctggtgctgcccagtaagggcgagggcactcctcatacttactgccggctgccccgcaacctcaaccctggcatgtggggcccagcagtgtacctgtgctataaggtgggcctggcgaaggccaacacgctggtgtacgaggcaggtgtatggtgccgccctgcagttctacgaggcgttcccaagggccaggctatcagagcgacaggcacgggcactgggcctgctgagcgccgtggagcggggtcgggcactggggggcagagctgtgcgcagccggcgtgccatcgctgtgctgtcccgctggcctgccttccctgccttccgcgccttcctcaccttcctttaccgctactccgtctcaggcccccaccgcctacccttggaagcgcacatctcccacttcattcacaacgttcccttcccttccccacagagaccccgcatcctagtgcagatgtctccctatgacaacttgctcctctgtcagcctgtatcctcacccctgcccctcagtggtgccagcttcctgcagctgctgcagagcctgggccctgagctggctatcacactgctgctggctgtgctcacagagcacaagctgctagtccactcgctgcggccagacctgctcaccagcgtctgtgaggccctcgtctcgatgatcttcccactgcactggcagtgcccctacattcctctgtgcccgctggtgctggcagatgtgctgagtgccccagtgcccttcattgtgggtatccactccagctactttgatctgcatgacccgcctgctgatgtcatctgtgtagaccttgataccaacacgctcttccagactgaggaaaagaagctcctctcccctcggaccctgccccgcagaccctacaaggttctgctggccacactgacaaacctgtaccagcagctggaccagacatacactggacctgaggaggaagcatccctggagttcctactgacagactacgaggcagtgtgtggccgcagggcccggctggagcgcgaagtccaaggagccttcctccgcttcatggcctgtctgctcaagggctaccgggtcttcctgcgcccactcacccaggccccctccgagggagctcgtgatgttgacaaccttttcttcctgcagggcttcctcaaatcccgggaacgctccagccacaaactttactctcagctgctgcacacacagatgttctcacagttcattgaggagtgctcttttggctctgctcgccatgctgcccttgaattctttgactcttgtgttgaaaaggtccacccagagcaggagaagcctgagccgacacccttagtggagctagaggagctgtcaggaagtgagctcactgtctttatcacacctcccgaggagcctgccttaccagagggcagtgaatccactccccagtactgctatgatggattcccagagctacgggctgagttgtttgagtctcttcaagagcaacctggggccctgcctgtgccaggcccttcccgtagcgcccccagcagtcctgctcctcgccgtaccaaacaggagatgaaagttgcacagcggatggcacagaagtcagcagctgtgcctgagctgtgggcccggtgcctgctggggcactgctatgggctgtggttcctgtgtctgcctgcctatgtgcggtcggcaccctcccgagtgcaggcactgcacacagcctaccatgtgctgcgccagatggagagcggcaaggtggtgctccctgatgaggtgtgttaccgggtactgatgcagctctgctcacactatgggcagcctgtgctgtctgtgcgggtcatgctggagatgcgtcaggcaggcattgtgcccaacaccatcacctatggctactacaataaggctgtgttggaaagcaagtggccgtctggcacaccaggtgggcgtctgcgctgggccaagctccggaatgttgtcctgggggctgctcagttccgccagcccttgagagaacggcaacagcagcagcagcagcagcaacagcagcagcagcagcagcagcagcaggagcaggtgtcagcacatcaagaggcaggcagctcccaggcagagccctatttggagcgcccttcccctactcgccctcttcagcgccagactacttgggctgggcgaagtctgagagacccagcctcaccccctggacgcctggtgaagagtggtagcctgggcagtgcccgaggggcacagcccactgtggaggccggtgtggcccacatgatagaggccttgggggtcctggaaccccggggatcacctgtgccctggcacgatggaagtctctcagacctgagcctgacaggggaggagccgctccctggaggcagcccagggggctcaggctcagccctgagtgcccagtccactgaggccctggaagggctaagtgggcggggacccaaggctggtgggcgacaggatgaggcaggcaccccccgacgagggctgggtgcccgcctccaacagctgctcactccttcccgccactcccctgcctcccgcattcccccacctgagctgcctcctgacctgccacccccagcccgccgcagccccatggacagtcttctgcacccccgggagcgccctggatccactgcctccgagagctcagcctctctgggcagtgagtgggacctctcagaatcttctctcagcaacctgagtcttcgccgttcctcagagcgcctcagtgacacccctggatccttccagtcaccttccctggaaattctgctgtccagctgctccctgtgccgtgcctgtgattcgctggtgtatgatgaggaaatcatggctggctgggcacctgatgactctaacctcaacacaacctgccccttctgcgcctgcccctttgtgcccctgctcagtgtccagacccttgattcccggcccagtgtccccagccccaaatctgctggtgccagtggcagcaaagatgctcctgtccctggtggtcctggccctgtgctcagtgaccgaaggctctgccttgctctggatgagccccagctctgcaacgggcacatggggggagcctcccggcgggttgagagtggggcatgggcatacctgagccccctggtgctgcgtaaggagctggagtcgctggtagagaacgagggcagtgaggtgctggcgttgcctgaactgccctctgcccaccccatcatcttctggaaccttttgtggtatttccaacggctacgcctgcccagtattctaccaggcctggtgctggcctcctgtgatgggccttcgcactcccaggccccatctccttggctaacccctgatccagcctctgttcaggtacggctgctgtgggatgtactgacccctgaccccaatagctgcccacctctctatgtgctctggagggtccacagccagatcccccagcgggtggtatggccaggccctgtacctgcatcccttagtttggcactgttggagtcagtgctgcgccatgttggactcaatgaagtgcacaaggctgtggggctcctgctggaaactctagggcccccacccactggcctgcacctgcagaggggaatctaccgtgagatattattcctgacaatggctgctctgggcaaggaccacgtggacatagtggccttcgataagaagtacaagtctgcctttaacaagctggccagcagcatgggcaaggaggagctgaggcaccggcgggcgcagatgcccactcccaaggccattgactgccgaaaatgttttggagcacctccagaatgctagagaccttaagcttccctctccagcctagggtggggaagtgaggaagaagggattctagagttaaactgcttccctgttgccttcatggagttgggaacaggctgggaaggatgcccagtcaaaggctccaagcgaggacaacaggaagagggatccactgttaccaaaagtcctgattcccccatcaccaacctacccagtttgttcgtgctgatgttgggggagatctggggggagttggtacagctctgttcttcccttgtcctataccgggaactcccctccagggtacccacagatctgcattgccctggtcattttagaagtttttgttttaaaaaacaactggaaagatgcagagctactgagcctttgccctgaatgggaggtagggatgtcattctccaccaataatggtccctcttccctgacgttgctgaaggagcccaaggctctccatgcctttctacctaagtgtttgtattttattttaaattatttattctggagccacagcccccttgcttatgaggttcttatggagagtgagaaagggaagggaaatagggcaccatggtccggtggtttgtagttccttcaaagtcaggcactgggagctagaggagtctcaagctccccttaggaagaactggtgccccctccagtcctaatttttcttgcctgccccgccttggggaatgcctcacccacccaggtcctgacctgtgcaataaggattgttccctgcgaagttttgttggatgtaaatatagtaaaagctgcttctgtcttt

SEQ ID NO: 361249 - DNA, 5833 bp, Homo sapiens
cgccggccgaggaggaggggtgggggtagcggcggcgcccgcggcccggagcgggggttgggggagtagagaaagcggggcgcgcggaggaacgctgggtccccggcgccgcgggagctgggaggaccgagccggccgagcgagcagcgcggcagcacagtccccgcgtggcgcagcgcggcggggacgcggggaccgcccggatctccttccactgcgccccgcgctctgcggtcctcggccgcctcttcttccttcactcactgcccgggcgggagcggcgcccaagtcgggtgcgccatgtctggggccgggtagccccgccgcccgccggcccgccagctcgccctccgagccacccgccagcgggccggccggccgggaagcgcgggacaggcagatgcagtgagtgaggggggggccatggcggaggagcggcccccccggctggtggattacttcgtggtagctgggcttgcagggaacggagcacccatccctgaggaaacgtgggttcctgaacccagtgggcccctgcgccctccccggccagctgagcccatcacagatgtggcagtcatcgctagggcactgggcgaggaagtgccccagggctacacatgcatccaggcttctgctgggggccaccccttggaactcagtgctggacttctgggtggaactcaacccgtcatctgctaccgcaggggccgtgacaagccccccctcgttgagctgggggtgttgtatgaggggaaggaacgtcccaagcctggcttccaagtgcttgacacgacaccctacagccactcagcaaacctggcccctccaggccccgggcacccccgcacctacctcacttaccggcgggcagcagagggggcagggctgcatgccctgggcatcactgacctctgcctggtgctgcccagtaagggcgagggcactcctcatacttactgccggctgccccgcaacctcaaccctggcatgtggggcccagcagtgtacctgtgctataaggtgggcctggcgaaggccaacacgctggtgtacgaggcaggtgagtggcccctttatccctccaatcctgtgaccctacatccctttgccctggtgcctcttggcaggcaccttaagtgtccccagagtttactttctctttgctactcgggccttctctgggatcccttggttcatttcccttggagtctgatggaccctgctccttttgggtacccccaactatgctgggggtgcagagctgctgggccgctacccggaggaggacaatgaggcgttcccgctgcccgagtcagtgcccgtcttctgcctgcccatgggggccactatcgagtgctggcctgcccagaccaagtaccccgtgcccgtcttctccacctttgtgctcacgggtgcagctggtgataaggtgtatggtgccgccctgcagttctacgaggcgttcccaagggccaggctatcagagcgacaggcacgggcactgggcctgctgagcgccgtggagcggggtcgggcactggggggcagagctgtgcgcagccggcgtgccatcgctgtgctgtcccgctggcctgccttccctgccttccgcgccttcctcaccttcctttaccgctactccgtctcaggcccccaccgcctacccttggaagcgcacatctcccacttcattcacaacgttcccttcccttccccacagagaccccgcatcctagtgcagatgtctccctatgacaacttgctcctctgtcagcctgtatcctcacccctgcccctcagtggtgccagcttcctgcagctgctgcagagcctgggccctgagctggctatcacactgctgctggctgtgctcacagagcacaagctgctagtccactcgctgcggccagacctgctcaccagcgtctgtgaggccctcgtctcgatgatcttcccactgcactggcagtgcccctacattcctctgtgcccgctggtgctggcagatgtgctgagtgccccagtgcccttcattgtgggtatccactccagctactttgatctgcatgacccgcctgctgatgtcatctgtgtagaccttgataccaacacgctcttccagactgaggaaaagaagctcctctcccctcggaccctgccccgcagaccctacaaggttctgctggccacactgacaaacctgtaccagcagctggaccagacatacactggacctgaggaggaagcatccctggagttcctactgacagactacgaggcagtgtgtggccgcagggcccggctggagcgcgaagtccaaggagccttcctccgcttcatggcctgtctgctcaagggctaccgggtcttcctgcgcccactcacccaggccccctccgagggagctcgtgatgttgacaaccttttcttcctgcagggcttcctcaaatcccgggaacgctccagccacaaactttactctcagctgctgcacacacagatgttctcacagttcattgaggagtgctcttttggctctgctcgccatgctgcccttgaattctttgactcttgtgttgaaaaggtccacccagagcaggagaagcctgagccgacacccttagtggagctagaggagctgtcaggaagtgagctcactgtctttatcacacctcccgaggagcctgccttaccagagggcagtgaatccactccccagtactgctatgatggattcccagagctacgggctgagttgtttgagtctcttcaagagcaacctggggccctgcctgtgccaggcccttcccgtagcgcccccagcagtcctgctcctcgccgtaccaaacaggagatgaaagttgcacagcggatggcacagaagtcagcagctgtgcctgagctgtgggcccggtgcctgctggggcactgctatgggctgtggttcctgtgtctgcctgcctatgtgcggtcggcaccctcccgagtgcaggcactgcacacagcctaccatgtgctgcgccagatggagagcggcaaggtggtgctccctgatgaggtgtgttaccgggtactgatgcagctctgctcacactatgggcagcctgtgctgtctgtgcgggtcatgctggagatgcgtcaggcaggcattgtgcccaacaccatcacctatggctactacaataaggctgtgttggaaagcaagtggccgtctggcacaccaggtgggcgtctgcgctgggccaagctccggaatgttgtcctgggggctgctcagttccgccagcccttgagagaacggcaacagcagcagcagcagcagcaacagcagcagcagcagcagcagcagcaggagcaggtgtcagcacatcaagaggcaggcagctcccaggcagagccctatttggagcgcccttcccctactcgccctcttcagcgccagactacttgggctgggcgaagtctgagagacccagcctcaccccctggacgcctggtgaagagtggtagcctgggcagtgcccgaggggcacagcccactgtggaggccggtgtggcccacatgatagaggccttgggggtcctggaaccccggggatcacctgtgccctggcacgatggaagtctctcagacctgagcctgacaggggaggagccgctccctggaggcagcccagggggctcaggctcagccctgagtgcccagtccactgaggccctggaagggctaagtgggcggggacccaaggctggtgggcgacaggatgaggcaggcaccccccgacgagggctgggtgcccgcctccaacagctgctcactccttcccgccactcccctgcctcccgcattcccccacctgagctgcctcctgacctgccacccccagcccgccgcagccccatggacagtcttctgcacccccgggagcgccctggatccactgcctccgagagctcagcctctctgggcagtgagtgggacctctcagaatcttctctcagcaacctgagtcttcgccgttcctcagagcgcctcagtgacacccctggatccttccagtcaccttccctggaaattctgctgtccagctgctccctgtgccgtgcctgtgattcgctggtgtatgatgaggaaatcatggctggctgggcacctgatgactctaacctcaacacaacctgccccttctgcgcctgcccctttgtgcccctgctcagtgtccagacccttgattcccggcccagtgtccccagccccaaatctgctggtgccagtggcagcaaagatgctcctgtccctggtggtcctggccctgtgctcagtgaccgaaggctctgccttgctctggatgagccccagctctgcaacgggcacatggggggagcctcccggcgggttgagagtggggcatgggcatacctgagccccctggtgctgcgtaaggagctggagtcgctggtagagaacgagggcagtgaggtgctggcgttgcctgaactgccctctgcccaccccatcatcttctggaaccttttgtggtatttccaacggctacgcctgcccagtattctaccaggcctggtgctggcctcctgtgatgggccttcgcactcccaggccccatctccttggctaacccctgatccagcctctgttcaggccagatcccccagcgggtggtatggccaggccctgtacctgcatcccttagtttggcactgttggagtcagtgctgcgccatgttggactcaatgaagtgcacaaggctgtggggctcctgctggaaactctagggcccccacccactggcctgcacctgcagaggggaatctaccgtgagatattattcctgacaatggctgctctgggcaaggaccacgtggacatagtggccttcgataagaagtacaagtctgcctttaacaagctggccagcagcatgggcaaggaggagctgaggcaccggcgggcgcagatgcccactcccaaggccattgactgccgaaaatgttttggagcacctccagaatgctagagaccttaagcttccctctccagcctagggtggggaagtgaggaagaagggattctagagttaaactgcttccctgttgccttcatggagttgggaacaggctgggaaggatgcccagtcaaaggctccaagcgaggacaacaggaagagggatccactgttaccaaaagtcctgattcccccatcaccaacctacccagtttgttcgtgctgatgttgggggagatctggggggagttggtacagctctgttcttcccttgtcctataccgggaactcccctccagggtacccacagatctgcattgccctggtcattttagaagtttttgttttaaaaaacaactggaaagatgcagagctactgagcctttgccctgaatgggaggtagggatgtcattctccaccaataatggtccctcttccctgacgttgctgaaggagcccaaggctctccatgcctttctacctaagtgtttgtattttattttaaattatttattctggagccacagcccccttgcttatgaggttcttatggagagtgagaaagggaagggaaatagggcaccatggtccggtggtttgtagttccttcaaagtcaggcactgggagctagaggagtctcaagctccccttaggaagaactggtgccccctccagtcctaatttttcttgcctgccccgccttggggaatgcctcacccacccaggtcctgacctgtgcaataaggattgttccctgcgaagttttgttggatgtaaatatagtaaaagctgcttctgtcttt

SEQ ID NO: 361250 - DNA, 5004 bp, Homo sapiens
cgccggccgaggaggaggggtgggggtagcggcggcgcccgcggcccggagcgggggttgggggagtagagaaagcggggcgcgcggaggaacgctgggtccccggcgccgcgggagctgggaggaccgagccggccgagcgagcagcgcggcagcacagtccccgcgtggcgcagcgcggcggggacgcggggaccgcccggatctccttccactgcgccccgcgctctgcggtcctcggccgcctcttcttccttcactcactgcccgggcgggagcggcgcccaagtcgggtgcgccatgtctggggccgggtagccccgccgcccgccggcccgccagctcgccctccgagccacccgccagcgggccggccggccgggaagcgcgggacaggcagatgcagtgagtgaggggggggccatggcggaggagcggcccccccggctggtggattacttcgtggtagctgggcttgcagggaacggagcacccatccctgaggaaacgtgggttcctgaacccagtgggcccctgcgccctccccggccagctgagcccatcacagatgtggcagtcatcgctagggcactgggcgaggaagtgccccagggctacacatgcatccaggcttctgctgggggccaccccttggaactcagtgctggacttctgggtggaactcaacccgtcatctgctaccgcaggggccgtgacaagccccccctcgttgagctgggggtgttgtatgaggggaaggaacgtcccaagcctggcttccaagtgcttgacacgacaccctacagccactcagcaaacctggcccctccaggccccgggcacccccgcacctacctcacttaccggcgggcagcagagggggcagggctgcatgccctgggcatcactgacctctgcctggtgctgcccagtaagggcgagggcactcctcatacttactgccggctgccccgcaacctcaaccctggcatgtggggcccagcagtgtacctgtgctataaggtgggcctggcgaaggccaacacgctggtgtacgaggcaggtgagtggcccctttatccctccaatcctgtgaccctacatccctttgccctggtgcctcttggcaggcaccttaagtgtccccagagtttactttctctttgctactcgggccttctctgggatcccttggttcatttcccttggagtctgatggaccctgctccttttgggtacccccaactatgctgggggtgcagagctgctgggccgctacccggaggaggacaatgaggcgttcccgctgcccgagtcagtgcccgtcttctgcctgcccatgggggccactatcgagtgctggcctgcccagaccaagtaccccgtgcccgtcttctccacctttgtgctcacgggtgcagctggtgataaggtgtatggtgccgccctgcagttctacgaggcgttcccaagggccaggctatcagagcgacaggcacgggcactgggcctgctgagcgccgtggagcggggtcgggcactggggggcagagctgtgcgcagccggcgtgccatcgctgtgctgtcccgctggcctgccttccctgccttccgcgccttcctcaccttcctttaccgctactccgtctcaggcccccaccgcctacccttggaagcgcacatctcccacttcattcacaacgttcccttcccttccccacagagaccccgcatcctagtgcagatgtctccctatgacaacttgctcctctgtcagcctgtatcctcacccctgcccctcagtggtgccagcttcctgcagctgctgcagagcctgggccctgagctggctatcacactgctgctggctgtgctcacagagcacaagctgctagtccactcgctgcggccagacctgctcaccagcgtctgtgaggccctcgtctcgatgatcttcccactgcactggcagtgcccctacattcctctgtgcccgctggtgctggcagatgtgctgagtgccccagtgcccttcattgtgggtatccactccagctactttgatctgcatgacccgcctgctgatgtcatctgtgtagaccttgataccaacacgctcttccagactgaggaaaagaagctcctctcccctcggaccctgccccgcagaccctacaaggttctgctggccacactgacaaacctgtaccagcagctggaccagacatacactggacctgaggaggaagcatccctggagttcctactgacagactacgaggcagtgtgtggccgcagggcccggctggagcgcgaagtccaaggagccttcctccgcttcatggcctgtctgctcaagggctaccgggtcttcctgcgcccactcacccaggccccctccgagggagctcgtgatgttgacaaccttttcttcctgcagggcttcctcaaatcccgggaacgctccagccacaaactttactctcagctgctgcacacacagatgttctcacagttcattgaggagtgctcttttggctctgctcgccatgctgcccttgaattctttgactcttgtgttgaaaaggtccacccagagcaggagaagcctgagccgacacccttagtggagctagaggagctgtcaggaagtgagctcactgtctttatcacacctcccgaggagcctgccttaccagagggcagtgaatccactccccagtactgctatgatggattcccagagctacgggctgagttgtttgagtctcttcaagagcaacctggggccctgcctgtgccaggcccttcccgtagcgcccccagcagtcctgctcctcgccgtaccaaacaggagatgaaagttgcacagcggatggcacagaagtcagcagctgtgcctgagctgtgggcccggtgcctgctggggcactgctatgggctgtggttcctgtgtctgcctgcctatgtgcggtcggcaccctcccgagtgcaggcactgcacacagcctaccatgtgctgcgccagatggagagcggcaaggtggtgctccctgatgaggtgtgttaccgggtactgatgcagctctgctcacactatgggcagcctgtgctgtctgtgcgggtcatgctggagatgcgtcaggcaggcattgtgcccaacaccatcacctatggctactacaataaggctgtgttggaaagcaagtggccgtctggcacaccaggtgggcgtctgcgctgggccaagctccggaatgttgtcctgggggctgctcagttccgccagcccttgagagaacggcaacagcagcagcagcagcagcaacagcagcagcagcagcagcagcagcaggagcaggtgtcagcacatcaagaggcaggcagctcccaggcagagccctatttggagcgcccttcccctactcgccctcttcagcgccagactacttgggctgggcgaagtctgagagacccagcctcaccccctggacgcctggtgaagagtggtagcctgggcagtgcccgaggggcacagcccactgtggaggccggtgtggcccacatgatagaggccttgggggtcctggaaccccggggatcacctgtgccctggcacgatggaagtctctcagacctgagcctgacaggggaggagccgctccctggaggcagcccagggggctcaggctcagccctgagtgcccagtccactgaggccctggaagggctaagtgggcggggacccaaggctggtgggcgacaggatgaggcaggcaccccccgacgagggctgggtgcccgcctccaacagctgctcactccttcccgccactcccctgcctcccgcattcccccacctgagctgcctcctgacctgccacccccagcccgccgcagccccatggacagtcttctgcacccccgggagcgccctggatccactgcctccgagagctcagcctctctgggcagtgagtgggacctctcagaatcttctctcagcaacctgagtcttcgccgttcctcagagcgcctcagtgacacccctggatccttccagtcaccttccctggaaattctgctgtccagctgctccctgtgccgtgcctgtgattcgctggtgtatgatgaggaaatcatggctggctgggcacctgatgactctaacctcaacacaacctgccccttctgcgcctgcccctttgtgcccctgctcagtgtccagacccttgattcccggcccagtgtccccagccccaaatctgctggtgccagtggcagcaaagatgctcctgtccctggtggtcctggccctgtgctcagtgaccgaaggctctgccttgctctggatgagccccagctctgcaacgggcacatggggggagcctcccggcgggttgagagtggggcatgggcatacctgagccccctggtgctgcgtaaggagctggagtcgctggtagagaacgagggcagtgaggtgctggcgttgcctgaactgccctctgcccaccccatcatcttctggaaccttttgtggtatttccaacggctacgcctgcccagtattctaccaggcctggtgctggcctcctgtgatgggccttcgcactcccaggtcagtgcccccatgtggcccctgtttcctaagtgcctccctcatctctcagccatttgtccactgtgtccttggcactgtagaaagagcatagactggccaggcacggtggctcatgcctgtaatcccagcactttgggaggccgaggtgggcgaatcacctgaggtcaggagttcgagaccagcctgaccaactgggagaaaccctgtctctactaaaaatacaaaaaaaattagccaggcttggtggtgcatgcctgtaatcccagctactcgggaggctgaggtgggagaattgcttgaacctgggaggcggaggttgtggtgagccgagatcgcgccattgccctccagcctgagcaacaagagcaaaactccgtctc

SEQ ID NO: 361251 - DNA, 4355 bp, Homo sapiens
cgccggccgaggaggaggggtgggggtagcggcggcgcccgcggcccggagcgggggttgggggagtagagaaagcggggcgcgcggaggaacgctgggtccccggcgccgcgggagctgggaggaccgagccggccgagcgagcagcgcggcagcacagtccccgcgtggcgcagcgcggcggggacgcggggaccgcccggatctccttccactgcgccccgcgctctgcggtcctcggccgcctcttcttccttcactcactgcccgggcgggagcggcgcccaagtcgggtgcgccatgtctggggccgggtagccccgccgcccgccggcccgccagctcgccctccgagccacccgccagcgggccggccggccgggaagcgcgggacaggcagatgcagtgagtgaggggggggccatggcggaggagcggcccccccggctggtggattacttcgtggtagctgggcttgcagggaacggagcacccatccctgaggaaacgtgggttcctgaacccagtgggcccctgcgccctccccggccagctgagcccatcacagatgtggcagtcatcgctagggcactgggcgaggaagtgccccagggctacacatgcatccaggcttctgctgggggccaccccttggaactcagtgctggacttctgggtggaactcaacccgtcatctgctaccgcaggggccgtgacaagccccccctcgttgagctgggggtgttgtatgaggggaaggaacgtcccaagcctggcttccaagtgcttgacacgacaccctacagccactcagcaaacctggcccctccaggccccgggcacccccgcacctacctcacttaccggcgggcagcagagggggcagggctgcatgccctgggcatcactgacctctgcctggtgctgcccagtaagggcgagggcactcctcatacttactgccggctgccccgcaacctcaaccctggcatgtggggcccagcagtgtacctgtgctataaggtgggcctggcgaaggccaacacgctggtgtacgaggcaggtgagtggcccctttatccctccaatcctgtgaccctacatccctttgccctggtgcctcttggcaggcaccttaagtgtccccagagtttactttctctttgctactcgggccttctctgggatcccttggttcatttcccttggagtctgatggaccctgctccttttgggtacccccaactatgctgggggtgcagagctgctgggccgctacccggaggaggacaatgaggcgttcccgctgcccgagtcagtgcccgtcttctgcctgcccatgggggccactatcgagtgctggcctgcccagaccaagtaccccgtgcccgtcttctccacctttgtgctcacgggtgcagctggtgataaggtgtatggtgccgccctgcagttctacgaggcgttcccaagggccaggctatcagagcgacaggcacgggcactgggcctgctgagcgccgtggagcggggtcgggcactggggggcagagctgtgcgcagccggcgtgccatcgctgtgctgtcccgctggcctgccttccctgccttccgcgccttcctcaccttcctttaccgctactccgtctcaggcccccaccgcctacccttggaagcgcacatctcccacttcattcacaacgttcccttcccttccccacagagaccccgcatcctagtgcagatgtctccctatgacaacttgctcctctgtcagcctgtatcctcacccctgcccctcagtggtgccagcttcctgcagctgctgcagagcctgggccctgagctggctatcacactgctgctggctgtgctcacagagcacaagctgctagtccactcgctgcggccagacctgctcaccagcgtctgtgaggccctcgtctcgatgatcttcccactgcactggcagtgcccctacattcctctgtgcccgctggtgctggcagatgtgctgagtgccccagtgcccttcattgtgggtatccactccagctactttgatctgcatgacccgcctgctgatgtcatctgtgtagaccttgataccaacacgctcttccagactgaggaaaagaagctcctctcccctcggaccctgccccgcagaccctacaaggttctgctggccacactgacaaacctgtaccagcagctggaccagacatacactggacctgaggaggaagcatccctggagttcctactgacagactacgaggcagtgtgtggccgcagggcccggctggagcgcgaagtccaaggagccttcctccgcttcatggcctgtctgctcaagggctaccgggtcttcctgcgcccactcacccaggccccctccgagggagctcgtgatgttgacaaccttttcttcctgcagggcttcctcaaatcccgggaacgctccagccacaaactttactctcagctgctgcacacacagatgttctcacagttcattgaggagtgctcttttggctctgctcgccatgctgcccttgaattctttgactcttgtgttgaaaaggtccacccagagcaggagaagcctgagccgacacccttagtggagctagaggagctgtcaggaagtgagctcactgtctttatcacacctcccgaggagcctgccttaccagagggcagtgaatccactccccagtactgctatgatggattcccagagctacgggctgagttgtttgagtctcttcaagagcaacctggggccctgcctgtgccaggcccttcccgtagcgcccccagcagtcctgctcctcgccgtaccaaacaggagatgaaagttgcacagcggatggcacagaagtcagcagctgtgcctgagctgtgggcccggtgcctgctggggcactgctatgggctgtggttcctgtgtctgcctgcctatgtgcggtcggcaccctcccgagtgcaggcactgcacacagcctaccatgtgctgcgccagatggagagcggcaaggtggtgctccctgatgaggtgtgttaccgggtactgatgcagctctgctcacactatgggcagcctgtgctgtctgtgcgggtcatgctggagatgcgtcaggcaggcattgtgcccaacaccatcacctatggctactacaataaggctgtgttggaaagcaagtggccgtctggcacaccaggtgggcgtctgcgctgggccaagctccggaatgttgtcctgggggctgctcagttccgccagcccttgagagaacggcaacagcagcagcagcagcagcaacagcagcagcagcagcagcagcagcaggagcaggtgtcagcacatcaagaggcaggcagctcccaggcagagccctatttggagcgcccttcccctactcgccctcttcagcgccagactacttgggctgggcgaagtctgagagacccagcctcaccccctggacgcctggtgaagagtggtagcctgggcagtgcccgaggggcacagcccactgtggaggccggtgtggcccacatgatagaggccttgggggtcctggaaccccggggatcacctgtgccctggcacgatggaagtctctcagacctgagcctgacaggggaggagccgctccctggaggcagcccagggggctcaggctcagccctgagtgcccagtccactgaggccctggaagggctaagtgggcggggacccaaggctggtgggcgacaggatgaggcaggcaccccccgacgagggctgggtgcccgcctccaacagctgctcactccttcccgccactcccctgcctcccgcattcccccacctgagctgcctcctgacctgccacccccagcccgccgcagccccatggacagtcttctgcacccccgggagcgccctggatccactgcctccgagagctcagcctctctgggcagtgagtgggacctctcagaatcttctctcagcaacctgagtcttcgccgttcctcagagcgcctcagtgacacccctggatccttccagtcaccttccctggaaattctgctgtccagctgctccctgtgccgtgcctgtgattcgctggtgtatgatgaggaagtccggtggtttgtagttccttcaaagtcaggcactgggagctagaggagtctcaagctccccttaggaagaactggtgccccctccagtcctaatttttcttgcctgccccgccttggggaatgcctcacccacccaggtcctgacctgtgcaataaggattgttccctgcgaagttttgttggatgtaaatatagtaaaagctgcttctgtcttt

SEQ ID NO: 361252 - DNA, 2843 bp, Homo sapiens
cgccggccgaggaggaggggtgggggtagcggcggcgcccgcggcccggagcgggggttgggggagtagagaaagcggggcgcgcggaggaacgctgggtccccggcgccgcgggagctgggaggaccgagccggccgagcgagcagcgcggcagcacagtccccgcgtggcgcagcgcggcggggacgcggggaccgcccggatctccttccactgcgccccgcgctctgcggtcctcggccgcctcttcttccttcactcactgcccgggcgggagcggcgcccaagtcgggtgcgccatgtctggggccgggtagccccgccgcccgccggcccgccagctcgccctccgagccacccgccagcgggccggccggccgggaagcgcgggacaggcagatgcagtgagtgaggggggggccatggcggaggagcggcccccccggctggtggattacttcgtggtagctgggcttgcagggaacggagcacccatccctgaggaaacgtgggttcctgaacccagtgggcccctgcgccctccccggccagctgagcccatcacagatgtggcagtcatcgctagggcactgggcgaggaagtgccccagggctacacatgcatccaggcttctgctgggggccaccccttggaactcagtgctggacttctgggtggaactcaacccgtcatctgctaccgcaggggccgtgacaagccccccctcgttgagctgggggtgttgtatgaggggaaggaacgtcccaagcctggcttccaagtgcttgacacgacaccctacagccactcagcaaacctggcccctccaggccccgggcacccccgcacctacctcacttaccggcgggcagcagagggggcagggctgcatgccctgggcatcactgacctctgcctggtgctgcccagtaagggcgagggcactcctcatacttactgccggctgccccgcaacctcaaccctggcatgtggggcccagcagtgtacctgtgctataaggtgggcctggcgaaggccaacacgctggtgtacgaggcagagctgctgggccgctacccggaggaggacaatgaggcgttcccgctgcccgagtcagtgcccgtcttctgcctgcccatgggggccactatcgagtgctggcctgcccagaccaagtaccccgtgcccgtcttctccacctttgtgctcacgggtgcagctggtgataaggtgtatggtgccgccctgcagttctacgaggcgttcccaagggccaggctatcagagcgacaggcacgggcactgggcctgctgagcgccgtggagcggggtcgggcactggggggcagagctgtgcgcagccggcgtgccatcgctgtgctgtcccgctggcctgccttccctgccttccgcgccttcctcaccttcctttaccgctactccgtctcaggcccccaccgcctacccttggaagcgcacatctcccacttcattcacaacgttcccttcccttccccacagagaccccgcatcctagtgcagatgtctccctatgacaacttgctcctctgtcagcctgtatcctcacccctgcccctcaggtatgtgatcagattgtggggaggggagcctttaatgaccaaggacatggtaggtgctgggcaggtgggtgcagctgttgaggtttatgcaggctgggtccaggtggtggctgtgcctggcatctggggaagggtccccagggtatcctggtgaccctttccccacctcggcattgcctgcagtggtgccagcttcctgcagctgctgcagagcctgggccctgagctggctatcacactgctgctggctgtgctcacagagcacaagctgctagtccactcgctgcggccagacctgctcaccagcgtctgtgaggccctcgtctcggtgagtgccgccccgcctggcccatcttccccagaaccatggttctttctggtgcccctatccctgcctggactcttcccttttccttccttgtggaggatcctcagcccctttccctgggcacagcctgcaggaacacatagcttccatcaggagctcttctctagagcctacttccaacagcctctctcaacaggcaccaactccccaaggccaatgccctctctttctctctcctgtgcctcccactgctgcctcaaccccctgttcactggttctcactgcctggtgcttcagatgatcttcccactgcactggcagtgcccctacattcctctgtgcccgctggtgctggcagatgtgctgagtgccccagtgcccttcattgtgggtatccactccagctactttgatctgcatgacccgcctgctgatgtcatctgtgtagaccttgataccaacacgctcttccagactgaggaaaagaagctcctctcccctcggaccctgccccgcagaccctacaaggttctgctggccacactgacaaacctgtaccagcagctggaccagaccatgcctttctacctaagtgtttgtattttattttaaattatttattctggagccacagcccccttgcttatgaggttcttatggagagtgagaaagggaagggaaatagggcaccatggtccggtggtttgtagttccttcaaagtcaggcactgggagctagaggagtctcaagctccccttaggaagaactggtgccccctccagtcctaatttttcttgcctgccccgccttggggaatgcctcacccacccaggtcctgacctgtgcaataaggattgttccctgcgaagttttgttggatgtaaatatagtaaaagctgcttctgtcttt

SEQ ID NO: 361253 - DNA, 1718 bp, Homo sapiens
cgccggccgaggaggaggggtgggggtagcggcggcgcccgcggcccggagcgggggttgggggagtagagaaagcggggcgcgcggaggaacgctgggtccccggcgccgcgggagctgggaggaccgagccggccgagcgagcagcgcggcagcacagtccccgcgtggcgcagcgcggcggggacgcggggaccgcccggatctccttccactgcgccccgcgctctgcggtcctcggccgcctcttcttccttcactcactgcccgggcgggagcggcgcccaagtcgggtgcgccatgtctggggccgggtagccccgccgcccgccggcccgccagctcgccctccgagccacccgccagcgggccggccggccgggaagcgcgggacaggcagatgcagtgagtgaggggggggccatggcggaggagcggcccccccggctggtggattacttcgtggtagctgggcttgcagggaacggagcacccatccctgaggaaacgtgggttcctgaacccagtgggcccctgcgccctccccggccagctgagcccatcacagatgtggcagtcatcgctagggcactgggcgaggaagtgccccagggctacacatgcatccaggcttctgctgggggccaccccttggaactcagtgctggacttctgggtggaactcaacccgtcatctgctaccgcaggggccgtgacaagccccccctcgttgagctgggggtgttgtatgaggggaaggaacgtcccaagcctggcttccaagtgcttgacacgacaccctacagccactcagcaaacctggcccctccaggccccgggcacccccgcacctacctcacttaccggcgggcagcagagggggcagggctgcatgccctgggcatcactgacctctgcctggtgctgcccagtaagggcgagggcactcctcatacttactgccggctgccccgcaacctcaaccctggcatgtggggcccagcagtgtacctgtgctataaggtgggcctggcgaaggccaacacgctggtgtacgaggcaggtgagtggcccctttatccctccaatcctgtgaccctacatccctttgccctggtgcctcttggcaggcaccttaagtgtccccagagtttactttctctttgctactcgggccttctctgggatcccttggttcatttcccttggagtctgatggaccctgctccttttgggtacccccaactatgctgggggtgcagagctgctgggccgctacccggaggaggacaatgaggcgttcccgctgcccgagtcagtgcccgtcttctgcctgcccatgggggccactatcgagtgctggcctgcccagaccaagtaccccgtgcccgtcttctccacctttgtgctcacgggtgcagctggtgataaggtgtatggtgccgccctgcagttctacgaggcgttcccaagggccaggctatcagagcgacaggcacgggtccggtggtttgtagttccttcaaagtcaggcactgggagctagaggagtctcaagctccccttaggaagaactggtgccccctccagtcctaatttttcttgcctgccccgccttggggaatgcctcacccacccaggtcctgacctgtgcaataaggattgttccctgcgaagttttgttggatgtaaatatagtaaaagctgcttctgtcttt

SEQ ID NO: 361254 - DNA, 332 bp, Homo sapiens
ccagccccaaatctgctggtgccagtggcagcaaagatgctcctgtccctggtggtcctggccctgtgctcagtgaccgaaggctctgccttgctctggatgagccccagctctgcaacgggcacatgggggtaagggctgggccaaaggggcatgaggaacgggaatgttgccctgtgtggggcctgtggggtgccagggagagatgggcacatctcttgcccttgagggcaaggggcatcccaaaagctgttggatgtggtggctcagtgggaggcaaggctctggggatgtacatgccctctactgccctccccctttgtgcctgatag

SEQ ID NO: 361255 - DNA, 1137 bp, Homo sapiens
ctgcaagaaaatgcacatgctatataatataatgtaaatatatacacatacaactcatttgatctcacttatgtaaaaatatgcattcctaataatggcttatcctactgagtgacttattaaatgtcacaacaacgttttaaagtaggtactcttacctccattttgcagatagaggttaggtaattttcccaaggtcacacagctagtaaaggacagagttcatatttgaaacccagtctgtcaggctctatagcccctactcttaatcactatattatgcagggagaaatccatcaacatattgtctttgggtggtggtttattttcttctttattctctaggattttctatttggatatactctaggagttaaatgataaacttttgaatagggaagaaggtggggtggtgaaatttgaaggccaaacatgtgctttcaaacaaaagaattcactccatttccttttccacttttctacattttccagaagaactgatgaccaccccaattttacagcccactgaggccctgtccccagaagatggagccagcacagcactcattgcaggtaatagactctgagccaactccaagggaccttctggatcaagggcatctctctccagagggagcctgaccaaatccattaatgggctcactctggcttgtaagttatattacacacacacacacacacacacacacacacacacagccataaaagactcggaggcttctgtcagaggcactaccagtaaatgacaggttgggaggtggccgcaaatagatatgcatacggacgttacacttgagtacgtgggtagggacgaggatatatgtggttggttgagtgggtgaggaagagggggaggatcagataaaccacttcctgttaggataagccatttcctgttccctccttcccgtttctttaagaatcaggaactggtttgggaggcagttcagttttgtcagaaatcaaaagcatgtgtccttagcttaagcaccaggagactccagctattatgtgccatggaaattggggttggtgggggaacatgggtttggatggaagtggacactagttaatgaaaacaagaggatctttacgaaaacagtgactaaatcagat

SEQ ID NO: 361256 - DNA, 1094 bp, Homo sapiens
gccggagagccgggtcgcccacattcgccgcagccacctcggccgtggcaggaaccgaaacccggagcggccgaagctcagcgctccgctggggcagagggtcgcggcggctgggaacgccgctccccgacgcaccggccgcccccagcgcagcgcgctccgcggggtgctgatctgcctcttctccaagaaactcaaccactagtgacaatgaccagcctcctgactactccttctccaagagaagaactgatgaccaccccaattttacagcccactgaggccctgtccccagaagatggagccagcacagcactcattgcagttgttatcaccgttgtcttcctcaccctgctctcggtcgtgatcttgatcttcttttacctgtacaagaacaaaggcagctacgtcacctatgaacctacagaaggtgagcccagtgccatcgtccagatggagagtgacttggccaagggcagcgagaaagaggaatatttcatctaatgactcccaggccccaaggagcttattcctggctccatcgctaacacgttgactgcttattatgggaaagttttctctgaagccagggagaagcattgattgatgtgggcaaatccaagctccagccaggtcgcagtcccaaatgccgacatcactgactccagggaccagggacatggagaaagctgtttatgatatctttaaccaggccctcttactagagctggtgtttgtgactggccaacaagatgtggctatgccaggggacatctgagtatgtgcccagtcatcttttttcacaggttgaagggagagaaaagattttgagttaaggtcattggctgctctactctgtcccctacctggtcacctagtgatagccccagtggagatactgtccatacaaggtcttcccagaggctggataccacagtaaaaggccaggccaggaggggtaggagactatggagatcttacctcctgataaatgtgctacaccccctaatctgagcccttcctttccgtgttccccaacaacctcatgcttacgtgatttttattcaaattaaaaattttcattgctacagaaa

SEQ ID NO: 361257 - DNA, 217 bp, Homo sapiens
gaggatacggaagactctggtggtgatctgcctcttctccaagaaactcaaccactagtgacaatgaccagcctcctgactactccttctccaagagaagaactgatgaccaccccaattttacagcccactgaggccctgtccccagaagatggagccagcacagcactcattgcagttgtatcaccaccaggattctgggatcctctagatcacc

SEQ ID NO: 361258 - DNA, 1703 bp, Homo sapiens
gcccgcgttcgcaggggcgtcgaggatctccggggcgcggggcgcgggctggggcccagtgaggcttggcaggctgtgcgcggaccgcgccctggacggcgaaagcaggcccggagggggcggccagtccggcgtcccagcgtccgaggcgagccagaaggcggcccacggccgtcgcctcccggtcccggcccggctactgcgctgcgcccactccgctctggagcctgggcgcgggtcctgaccttcccggccctctcctgacacctggtggatggcgtcaccagaactcctagctgtggaaccctagggtacctgttaccgcgctttggcgaaactgggttcgctgctgatttgcgaacctttgcctgactttctcaggccttgagagatctaagtaaatttggtggcccattgaaaggacctggagagagcgtatgaaggtaacaccccgtcaaactgcatgcggcctcagacctgctcctgtggagagctgttggtacctggagcctgaggagatattcagggaaaccagaagaggacaagaggaaaaggggaagggacttgggagaacctggcaccagaggctttcctgggacttccaggactcaaagccataggggcccacccgctacattcctgtctttgcccctcttcctacaatctgcctcttctccaagaaactcaaccactagtgacaatgaccagcctcctgactactccttctccaagagggtctcactctgtcacccagactagagtacagtggcacaatcacagctcactgcagcctggacctcctgggctccagtgatcctctcacctcaagtttaccgagtagctgggactacagaagaactgatgaccaccccaattttacagcccactgaggccctgtccccagaagatggagccagcacagcactcattgcagttgttatcaccgttgtcttcctcaccctgctctcggtcgtgatcttgatcttcttttacctgtacaagaacaaaggcagctacgtcacctatgaacctacagaaggtgagcccagtgccatcgtccagatggagagtgacttggccaagggcagcgagaaagaggaatatttcatctaatgactcccaggccccaaggagcttattcctggctccatcgctaacacgttgactgcttattatgggaaagttttctctgaagccagggagaagcattgattgatgtgggcaaatccaagctccagccaggtcgcagtcccaaatgccgacatcactgactccagggaccagggacatggagaaagctgtttatgatatctttaaccaggccctcttactagagctggtgtttgtgactggccaacaagatgtggctatgccaggggacatctgagtatgtgcccagtcatcttttttcacaggttgaagggagagaaaagattttgagttaaggtcattggctgctctactctgtcccctacctggtcacctagtgatagccccagtggagatactgtccatacaaggtcttcccagaggctggataccacagtaaaaggccaggccaggaggggtaggagactatggagatcttacctcctgataaatgtgctacaccccctaatctgagcccttcctttccgtgttccccaacaacctcatgcttacgtgatttttattcaaattaaaaattttcattgctacagaaa

SEQ ID NO: 361259 - DNA, 1342 bp, Homo sapiens
ctgcaagaaaatgcacatgctatataatataatgtaaatatatacacatacaactcatttgatctcacttatgtaaaaatatgcattcctaataatggcttatcctactgagtgacttattaaatgtcacaacaacgttttaaagtaggtactcttacctccattttgcagatagaggttaggtaattttcccaaggtcacacagctagtaaaggacagagttcatatttgaaacccagtctgtcaggctctatagcccctactcttaatcactatattatgcagggagaaatccatcaacatattgtctttgggtggtggtttattttcttctttattctctaggattttctatttggatatactctaggagttaaatgataaacttttgaatagggaagaaggtggggtggtgaaatttgaaggccaaacatgtgctttcaaacaaaagaattcactccatttccttttccacttttctacattttccagaagaactgatgaccaccccaattttacagcccactgaggccctgtccccagaagatggagccagcacagcactcattgcagttgttatcaccgttgtcttcctcaccctgctctcggtcgtgatcttgatcttcttttacctgtacaagaacaaaggcagctacgtcacctatgaacctacagaaggtgagcccagtgccatcgtccagatggagagtgacttggccaagggcagcgagaaagaggaatatttcatctaatgactcccaggccccaaggagcttattcctggctccatcgctaacacgttgactgcttattatgggaaagttttctctgaagccagggagaagcattgattgatgtgggcaaatccaagctccagccaggtcgcagtcccaaatgccgacatcactgactccagggaccagggacatggagaaagctgtttatgatatctttaaccaggccctcttactagagctggtgtttgtgactggccaacaagatgtggctatgccaggggacatctgagtatgtgcccagtcatcttttttcacaggttgaagggagagaaaagattttgagttaaggtcattggctgctctactctgtcccctacctggtcacctagtgatagccccagtggagatactgtccatacaaggtcttcccagaggctggataccacagtaaaaggccaggccaggaggggtaggagactatggagatcttacctcctgataaatgtgctacaccccctaatctgagcccttcctttccgtgttccccaacaacctcatgcttacgtgatttttattcaaattaaaaattttcattgctacagaaa

SEQ ID NO: 361260 - DNA, 1492 bp, Homo sapiens
gcgcgccacccgcggcttcctccgctcggggtcctcgctcggcctctgctggcctccgcgactccgcggtgcccgcccccgttgagttcaaaaggacgcgcggagcggcgccggcccttcaccagcagcccgtccgactggaaagatctgcctcttctccaagaaactcaaccactagtgacaatgaccagcctcctgactactccttctccaagagaagaactgatgaccaccccaattttacagcccactgaggccctgtccccagaagatggagccagcacagcactcattgcagttgttatcaccgttgtcttcctcaccctgctctcggtcgtgatcttgatcttcttttacctgtacaagaacaaaggcagctacgtcacctatgaacctacagaaggtgagcccagtgccatcgtccagatggagagtgacttggccaagggcagcgagaaagaggaatatttcatctaatgactcccaggccccaaggagcttattcctggctccatcgctaacacgttgactgcttattatgggaaagttttctctgaagccagggagaagcattgattgatgtgggcaaatccaagctccagccaggtcgcagtcccaaatgccgacatcactgactccagggaccagggacatggagaaagctgtttatgatatctttaaccaggccctcttactagagctggtgtttgtgactggccaacaagatgtggctatgccaggggacatctgagtatgtgcccagtcatcttttttcacaggttgaagggagagaaaagattttgagttaaggtcattggctgctctactctgtcccctacctggtcacctagtgatagccccagtggagatactgtccatacaaggtcttcccagaggctggataccacagtaaaaggccaggccaggaggggtaggagactatggagatcttacctcctgataaatgtgctacaccccctaatctgagcccttcctttccgtgttccccaacaacctcatgcttacgtgatttttattcaaattaaaaattttcattgctacagaaaaaaaaaaaaaaaattttccttaaatttttatactagcattttaccatctcaccttctaggaatactagtatatcggtcacacctaatatcctccttattatgcctaaaaggaataatactatcgctgtcataattagctattctgaatagcccttaaaaaaccattccctttttaagcaaatattggtgcctattgcatatagtctttgccgctggaaaaggggggctagcctaatagtctcaatctccaaccatatggctaaataataatactaaactatcatgtaaatatcgccacatattatacgtggatgcttccaaaccttttgtcaccacccagtatttgttcctttttttacctacactttgtgcgttgcgcaccacaacttaaaaaactggcgccccggttttttctccacaacaag

SEQ ID NO: 361261 - DNA, 854 bp, Homo sapiens
gcccgcgttcgcaggggcgtcgaggatctccggggcgcggggcgcgggctggggcccagtgaggcttggcaggctgtgcgcggaccgcgccctggacggcgaaagcaggcccggagggggcggccagtccggcgtcccagcgtccgaggcgagccagaaggcggcccacggccgtcgcctcccggtcccggcccggctactgcgctgcgcccactccgctctggagcctgggcgcgggtcctgaccttcccggccctctcctgacacctggtggatggcgtcaccagaactcctagctgtggaaccctagggtacctgttaccgcgctttggcgaaactgggttcgctgctgatttgcgaacctttgcctgactttctcaggccttgagagatctaagtaaatttggtggcccattgaaaggacctggagagagcgtatgaaggtaacaccccgtcaaactgcatgcggcctcagacctgctcctgtggagagctgttggtacctggagcctgaggagatattcagggaaaccagaagaggacaagaggaaaaggggaagggacttgggagaacctggcaccagaggctttcctgggacttccaggactcaaagccataggggcccacccgctacattcctgtctttgcccctcttcctacaatctgcctcttctccaagaaactcaaccactagtgacaatgaccagcctcctgactactccttctccaagagaagaactgatgaccaccccaattttacagcccactgaggccctgtccccagaagatggagccagcacagcactcattgcagttgtatcaccaccaggattctgggatcctctagatcacc

SEQ ID NO: 361262 - DNA, 1067 bp, Homo sapiens
gcgcgccacccgcggcttcctccgctcggggtcctcgctcggcctctgctggcctccgcgactccgcggtgcccgcccccgttgagttcaaaaggacgcgcggagcggcgccggcccttcaccagcagcccgtccgactggaaagatctgcctcttctccaagaaactcaaccactagtgacaatgaccagcctcctgactactccttctccaagagaagaactgatgaccaccccaattttacagcccactgaggccctgtccccagaagatggagccagcacagcactcattgcagttgttatcaccgttgtcttcctcaccctgctctcggtcgtgatcttgatcttcttttacctgtacaagaacaaaggcagctacgtcacctatgaacctacagaaggtgagcccagtgccatcgtccagatggagagtgacttggccaagggcagcgagaaagaggaatatttcatctaatgactcccaggccccaaggagcttattcctggctccatcgctaacacgttgactgcttattatgggaaagttttctctgaagccagggagaagcattgattgatgtgggcaaatccaagctccagccaggtcgcagtcccaaatgccgacatcactgactccagggaccagggacatggagaaagctgtttatgatatctttaaccaggccctcttactagagctggtgtttgtgactggccaacaagatgtggctatgccaggggacatctgagtatgtgcccagtcatcttttttcacaggttgaagggagagaaaagattttgagttaaggtcattggctgctctactctgtcccctacctggtcacctagtgatagccccagtggagatactgtccatacaaggtcttcccagaggctggataccacagtaaaaggccaggccaggaggggtaggagactatggagatcttacctcctgataaatgtgctacaccccctaatctgagcccttcctttccgtgttccccaacaacctcatgcttacgtgatttttattcaaattaaaaattttcattgctacagaaa

SEQ ID NO: 361263 - DNA, 1160 bp, Homo sapiens
gcccgcgttcgcaggggcgtcgaggatctccggggcgcggggcgcgggctggggcccagtgaggcttggcaggctgtgcgcggaccgcgccctggacggcgaaagcaggcccggagggggcggccagtccggcgtcccagcgtccgaggcgagccagaaggcggcccacggccgtcgcctcccggtcccggcccggctactgcgctgcgcccactccgctctggagcctgggcgcgggtcctgaccttcccggccctctcctgacacctggtggatggcgtcaccagaactcctagctgtggaaccctagggtacctgttaccgcgctttggcgaaactgggttcgctgctgatttgcgaacctttgcctgactttctcaggccttgagagatctaagtaaatttggtggcccattgaaaggacctggagagagcgtatgaagatctgcctcttctccaagaaactcaaccactagtgacaatgaccagcctcctgactactccttctccaagagaagaactgatgaccaccccaattttacagcccactgaggccctgtccccagaagatggagccagcacagcactcattgcaggtaatagactctgagccaactccaagggaccttctggatcaagggcatctctctccagagggagcctgaccaaatccattaatgggctcactctggcttgtaagttatattacacacacacacacacacacacacacacacacacagccataaaagactcggaggcttctgtcagaggcactaccagtaaatgacaggttgggaggtggccgcaaatagatatgcatacggacgttacacttgagtacgtgggtagggacgaggatatatgtggttggttgagtgggtgaggaagagggggaggatcagataaaccacttcctgttaggataagccatttcctgttccctccttcccgtttctttaagaatcaggaactggtttgggaggcagttcagttttgtcagaaatcaaaagcatgtgtccttagcttaagcaccaggagactccagctattatgtgccatggaaattggggttggtgggggaacatgggtttggatggaagtggacactagttaatgaaaacaagaggatctttacgaaaacagtgactaaatcagat

SEQ ID NO: 361264 - DNA, 1584 bp, Homo sapiens
gcccgcgttcgcaggggcgtcgaggatctccggggcgcggggcgcgggctggggcccagtgaggcttggcaggctgtgcgcggaccgcgccctggacggcgaaagcaggcccggagggggcggccagtccggcgtcccagcgtccgaggcgagccagaaggcggcccacggccgtcgcctcccggtcccggcccggctactgcgctgcgcccactccgctctggagcctgggcgcgggtcctgaccttcccggccctctcctgacacctggtggatggcgtcaccagaactcctagctgtggaaccctagggtacctgttaccgcgctttggcgaaactgggttcgctgctgatttgcgaacctttgcctgactttctcaggccttgagagatctaagtaaatttggtggcccattgaaaggacctggagagagcgtatgaaggtaacaccccgtcaaactgcatgcggcctcagacctgctcctgtggagagctgttggtacctggagcctgaggagatattcagggaaaccagaagaggacaagaggaaaaggggaagggacttgggagaacctggcaccagaggctttcctgggacttccaggactcaaagccataggggcccacccgctacattcctgtctttgcccctcttcctacaatctgcctcttctccaagaaactcaaccactagtgacaatgaccagcctcctgactactccttctccaagagaagaactgatgaccaccccaattttacagcccactgaggccctgtccccagaagatggagccagcacagcactcattgcagttgttatcaccgttgtcttcctcaccctgctctcggtcgtgatcttgatcttcttttacctgtacaagaacaaaggcagctacgtcacctatgaacctacagaaggtgagcccagtgccatcgtccagatggagagtgacttggccaagggcagcgagaaagaggaatatttcatctaatgactcccaggccccaaggagcttattcctggctccatcgctaacacgttgactgcttattatgggaaagttttctctgaagccagggagaagcattgattgatgtgggcaaatccaagctccagccaggtcgcagtcccaaatgccgacatcactgactccagggaccagggacatggagaaagctgtttatgatatctttaaccaggccctcttactagagctggtgtttgtgactggccaacaagatgtggctatgccaggggacatctgagtatgtgcccagtcatcttttttcacaggttgaagggagagaaaagattttgagttaaggtcattggctgctctactctgtcccctacctggtcacctagtgatagccccagtggagatactgtccatacaaggtcttcccagaggctggataccacagtaaaaggccaggccaggaggggtaggagactatggagatcttacctcctgataaatgtgctacaccccctaatctgagcccttcctttccgtgttccccaacaacctcatgcttacgtgatttttattcaaattaaaaattttcattgctacagaaa

SEQ ID NO: 361265 - DNA, 1379 bp, Homo sapiens
gcccgcgttcgcaggggcgtcgaggatctccggggcgcggggcgcgggctggggcccagtgaggcttggcaggctgtgcgcggaccgcgccctggacggcgaaagcaggcccggagggggcggccagtccggcgtcccagcgtccgaggcgagccagaaggcggcccacggccgtcgcctcccggtcccggcccggctactgcgctgcgcccactccgctctggagcctgggcgcgggtcctgaccttcccggccctctcctgacacctggtggatggcgtcaccagaactcctagctgtggaaccctagggtacctgttaccgcgctttggcgaaactgggttcgctgctgatttgcgaacctttgcctgactttctcaggccttgagagatctaagtaaatttggtggcccattgaaaggacctggagagagcgtatgaaggtaacaccccgtcaaactgcatgcggcctcagacctgctcctgtggagagctgttggtacctggagcctgaggagatattcagggaaaccagaagaggacaagaggaaaaggggaagggacttgggagaacctggcaccagaggctttcctgggacttccaggactcaaagccataggggcccacccgctacattcctgtctttgcccctcttcctacaatctgcctcttctccaagaaactcaaccactagtgacaatgaccagcctcctgactactccttctccaagagaagaactgatgaccaccccaattttacagcccactgaggccctgtccccagaagatggagccagcacagcactcattgcaggtaatagactctgagccaactccaagggaccttctggatcaagggcatctctctccagagggagcctgaccaaatccattaatgggctcactctggcttgtaagttatattacacacacacacacacacacacacacacacacacagccataaaagactcggaggcttctgtcagaggcactaccagtaaatgacaggttgggaggtggccgcaaatagatatgcatacggacgttacacttgagtacgtgggtagggacgaggatatatgtggttggttgagtgggtgaggaagagggggaggatcagataaaccacttcctgttaggataagccatttcctgttccctccttcccgtttctttaagaatcaggaactggtttgggaggcagttcagttttgtcagaaatcaaaagcatgtgtccttagcttaagcaccaggagactccagctattatgtgccatggaaattggggttggtgggggaacatgggtttggatggaagtggacactagttaatgaaaacaagaggatctttacgaaaacagtgactaaatcagat

SEQ ID NO: 361266 - DNA, 1448 bp, Homo sapiens
atttctcacgcttctggaggctggattccaagatcaaggttccaggagactcagtgtctggcaaggtctcggtttctgcctcagagatggtgccatctggctgtgtcctcacaaggaggaaggtgcaagaagctcccctcaggctctgtctgtaagacactgatcccattcatgagggggaaacgtaatgacctaatcagcccccagagaccccacttctaacaccatcaccttggggttgaggatttcaacacttgaatctcagggggacacagacattcagaccacagcaatgactatattaaaatagaaaaaatgtaagttgtattatctcatagattattcaaaatttagacgattgtaaccagaagcatgtgctaaatccttaggtatagaatgtgcagagaaaaataagtttaataatgtgatgaaaattacacagactgttgtggtttctgccagcctccaagacatcagcatgccaagccctaagtggttaatttttatcttaccagcagatacccccaatttctcccttaaagaacataaacgtgaatacttttttcttgtttcaggcaatttgaatcaacccatagaagtgacagcgctgtattcatttgaaggacagcagcctggggatttgaattttcaagctggagacagaatcacagttatatcaaaaacagattcacattttgattggtgggaaggaaaacttcgaggtcaaactggcatttttccagccaactacgtaaccatgaattaaagcgtatactattttcttctttgagaattacaaaaaaattatttctacactgacaggatttactagttaagcaatgtttaatataaattttaaaaaacttctgttctacaaaatttccattccgtatgtaaaagattttgtttttctatataaaaagagctgactgacatatctttaaatactttgtactaactttatcacacttactgtgtcatagaatatcatacagtttatacgctcatagttctcttgtgaacacttcaaacatcgctaagcatttgatctggccatgtatatggtagctgtgttttaatttgagaatcttgagggtagagccacaaatttcaattcttacatttccatttgcaaagtgactagagaaaaagaaatcagcttaaatgaggtattaagtaatgtttagagtcgtaggtattaactagaatataaatccttagaaattgtctttataccttcaaaaattatactatgcatttatcatagaaatgtgattacaaagaagtctgactaccatgtctttaaacatatggcatctctcaacttttcttccttatggggctacatttgttcatttccagcagtagcataaacttacggtgacatggtagacttgtctctaaataaaatttttaaatgtttactaagttaatatttcaaaaaaaaa

SEQ ID NO: 361267 - DNA, 2019 bp, Homo sapiens
  misc_feature (48)..(48): n is a, c, g, or t
gggctgtggtgcctgtcgttcgagttcgcatagaggggctgggcgggncacgcggggaacctgccttgagccccgcggggtccacgccggaccagggcggccttgggcctgggcgctccctgagacccccacccccaacaccgtgcttggagccgccgcggggctctgggcttttcgatcttgaggacggggcggttccgaagtccctgagggcgaaggcctgagcgcggcccggcgggcgcgtggtttttgtcccgcgaaacgtacacggcgggtgttttgcgccgcctccttcgtcacctgccgcagtgaataaccctataccttccaatttgaaatcagaagcaaaaaaggctgccaaaatattaagagaattcacagaaataacttccagaaatggacctgataagatcattcctgctcacgtaattgcgaaggctaaaggccttgcaattctgtctgtgatcaaagccgggttcctggtgactgccagaggaggcagcgggattgtagtggcgcgccttccagatggaaaatggtctgcaccctcagccattgggatagctggccttggtggaggatttgaaataggaattgaggtatcagacttggtgataattctgaattatgaccgtgctgtagaagcttttgcaaaaggcggaaatctgaccctcggagggaacttgactgtggcggttgggcccttgggaaggaacttggaaggaaacgtggccctgagaagctccgctgccgtcttcacgtactgcaagtcaaggggactctttgcaggcgtgtctttagaagggagctgtttgattgaaaggaaagaaactaatagaaaattttattgtcaagatatccgagcttatgacattttatttggagatacaccgcggcctgctcaagccgaagatctttatgaaattcttgattcctttactgaaaagtatgaaaatgaaggacaacgaatcaatgcaagaaaagcagcaagggagcagaggaagtcttctgctaaagaattacctccaaagccattgtcaagaccacagcagtcatctgcaccagtccagctgaactctggctctcaaagtaacagaaatgaatataagctctatcctggactttccagctatcatgagagagttggcaatttgaatcaacccatagaagtgacagcgctgtattcatttgaaggacagcagcctggggatttgaattttcaagctggagacagaatcacagttatatcaaaaacagattcacattttgattggtgggaaggaaaacttcgaggtcaaactggcatttttccagccaactacgtaaccatgaattaaagcgtatactattttcttctttgagaattacaaaaaaattatttctacactgacaggatttactagttaagcaatgtttaatataaattttaaaaaacttctgttctacaaaatttccattccgtatgtaaaagattttgtttttctatataaaaagagctgactgacatatctttaaatactttgtactaactttatcacacttactgtgtcatagaatatcatacagtttatacgctcatagttctcttgtgaacacttcaaacatcgctaagcatttgatctggccatgtatatggtagctgtgttttaatttgagaatcttgagggtagagccacaaatttcaattcttacatttccatttgcaaagtgactagagaaaaagaaatcagcttaaatgaggtattaagtaatgtttagagtcgtaggtattaactagaatataaatccttagaaattgtctttataccttcaaaaattatactatgcatttatcatagaaatgtgattacaaagaagtctgactaccatgtctttaaacatatggcatctctcaacttttcttccttatggggctacatttgttcatttccagcagtagcataaacttacggtgacatggtagacttgtctctaaataaaatttttaaatgtttactaagttaatatttcaaaaaaaaa

SEQ ID NO: 361268 - DNA, 2120 bp, Homo sapiens
ggcagatctcacgagagaggatttggcgccctcctctgtggattctggccaggccgggttcggcggttgctgtgagagcgggcttcccaacaccatgccgtccgccttctctgtcagctctttccccgtcagcatcccagccgtgctcacgcagacggactggactgagccctggctcatggggctggccaccttccacgcgctctgcgtgctcctcacctgcttgtcctcccgaagctacagactacagatcgggcactttctgtgtctagtcatcttagtctactgtgctgaatacatcaatgaggcggctgcgatgaactggagattattttcgaaataccagtatttcgactccagggggatgttcatttctatagtattttcagccccactgctggtgaatgccatgatcattgtggttatgtgggtatggaagactttgaatgtgatgactgacctgaagaatgcacaagagagaagaaaggaaaagaaaaggagaaggaaagaagactgaggggcagcagctgcttggagtttgcgtccttcccgtccacccagtgcagctcccagtgctgcagtgtgcgtggcgtgggcatccttccagctgactcatggtttgaaaaaccgttgttttatttaaatatccacagtggtagggcacacactgaagttggcttttcagccagcactgaatgtatccatcaggacatgcgtcttcaggtgcctgatctttgtagtcaggctgtgggaacggtctctgcagagcttcataactggaatttgattgaagaagtccatgtcatatgtgtaactagtactaattataaatataaaatacacaatataaaatatgaaactcaataataaacagtgccacctgtacatgggcaccatgccctcctcctcgtgctgtgttttctagtgcatgccacagttcgcagtagagggtgttttcaccttccaagacatggggcaaagtttggagacacctggttgtcactggagggggtggtgctcctggcttctcctgtggagcccggggtgatgcataaaatcctgtgtgcctgggtcagccgcatcacagacaatgacttgacatgaaatgtcagctgtgctggggcagagagaccttggaaggaagctcttggaaaatacgttgtatctcagtttgatgaaccaattcacaagaggctaggccctctctagcaaagttatgggctgctttactgaaaacagaatggaagccctgaagtcaacactccatggagaagcgtgtctttcctaatgtcctggtgttctgttgatttaggtgcttgggaacacaatgctcccagttctgttaggacaggcatactgttactttgcaatatccactttataaaatagctcctgcccagtggctcttggttcctgtcaaatgtggacctgtagtttaagaatgacaggtggttagagacccagatatttaaaaataggtgttcaataagggaatactgattgtgcattgtatctggatagcatgcctaattgtgcatttctgaaagttaccaattcaaaatgtaattggaacagttatctttgattagacaagcctgggaagagaatgttgaggtgcagagctcaccagccaagttcatgcccctctcgggcctttgtggctgagaagtgggacagaaagatgattaaggtaatgtgtcctccctgtagcattgtccagggccgttgtgtagatatttgacttcactgacagaaaagaaaccagggagtttgtagagactgtgcatttttagtataacattttcaccatctgatatggtttggctttgtgtccccacccaaattgcatctcaaattgtaatccccatgtgtcaagggagggacctgatgggaggtgatgggatcatgggggtggtttcccctatgttgttatcataatagagagggagttctcacaagatctgctggttttaaagacagcagtttcccctgctgtcactgtctctctcctgctgccttgtgaagaaggtgcttgtttctccctctgccatgattgtaagtttcccgaggcctccccggccatgtggaactgagtcaattaaacttcttgtttataaagt

SEQ ID NO: 361269 - DNA, 1725 bp, Homo sapiens
  misc_feature (24)..(24): n is a, c, g, or t
agcaggctggtacaggcccgagangtaagatgggcagcctcgggacggggcgccgcggccgggcgggcagcatgaataaccctataccttccaatttgaaatcagaagcaaaaaaggctgccaaaatattaagagaattcacagaaataacttccagaaatggacctgataagatcattcctgctcacgtaattgcgaaggctaaaggccttgcaattctgtctgtgatcaaagccgggttcctggtgactgccagaggaggcagcgggattgtagtggcgcgccttccagatggaaaatggtctgcaccctcagccattgggatagctggccttggtggaggatttgaaataggaattgaggtatcagacttggtgataattctgaattatgaccgtgctgtagaagcttttgcaaaaggcggaaatctgaccctcggagggaacttgactgtggcggttgggcccttgggaaggaacttggaaggaaacgtggccctgagaagctccgctgccgtcttcacgtactgcaagtcaaggggactctttgcaggcgtgtctttagaagggagctgtttgattgaaaggaaagaaactaatagaaaattttattgtcaagatatccgagcttatgacattttatttggagatacaccgcggcctgctcaagccgaagatctttatgaaattcttgattcctttactgaaaagtatgaaaatgaaggacaacgaatcaatgcaagaaaagcagcaagggagcagaggaagtcttctgctaaagaattacctccaaagccattgtcaagaccacagcagtcatctgcaccagtccagctgaactctggctctcaaagcaatttgaatcaacccatagaagtgacagcgctgtattcatttgaaggacagcagcctggggatttgaattttcaagctggagacagaatcacagttatatcaaaaacagattcacattttgattggtgggaaggaaaacttcgaggtcaaactggcatttttccagccaactacgtaaccatgaattaaagcgtatactattttcttctttgagaattacaaaaaaattatttctacactgacaggatttactagttaagcaatgtttaatataaattttaaaaaacttctgttctacaaaatttccattccgtatgtaaaagattttgtttttctatataaaaagagctgactgacatatctttaaatactttgtactaactttatcacacttactgtgtcatagaatatcatacagtttatacgctcatagttctcttgtgaacacttcaaacatcgctaagcatttgatctggccatgtatatggtagctgtgttttaatttgagaatcttgagggtagagccacaaatttcaattcttacatttccatttgcaaagtgactagagaaaaagaaatcagcttaaatgaggtattaagtaatgtttagagtcgtaggtattaactagaatataaatccttagaaattgtctttataccttcaaaaattatactatgcatttatcatagaaatgtgattacaaagaagtctgactaccatgtctttaaacatatggcatctctcaacttttcttccttatggggctacatttgttcatttccagcagtagcataaacttacggtgacatggtagacttgtctctaaataaaatttttaaatgtttactaagttaatatttcaaaaaaaaa

SEQ ID NO: 361270 - DNA, 1795 bp, Homo sapiens
cgcaccaacgccaacagggcagcgcgtgtgagagccacgcctgcgcaatcggctccagtgcgcctgcggaggcggtcctatgacgtgaataaccctataccttccaatttgaaatcagaagcaaaaaaggctgccaaaatattaagagaattcacagaaataacttccagaaatggacctgataagatcattcctgctcacgtaattgcgaaggctaaaggccttgcaattctgtctgtgatcaaagccgggttcctggtgactgccagaggaggcagcgggattgtagtggcgcgccttccagatggaaaatggtctgcaccctcagccattgggatagctggccttggtggaggatttgaaataggaattgaggtatcagacttggtgataattctgaattatgaccgtgctgtagaagcttttgcaaaaggcggaaatctgaccctcggagggaacttgactgtggcggttgggcccttgggaaggaacttggaaggaaacgtggccctgagaagctccgctgccgtcttcacgtactgcaagtcaaggggactctttgcaggcgtgtctttagaagggagctgtttgattgaaaggaaagaaactaatagaaaattttattgtcaagatatccgagcttatgacattttatttggagatacaccgcggcctgctcaagccgaagatctttatgaaattcttgattcctttactgaaaagtatgaaaatgaaggacaacgaatcaatgcaagaaaagcagcaagggagcagaggaagtcttctgctaaagaattacctccaaagccattgtcaagaccacagcagtcatctgcaccagtccagctgaactctggctctcaaagtaacagaaatgaatataagctctatcctggactttccagctatcatgagagagttggcaatttgaatcaacccatagaagtgacagcgctgtattcatttgaaggacagcagcctggggatttgaattttcaagctggagacagaatcacagttatatcaaaaacagattcacattttgattggtgggaaggaaaacttcgaggtcaaactggcatttttccagccaactacgtaaccatgaattaaagcgtatactattttcttctttgagaattacaaaaaaattatttctacactgacaggatttactagttaagcaatgtttaatataaattttaaaaaacttctgttctacaaaatttccattccgtatgtaaaagattttgtttttctatataaaaagagctgactgacatatctttaaatactttgtactaactttatcacacttactgtgtcatagaatatcatacagtttatacgctcatagttctcttgtgaacacttcaaacatcgctaagcatttgatctggccatgtatatggtagctgtgttttaatttgagaatcttgagggtagagccacaaatttcaattcttacatttccatttgcaaagtgactagagaaaaagaaatcagcttaaatgaggtattaagtaatgtttagagtcgtaggtattaactagaatataaatccttagaaattgtctttataccttcaaaaattatactatgcatttatcatagaaatgtgattacaaagaagtctgactaccatgtctttaaacatatggcatctctcaacttttcttccttatggggctacatttgttcatttccagcagtagcataaacttacggtgacatggtagacttgtctctaaataaaatttttaaatgtttactaagttaatatttcaaaaaaaaa

SEQ ID NO: 361271 - DNA, 1861 bp, Homo sapiens
ggcagatctcacgagagaggatttggcgccctcctctgtggattctggccaggccgggttcggcggttgctgtgagagcgggcttcccaacaccatgccgtccgccttctctgtcagctctttccccgtcagcatcccagccgtgctcacgtgaataaccctataccttccaatttgaaatcagaagcaaaaaaggctgccaaaatattaagagaattcacagaaataacttccagaaatggacctgataagatcattcctgctcacgtaattgcgaaggctaaaggccttgcaattctgtctgtgatcaaagccgggttcctggtgactgccagaggaggcagcgggattgtagtggcgcgccttccagatggaaaatggtctgcaccctcagccattgggatagctggccttggtggaggatttgaaataggaattgaggtatcagacttggtgataattctgaattatgaccgtgctgtagaagcttttgcaaaaggcggaaatctgaccctcggagggaacttgactgtggcggttgggcccttgggaaggaacttggaaggaaacgtggccctgagaagctccgctgccgtcttcacgtactgcaagtcaaggggactctttgcaggcgtgtctttagaagggagctgtttgattgaaaggaaagaaactaatagaaaattttattgtcaagatatccgagcttatgacattttatttggagatacaccgcggcctgctcaagccgaagatctttatgaaattcttgattcctttactgaaaagtatgaaaatgaaggacaacgaatcaatgcaagaaaagcagcaagggagcagaggaagtcttctgctaaagaattacctccaaagccattgtcaagaccacagcagtcatctgcaccagtccagctgaactctggctctcaaagtaacagaaatgaatataagctctatcctggactttccagctatcatgagagagttggcaatttgaatcaacccatagaagtgacagcgctgtattcatttgaaggacagcagcctggggatttgaattttcaagctggagacagaatcacagttatatcaaaaacagattcacattttgattggtgggaaggaaaacttcgaggtcaaactggcatttttccagccaactacgtaaccatgaattaaagcgtatactattttcttctttgagaattacaaaaaaattatttctacactgacaggatttactagttaagcaatgtttaatataaattttaaaaaacttctgttctacaaaatttccattccgtatgtaaaagattttgtttttctatataaaaagagctgactgacatatctttaaatactttgtactaactttatcacacttactgtgtcatagaatatcatacagtttatacgctcatagttctcttgtgaacacttcaaacatcgctaagcatttgatctggccatgtatatggtagctgtgttttaatttgagaatcttgagggtagagccacaaatttcaattcttacatttccatttgcaaagtgactagagaaaaagaaatcagcttaaatgaggtattaagtaatgtttagagtcgtaggtattaactagaatataaatccttagaaattgtctttataccttcaaaaattatactatgcatttatcatagaaatgtgattacaaagaagtctgactaccatgtctttaaacatatggcatctctcaacttttcttccttatggggctacatttgttcatttccagcagtagcataaacttacggtgacatggtagacttgtctctaaataaaatttttaaatgtttactaagttaatatttcaaaaaaaaa

SEQ ID NO: 361272 - DNA, 1769 bp, Homo sapiens
tggaggggaaggagccgcgggagtgaataaccctataccttccaatttgaaatcagaagcaaaaaaggctgccaaaatattaagagaattcacagaaataacttccagaaatggacctgataagatcattcctgctcacgtaattgcgaaggctaaaggccttgcaattctgtctgtgatcaaagccgggttcctggtgactgccagaggaggcagcgggattgtagtggcgcgccttccagatggaaaatggtctgcaccctcagccattgggatagctggccttggtggaggatttgaaataggaattgagacacatttacagctacatattccctctgagcattgccctggctgccttccataagtgtggagtgccactccagctttcttaggttgccatctgcatgacacatctttctccatccttttactgtcaatctaatggtatcagacttggtgataattctgaattatgaccgtgctgtagaagcttttgcaaaaggcggaaatctgaccgaacttggaaggaaacgtggccctgagaagctccgctgccgtcttcacgtactgcaagtcaaggggactctttgcaggcgtgtctttagaagggagctgtttgattgaaaggaaagaaactaatagaaaattttattgtcaagatatccgagcttatgacattttatttggagatacaccgcggcctgctcaagccgaagatctttatgaaattcttgattcctttactgaaaagtatgaaaatgaaggacaacgaatcaatgcaagaaaagcagcaagggagcagaggaagtcttctgctaaagaattacctccaaagccattgtcaagaccacagcagtcatctgcaccagtccagctgaactctggctctcaaagcaatttgaatcaacccatagaagtgacagcgctgtattcatttgaaggacagcagcctggggatttgaattttcaagctggagacagaatcacagttatatcaaaaacagattcacattttgattggtgggaaggaaaacttcgaggtcaaactggcatttttccagccaactacgtaaccatgaattaaagcgtatactattttcttctttgagaattacaaaaaaattatttctacactgacaggatttactagttaagcaatgtttaatataaattttaaaaaacttctgttctacaaaatttccattccgtatgtaaaagattttgtttttctatataaaaagagctgactgacatatctttaaatactttgtactaactttatcacacttactgtgtcatagaatatcatacagtttatacgctcatagttctcttgtgaacacttcaaacatcgctaagcatttgatctggccatgtatatggtagctgtgttttaatttgagaatcttgagggtagagccacaaatttcaattcttacatttccatttgcaaagtgactagagaaaaagaaatcagcttaaatgaggtattaagtaatgtttagagtcgtaggtattaactagaatataaatccttagaaattgtctttataccttcaaaaattatactatgcatttatcatagaaatgtgattacaaagaagtctgactaccatgtctttaaacatatggcatctctcaacttttcttccttatggggctacatttgttcatttccagcagtagcataaacttacggtgacatggtagacttgtctctaaataaaatttttaaatgtttactaagttaatatttcaaaaaaaaa

SEQ ID NO: 361273 - DNA, 1678 bp, Homo sapiens
ccccactaaaccttaggatcaccacctacatgaccaggttgtgtggaagattgaaggacatgatgcaggtaaacctcatagtatacacatggtgcacagtaaatgctcgctgaggtttgttgtaattacctgtggcaatattggcttcataattcatcagctcaaaataaaaatatggctcttgtctcacgttctttcctgtctctattgatgttttgctacagtgcatatggtgtagttgagtgttagtcaagatgaattttaaatgatatttagtcttaacgatttttaaatccatgggtttctacactttaggtatcagacttggtgataattctgaattatgaccgtgctgtagaagcttttgcaaaaggcggaaatctgaccctcggagggaacttgactgtggcggttgggcccttgggaaggaacttggaaggaaacgtggccctgagaagctccgctgccgtcttcacgtactgcaagtcaaggggactctttgcaggcgtgtctttagaagggagctgtttgattgaaaggaaagaaactaatagaaaattttattgtcaagatatccgagcttatgacattttatttggagatacaccgcggcctgctcaagccgaagatctttatgaaattcttgattcctttactgaaaagtatgaaaatgaaggacaacgaatcaatgcaagaaaagcagcaagggagcagaggaagtcttctgctaaagaattacctccaaagccattgtcaagaccacagcagtcatctgcaccagtccagctgaactctggctctcaaagcaatttgaatcaacccatagaagtgacagcgctgtattcatttgaaggacagcagcctggggatttgaattttcaagctggagacagaatcacagttatatcaaaaacagattcacattttgattggtgggaaggaaaacttcgaggtcaaactggcatttttccagccaactacgtaaccatgaattaaagcgtatactattttcttctttgagaattacaaaaaaattatttctacactgacaggatttactagttaagcaatgtttaatataaattttaaaaaacttctgttctacaaaatttccattccgtatgtaaaagattttgtttttctatataaaaagagctgactgacatatctttaaatactttgtactaactttatcacacttactgtgtcatagaatatcatacagtttatacgctcatagttctcttgtgaacacttcaaacatcgctaagcatttgatctggccatgtatatggtagctgtgttttaatttgagaatcttgagggtagagccacaaatttcaattcttacatttccatttgcaaagtgactagagaaaaagaaatcagcttaaatgaggtattaagtaatgtttagagtcgtaggtattaactagaatataaatccttagaaattgtctttataccttcaaaaattatactatgcatttatcatagaaatgtgattacaaagaagtctgactaccatgtctttaaacatatggcatctctcaacttttcttccttatggggctacatttgttcatttccagcagtagcataaacttacggtgacatggtagacttgtctctaaataaaatttttaaatgtttactaagttaatatttcaaaaaaaaa

SEQ ID NO: 361274 - DNA, 1714 bp, Homo sapiens
agcggagtgtgcctgcggaggcggtcctatgacggaaaactttattctcaagagatttctcattccgcagaaataaggatctggcatgtcaacacaaacataggaagttgaggcagtcaaagggaaataactgctaccctgactctgctgagagcctcacaagtccctgtgcacgccagcttgtttgccatgaataaccctataccttccaatttgaaatcagaagcaaaaaaggctgccaaaatattaagagaattcacagaaataacttccagaaatggacctgataagatcattcctgctcacgtaattgcgaaggctaaaggccttgcaattctgtctgtgatcaaagccgggttcctggtgactgccagaggaggcagcgggattgtagtggcgcgccttccagatggaaaatggtctgcaccctcagccattgggatagctggccttggtggaggatttgaaataggaattgaggtatcagacttggtgataattctgaattatgaccgtgctgtagaagcttttgcaaaaggcggaaatctgaccctcggagggaacttgactgtggcggttgggcccttgggaagattttattgtcaagatatccgagcttatgacattttatttggagatacaccgcggcctgctcaagccgaagatctttatgaaattcttgattcctttactgaaaagtatgaaaatgaaggacaacgaatcaatgcaagaaaagcagcaagggagcagaggaagtcttctgctaaagaattacctccaaagccattgtcaagaccacagcagtcatctgcaccagtccagctgaactctggctctcaaagcaatttgaatcaacccatagaagtgacagcgctgtattcatttgaaggacagcagcctggggatttgaattttcaagctggagacagaatcacagttatatcaaaaacagattcacattttgattggtgggaaggaaaacttcgaggtcaaactggcatttttccagccaactacgtaaccatgaattaaagcgtatactattttcttctttgagaattacaaaaaaattatttctacactgacaggatttactagttaagcaatgtttaatataaattttaaaaaacttctgttctacaaaatttccattccgtatgtaaaagattttgtttttctatataaaaagagctgactgacatatctttaaatactttgtactaactttatcacacttactgtgtcatagaatatcatacagtttatacgctcatagttctcttgtgaacacttcaaacatcgctaagcatttgatctggccatgtatatggtagctgtgttttaatttgagaatcttgagggtagagccacaaatttcaattcttacatttccatttgcaaagtgactagagaaaaagaaatcagcttaaatgaggtattaagtaatgtttagagtcgtaggtattaactagaatataaatccttagaaattgtctttataccttcaaaaattatactatgcatttatcatagaaatgtgattacaaagaagtctgactaccatgtctttaaacatatggcatctctcaacttttcttccttatggggctacatttgttcatttccagcagtagcataaacttacggtgacatggtagacttgtctctaaataaaatttttaaatgtttactaagttaatatttcaaaaaaaaa

SEQ ID NO: 361275 - DNA, 1315 bp, Homo sapiens
tgtaaggtgactctacaggatctataaacggagctgaactccctaagaccttgcacaggtggtcagaggtgcctgggggaggttagcttccaggcatgagaagagcacaccctgtccacatctgagtcttgtcatccagttcaattacatagagtccagaggggtgcatgtgagctttgagagtgccacattaataagcacacatgataaaagtttgctacataacctcattagaaaagagttatatgtgcctaagtaaaaacaagattttaaaattatgtgtatttatctttttgtttctcccaggctaaagaattacctccaaagccattgtcaagaccacagcagtcatctgcaccagtccagctgaactctggctctcaaagtaacagaaatgaatataagctctatcctggactttccagctatcatgagagagttggcaatttgaatcaacccatagaagtgacagcgctgtattcatttgaaggacagcagcctggggatttgaattttcaagctggagacagaatcacagttatatcaaaaacagattcacattttgattggtgggaaggaaaacttcgaggtcaaactggcatttttccagccaactacgtaaccatgaattaaagcgtatactattttcttctttgagaattacaaaaaaattatttctacactgacaggatttactagttaagcaatgtttaatataaattttaaaaaacttctgttctacaaaatttccattccgtatgtaaaagattttgtttttctatataaaaagagctgactgacatatctttaaatactttgtactaactttatcacacttactgtgtcatagaatatcatacagtttatacgctcatagttctcttgtgaacacttcaaacatcgctaagcatttgatctggccatgtatatggtagctgtgttttaatttgagaatcttgagggtagagccacaaatttcaattcttacatttccatttgcaaagtgactagagaaaaagaaatcagcttaaatgaggtattaagtaatgtttagagtcgtaggtattaactagaatataaatccttagaaattgtctttataccttcaaaaattatactatgcatttatcatagaaatgtgattacaaagaagtctgactaccatgtctttaaacatatggcatctctcaacttttcttccttatggggctacatttgttcatttccagcagtagcataaacttacggtgacatggtagacttgtctctaaataaaatttttaaatgtttactaagttaatatttcaaaaaaaaa

SEQ ID NO: 361276 - DNA, 790 bp, Homo sapiens
  misc_feature (24)..(24): n is a, c, g, or t
agcaggctggtacaggcccgagangtaagatgggcagcctcgggacggggcgccgcggccgggcgggcagcatgaataaccctataccttccaatttgaaatcagaagcaaaaaaggctgccaaaatattaagagaattcacagaaataacttccagaaatggacctgataagatcattcctgctcacgtaattgcgaaggctaaaggccttgcaattctgtctgtgatcaaagccgggttcctggtgactgccagaggaggcagcgggattgtagtggcgcgccttccagatggaaaatggtctgcaccctcagccattgggatagctggccttggtggaggatttgaaataggaattgaggtatcagacttggtgataattctgaattatgaccgtgctgtagaagcttttgcaaaaggcggaaatctgaccctcggagggaacttgactgtggcggttgggcccttgggaaggaacttggaaggaaacgtggccctgagaagctccgctgccgtcttcacgtactgcaagtcaaggggactctttgcaggcgtgtctttagaagggagctgtttgattgaaaggaaagaaactaatagaaagtcagttcaagttaaagtgattttaattgaaagtgtgatgagaaaatagtacttcaaaagttgatataatttgcagagtacatttatatattctttttacaacatgtggttttaagtgtgtatcttacatttaaaaattaaatatacaaataatatatgctcgtagaaaatgcagaagacacatga

SEQ ID NO: 361277 - DNA, 1666 bp, Homo sapiens
agcggagggactgggccgccgttcacctgcaggggcggggctgcaggaaaactttattctcaagagatttctcattccgcagaaataaggatctggcatgtcaacacaaacataggaagttgaggcagtcaaagggaaataactgctaccctgactctgctgagagcctcacaagtccctgtgcacgccagcttgtttgccagtgagtggcgtcatgataagacaaaattctctgctctgagacctaagcacatgaagtttttaaaaaaattttctctgagaagatcccattttttactctaaaagatcagaccagtgtggcatgtgtggaactgctctgtaccaagatcacactcttcagttggagaagaggaagggcaggaataaataaagggctttcctgtctcccgagggagcagagaaagctttcgctgtcctcttccttccccagccacagcctggggttgggggactggaaacaagctcaggctagcacttgatgttcagacggtagtctgaaagtttgactagggagttaatgatctgaccagagagacaggtttttattttgagaactgacaagctttgtgtccttaaaacaaaggaagtagttaaaccaaggccccagaaaggtaagaattgacttaagaaacaaaggccatagttgtcaagcagtggagttcaaaatgcagttttgttaataaaagtagcttaaagcaacatttgaaagcctctctaaagattagatacatacactttcttttggctaagatttctttagtttattctaaatatacctttagcagcattcaagttcctttgatcttagatggaattttatcagtttaatgagttaacctccatttcacataaagtataaggtttaataatttgattaatatgtaatcagtaagaacttggaaaaccaaatttagtaagcttgctttcctgtaagtattcctttcataattagagtccattgaagaaaataatataagggaagcaaaagtttgggaatctgaactctggtaaggaaagtggtggagaggggcccttgggtcttcttgctttcattcctgaccctccgtgtacaactagattggaaaccgtagtcagctttgtcacctcaggtggcaatttactccgagtaggattctcatgtccctgtttgtccccagtgactctagcattgagtttatagaactgcgatcaatacctaaaattatttccagatcttaagctgatttatgcttttgaggtttccaaagtaaaaattgtctttccggtattttataagaccttctaatttaaaaaaaaaatgtgttactatgaaaatttaaaacattttaacttttgttttaaagaaaactttatttgaaagtttcttagcttgaggtttggcagccactctttttttagaaaaaacttaaatatttatagagattttgcctgattcaagggacttaagacgtttatgagagtgcagatgctaaccatgatgtgaggtttaagaggcttcattagtaatgacctgtgtcttcatcagtatgatagaatgggacatcagcactctgatcaggtcatgctctatatgccttatggtacagcagaggaaaaatgggtgagccatcatttgatgctgaggatgggatttgaggcttatgtc

SEQ ID NO: 361278 - DNA, 2601 bp, Homo sapiens
ggcagatctcacgagagaggatttggcgccctcctctgtggattctggccaggccgggttcggcggttgctgtgagagcgggcttcccaacaccatgccgtccgccttctctgtcagctctttccccgtcagcatcccagccgtgctcacggtacagcagggtcccggggagtccaggaggcggcggagtgcggcactgtctggagagttcactgtattgcagagaggttggagaaaatcaagtcttgcacgtggcgatggctcaagattccctgaggtcttcagtgctgactaaggagtctgaaatgatgattcatgttttacctttggggctgagccaagtgcatctctttgagcaatcgtcttaatttccttgtcgtcaccaattatcataaccaattatcatcgtaaaggatggtaattcctttaattatacccaccttaaaaacatgattctgttccacaaacgaaaggagcacatcagagatgccttcagttctgtgtgcttgaactttgaattccatgaattatagttgcactgaggggagaatcctgtttacatcctcctggttccttctccctttcctgtccccatgtttctctgaggcctggcaatgctctctggatacttgcagacggactggactgagccctggctcatggggctggccaccttccacgcgctctgcgtgctcctcacctgcttgtcctcccgaagctacagactacagatcgggcactttctgtgtctagtcatcttagtctactgtgctgaatacatcaatgaggcggctgcgatgaactggagattattttcgaaataccagtatttcgactccagggggatgttcatttctatagtattttcagccccactgctggtgaatgccatgatcattgtggttatgtgggtatggaagactttgaatgtgatgactgacctgaagaatgcacaagagagaagaaaggaaaagaaaaggagaaggaaagaagactgaggggcagcagctgcttggagtttgcgtccttcccgtccacccagtgcagctcccagtgctgcagtgtgcgtggcgtgggcatccttccagctgactcatggtttgaaaaaccgttgttttatttaaatatccacagtggtagggcacacactgaagttggcttttcagccagcactgaatgtatccatcaggacatgcgtcttcaggtgcctgatctttgtagtcaggctgtgggaacggtctctgcagagcttcataactggaatttgattgaagaagtccatgtcatatgtgtaactagtactaattataaatataaaatacacaatataaaatatgaaactcaataataaacagtgccacctgtacatgggcaccatgccctcctcctcgtgctgtgttttctagtgcatgccacagttcgcagtagagggtgttttcaccttccaagacatggggcaaagtttggagacacctggttgtcactggagggggtggtgctcctggcttctcctgtggagcccggggtgatgcataaaatcctgtgtgcctgggtcagccgcatcacagacaatgacttgacatgaaatgtcagctgtgctggggcagagagaccttggaaggaagctcttggaaaatacgttgtatctcagtttgatgaaccaattcacaagaggctaggccctctctagcaaagttatgggctgctttactgaaaacagaatggaagccctgaagtcaacactccatggagaagcgtgtctttcctaatgtcctggtgttctgttgatttaggtgcttgggaacacaatgctcccagttctgttaggacaggcatactgttactttgcaatatccactttataaaatagctcctgcccagtggctcttggttcctgtcaaatgtggacctgtagtttaagaatgacaggtggttagagacccagatatttaaaaataggtgttcaataagggaatactgattgtgcattgtatctggatagcatgcctaattgtgcatttctgaaagttaccaattcaaaatgtaattggaacagttatctttgattagacaagcctgggaagagaatgttgaggtgcagagctcaccagccaagttcatgcccctctcgggcctttgtggctgagaagtgggacagaaagatgattaaggtaatgtgtcctccctgtagcattgtccagggccgttgtgtagatatttgacttcactgacagaaaagaaaccagggagtttgtagagactgtgcatttttagtataacattttcaccatctgatatggtttggctttgtgtccccacccaaattgcatctcaaattgtaatccccatgtgtcaagggagggacctgatgggaggtgatgggatcatgggggtggtttcccctatgttgttatcataatagagagggagttctcacaagatctgctggttttaaagacagcagtttcccctgctgtcactgtctctctcctgctgccttgtgaagaaggtgcttgtttctccctctgccatgattgtaagtttcccgaggcctccccggccatgtggaactgagtcaattaaacttcttgtttataaagt

SEQ ID NO: 361279 - DNA, 1316 bp, Homo sapiens
agcggagggactgggccgccgttcacctgcaggggcggggctgcaggaaaactttattctcaagagatttctcattccgcagaaataaggatctggcatgtcaacacaaacataggaagttgaggcagtcaaagggaaataactgctaccctgactctgctgagagcctcacaagtccctgtgcacgccagcttgtttgccagtgagtggcgtcatgataagacaaaattctctgctctgagacctaagcacatgaagtttttaaaaaaattttctctgagaagatcccattttttactctaaaagatcagaccagtgtggcatgtgtggaactgctctgtaccaagatcacactcttcagttggagaagaggaagggcaggaataaataaagggctttcctgtctcccgagggagcagagaaagctttcgctgtcctcttccttccccagccacagcctggggttgggggactggaaacaagctcaggctagcacttgatgttcagacggtagtctgaaagtttgactagggagttaatgatctgaccagagagacaggtttttattttgagaactgacaagctttgtgtccttaaaacaaaggaagtagttaaaccaaggccccagaaagagaaattcactgcatgtaactatgaccacgcatgattttatcagaagttgattagaatctgtaacattttctgtagttcagctgacacactgaagatgtcctcactgtgaccagccttgtcaacagctggatcacagtgacataagctgtgtctaggatgagtcttgcggtctgcagccgtgtgaggctgcatctgattcccaagtccaatggctctcttcccgtgtttacagatcaggccatgacctttccctacagcaggatgtttgcaagattaactctcaactgaggaatttgcttatttgctctaatactgcttggttgagagagttcaaagtagaaagtcttctgaggggataagattcatgtattatttacagtgcttcagttgcatgtatcagaaaatctagtctaaattgctttaacagaaaaagatgttgctggtccatttgacgaagaagtccagagcggcttgtgacttcagtctggctttgcagagcccaggtgctctctccaccttctgccaggttcccctacgaaggctttgctctcagactctccccttgtggagacaaaaatcccacagcaagtggaaacagaagtgccttggaaaaagttattctggcagctcctatacaagtcccccatcagatgctggtattggaccagctttggttataaagc

SEQ ID NO: 361280 - DNA, 1242 bp, Homo sapiens
  misc_feature (24)..(24): n is a, c, g, or t
agcaggctggtacaggcccgagangtaagatgggcagcctcgggacggggcgccgcggccgggcgggcagcatgaataaccctataccttccaatttgaaatcagaagcaaaaaaggctgccaaaatattaagagaattcacagaaataacttccagaaatggacctgataagatcattcctgctcacgtaattgcgaaggctaaaggccttgcaattctgtctgtgatcaaagccgggttcctggtgactgccagaggaggcagcgggattgtagtggcgcgccttccagatggaaaatggtctgcaccctcagccattgggatagctggccttggtggaggatttgaaataggaattgaggtatcagacttggtgataattctgaattatgaccgtgctgtagaagcttttgcaaaaggcggaaatctgaccctcggagggaacttgactgtggcggttgggcccttgggaagattttattgtcaagatatccgagcttatgacattttatttggagatacaccgcggcctgctcaagccgaagatctttatgaaattcttgattcctttactgaaaagtatgaaaatgaaggacaacgaatcaatgcaagaaaagcagcaagggagcagaggaagtcttctgtaccgtttggttttatgtttcactcagtattctcagaaaatctctttctgtagaacattctgtccctgatatcaggttcctaagaacctactaagcctccttcgtagtttcactgacttcacattcttgtgaaaaggtcatgctaccttgacatttcctctgtacagatttcagggaaaaacataatttgtcctctgtgattgcatttctccaaggatggaactttgttgtatcaataatacaaataatatgtgggaggctgaggcaggtggagcacttgagatcaggagtttcagaccagcctggccaacatggcaaaaccccctctctaccataaaaatagaaacattagctgggcatggtggcgtgtgcccataatctcagctactcaggaggctgaaacaggaggatcgcttgagcccatgaggttgcactgagccaagatcatgccattgcactcagcctaggcaacagagtaagaccttatctcaataataatatatgaataatagttgcagatactgacgcctttgtatgtcaggccttggggcaccgagggatttgtgtgcattgttcatgatgttccacagcaccttt

SEQ ID NO: 361281 - DNA, 868 bp, Homo sapiens
agcggagtgtgcctgcggaggcggtcctatgacggaaaactttattctcaagagatttctcattccgcagaaataaggatctggcatgtcaacacaaacataggaagttgaggcagtcaaagggaaataactgctaccctgactctgctgagagcctcacaagtccctgtgcacgccagcttgtttgccatgaataaccctataccttccaatttgaaatcagaagcaaaaaaggctgccaaaatattaagagaattcacagaaataacttccagaaatggacctgataagatcattcctgctcacgtaattgcgaaggctaaaggccttgcaattctgtctgtgatcaaagccgggttcctggtgactgccagaggaggcagcgggattgtagtggcgcgccttccagatggaaaatggtctgcaccctcagccattgggatagctggccttggtggaggatttgaaataggaattgaggtatcagacttggtgataattctgaattatgaccgtgctgtagaagcttttgcaaaaggcggaaatctgaccctcggagggaacttgactgtggcggttgggcccttgggaagattttattgtcaagatatccgagcttatgacattttatttggagatacaccgcggcctgctcaagccgaagatctttatgaaattcttgattcctttactgaaaagtatgaaaatgaaggacaacgaatcaatgcaagaaaagcagcaagggagcagaggaagtcttctgctaaagaattacctccaaagccattgtcaagaccacagcagtcatctgcaccagtccagctgaactctggctctcaaagtaaatatttttgttgcaattcaaata

SEQ ID NO: 361282 - DNA, 2100 bp, Homo sapiens
ccgtgccgggttcgtctgacagatcccaggggagcccacgccccacgtggccgccaaggggtgacatgggcactcgatggggtctgggcagaaagccgtgctcccctcacctccgtgcctctggtcttctgcagacggactggactgagccctggctcatggggctggccaccttccacgcgctctgcgtgctcctcacctgcttgtcctcccgaagctacagactacagatcgggcactttctgtgtctagtcatcttagtctactgtgctgaatacatcaatgaggcggctgcgatgaactggagattattttcgaaataccagtatttcgactccagggggatgttcatttctatagtattttcagccccactgctggtgaatgccatgatcattgtggttatgtgggtatggaagactttgaatgtgatgactgacctgaagaatgcacaagagagaagaaaggaaaagaaaaggagaaggaaagaagactgaggggcagcagctgcttggagtttgcgtccttcccgtccacccagtgcagctcccagtgctgcagtgtgcgtggcgtgggcatccttccagctgactcatggtttgaaaaaccgttgttttatttaaatatccacagtggtagggcacacactgaagttggcttttcagccagcactgaatgtatccatcaggacatgcgtcttcaggtgcctgatctttgtagtcaggctgtgggaacggtctctgcagagcttcataactggaatttgattgaagaagtccatgtcatatgtgtaactagtactaattataaatataaaatacacaatataaaatatgaaactcaataataaacagtgccacctgtacatgggcaccatgccctcctcctcgtgctgtgttttctagtgcatgccacagttcgcagtagagggtgttttcaccttccaagacatggggcaaagtttggagacacctggttgtcactggagggggtggtgctcctggcttctcctgtggagcccggggtgatgcataaaatcctgtgtgcctgggtcagccgcatcacagacaatgacttgacatgaaatgtcagctgtgctggggcagagagaccttggaaggaagctcttggaaaatacgttgtatctcagtttgatgaaccaattcacaagaggctaggccctctctagcaaagttatgggctgctttactgaaaacagaatggaagccctgaagtcaacactccatggagaagcgtgtctttcctaatgtcctggtgttctgttgatttaggtgcttgggaacacaatgctcccagttctgttaggacaggcatactgttactttgcaatatccactttataaaatagctcctgcccagtggctcttggttcctgtcaaatgtggacctgtagtttaagaatgacaggtggttagagacccagatatttaaaaataggtgttcaataagggaatactgattgtgcattgtatctggatagcatgcctaattgtgcatttctgaaagttaccaattcaaaatgtaattggaacagttatctttgattagacaagcctgggaagagaatgttgaggtgcagagctcaccagccaagttcatgcccctctcgggcctttgtggctgagaagtgggacagaaagatgattaaggtaatgtgtcctccctgtagcattgtccagggccgttgtgtagatatttgacttcactgacagaaaagaaaccagggagtttgtagagactgtgcatttttagtataacattttcaccatctgatatggtttggctttgtgtccccacccaaattgcatctcaaattgtaatccccatgtgtcaagggagggacctgatgggaggtgatgggatcatgggggtggtttcccctatgttgttatcataatagagagggagttctcacaagatctgctggttttaaagacagcagtttcccctgctgtcactgtctctctcctgctgccttgtgaagaaggtgcttgtttctccctctgccatgattgtaagtttcccgaggcctccccggccatgtggaactgagtcaattaaacttcttgtttataaagt

SEQ ID NO: 361283 - DNA, 446 bp, Homo sapiens
agcggagtgtgcctgcggaggcggtcctatgacggaaaactttattctcaagagatttctcattccgcagaaataaggatctggcatgtcaacacaaacataggaagttgaggcagtcaaagggaaataactgctaccctgactctgctgagagcctcacaagtccctgtgcacgccagcttgtttgccaaaaaagatgttgctggtccatttgacgaagaagtccagagcggcttgtgacttcagtctggctttgcagagcccaggtgctctctccaccttctgccaggttcccctacgaaggctttgctctcagactctccccttgtggagacaaaaatcccacagcaagtggaaacagaagtgccttggaaaaagttattctggcagctcctatacaagtcccccatcagatgctggtattggaccagctttggttataaagc

SEQ ID NO: 361284 - DNA, 1978 bp, Homo sapiens
ctggaaacaacccaattgtctatcaacagtgactggaaggacaaattgtgctatgtccacacattagaataccagttggcagtcaaaaaggaagagctgatctgtgcagcaatttgagtctcagtaatttcatgtgaataaccctataccttccaatttgaaatcagaagcaaaaaaggctgccaaaatattaagagaattcacagaaataacttccagaaatggacctgataagatcattcctgctcacgtaattgcgaaggctaaaggccttgcaattctgtctgtgatcaaagccgggttcctggtgactgccagaggaggcagcgggattgtagtggcgcgccttccagatggaaaatggtctgcaccctcagccattgggatagctggccttggtggaggatttgaaataggaattgagacacatttacagctacatattccctctgagcattgccctggctgccttccataagtgtggagtgccactccagctttcttaggttgccatctgcatgacacatctttctccatccttttactgtcaatctaatggtatcagacttggtgataattctgaattatgaccgtgctgtagaagcttttgcaaaaggcggaaatctgaccctcggagggaacttgactgtggcggttgggcccttgggaaggaacttggaaggaaacgtggccctgagaagctccgctgccgtcttcacgtactgcaagtcaaggggactctttgcaggcgtgtctttagaagggagctgtttgattgaaaggaaagaaactaatagaaaattttattgtcaagatatccgagcttatgacattttatttggagatacaccgcggcctgctcaagccgaagatctttatgaaattcttgattcctttactgaaaagtatgaaaatgaaggacaacgaatcaatgcaagaaaagcagcaagggagcagaggaagtcttctgctaaagaattacctccaaagccattgtcaagaccacagcagtcatctgcaccagtccagctgaactctggctctcaaagtaacagaaatgaatataagctctatcctggactttccagctatcatgagagagttggcaatttgaatcaacccatagaagtgacagcgctgtattcatttgaaggacagcagcctggggatttgaattttcaagctggagacagaatcacagttatatcaaaaacagattcacattttgattggtgggaaggaaaacttcgaggtcaaactggcatttttccagccaactacgtaaccatgaattaaagcgtatactattttcttctttgagaattacaaaaaaattatttctacactgacaggatttactagttaagcaatgtttaatataaattttaaaaaacttctgttctacaaaatttccattccgtatgtaaaagattttgtttttctatataaaaagagctgactgacatatctttaaatactttgtactaactttatcacacttactgtgtcatagaatatcatacagtttatacgctcatagttctcttgtgaacacttcaaacatcgctaagcatttgatctggccatgtatatggtagctgtgttttaatttgagaatcttgagggtagagccacaaatttcaattcttacatttccatttgcaaagtgactagagaaaaagaaatcagcttaaatgaggtattaagtaatgtttagagtcgtaggtattaactagaatataaatccttagaaattgtctttataccttcaaaaattatactatgcatttatcatagaaatgtgattacaaagaagtctgactaccatgtctttaaacatatggcatctctcaacttttcttccttatggggctacatttgttcatttccagcagtagcataaacttacggtgacatggtagacttgtctctaaataaaatttttaaatgtttactaagttaatatttcaaaaaaaaa

SEQ ID NO: 361285 - DNA, 728 bp, Homo sapiens
agcggagtgtgcctgcggaggcggtcctatgacggaaaactttattctcaagagatttctcattccgcagaaataaggatctggcatgtcaacacaaacataggaagttgaggcagtcaaagggaaataactgctaccctgactctgctgagagcctcacaagtccctgtgcacgccagcttgtttgccatgaataaccctataccttccaatttgaaatcagaagcaaaaaaggctgccaaaatattaagagaattcacagaaataacttccagaaatggacctgataagatcattcctgctcacgtaattgcgaaggctaaaggccttgcaattctgtctgtgatcaaagccgggttcctggtgactgccagaggaggcagcgggattgtagtggcgcgccttccagatggaaaatggtctgcaccctcagccattgggatagctggccttggtggaggatttgaaataggaattgagacacatttacagctacatattccctctgagcattgccctggctgccttccataagtgtgggttaccatctggtgtcatttccttactccaagacaactttgctcccacctgactcttttgtacggttattgtctagtatataatatttctatagttacagacttaaaatatagaaaaaatttatttttaaaccaattaagagaaaagagaagaactatgcatttatactattatttatggttagataa

SEQ ID NO: 361286 - DNA, 1782 bp, Homo sapiens
  misc_feature (24)..(24): n is a, c, g, or t
agcaggctggtacaggcccgagangtaagatgggcagcctcgggacggggcgccgcggccgggcgggcagcatgaataaccctataccttccaatttgaaatcagaagcaaaaaaggctgccaaaatattaagagaattcacagaaataacttccagaaatggacctgataagatcattcctgctcacgtaattgcgaaggctaaaggccttgcaattctgtctgtgatcaaagccgggttcctggtgactgccagaggaggcagcgggattgtagtggcgcgccttccagatggaaaatggtctgcaccctcagccattgggatagctggccttggtggaggatttgaaataggaattgaggtatcagacttggtgataattctgaattatgaccgtgctgtagaagcttttgcaaaaggcggaaatctgaccctcggagggaacttgactgtggcggttgggcccttgggaaggaacttggaaggaaacgtggccctgagaagctccgctgccgtcttcacgtactgcaagtcaaggggactctttgcaggcgtgtctttagaagggagctgtttgattgaaaggaaagaaactaatagaaaattttattgtcaagatatccgagcttatgacattttatttggagatacaccgcggcctgctcaagccgaagatctttatgaaattcttgattcctttactgaaaagtatgaaaatgaaggacaacgaatcaatgcaagaaaagcagcaagggagcagaggaagtcttctgctaaagaattacctccaaagccattgtcaagaccacagcagtcatctgcaccagtccagctgaactctggctctcaaagtaacagaaatgaatataagctctatcctggactttccagctatcatgagagagttggcaatttgaatcaacccatagaagtgacagcgctgtattcatttgaaggacagcagcctggggatttgaattttcaagctggagacagaatcacagttatatcaaaaacagattcacattttgattggtgggaaggaaaacttcgaggtcaaactggcatttttccagccaactacgtaaccatgaattaaagcgtatactattttcttctttgagaattacaaaaaaattatttctacactgacaggatttactagttaagcaatgtttaatataaattttaaaaaacttctgttctacaaaatttccattccgtatgtaaaagattttgtttttctatataaaaagagctgactgacatatctttaaatactttgtactaactttatcacacttactgtgtcatagaatatcatacagtttatacgctcatagttctcttgtgaacacttcaaacatcgctaagcatttgatctggccatgtatatggtagctgtgttttaatttgagaatcttgagggtagagccacaaatttcaattcttacatttccatttgcaaagtgactagagaaaaagaaatcagcttaaatgaggtattaagtaatgtttagagtcgtaggtattaactagaatataaatccttagaaattgtctttataccttcaaaaattatactatgcatttatcatagaaatgtgattacaaagaagtctgactaccatgtctttaaacatatggcatctctcaacttttcttccttatggggctacatttgttcatttccagcagtagcataaacttacggtgacatggtagacttgtctctaaataaaatttttaaatgtttactaagttaatatttcaaaaaaaaa

SEQ ID NO: 361287 - DNA, 1733 bp, Homo sapiens
tggaggggaaggagccgcgggagtgaataaccctataccttccaatttgaaatcagaagcaaaaaaggctgccaaaatattaagagaattcacagaaataacttccagaaatggacctgataagatcattcctgctcacgtaattgcgaaggctaaaggccttgcaattctgtctgtgatcaaagccgggttcctggtgactgccagaggaggcagcgggattgtagtggcgcgccttccagatggaaaatggtctgcaccctcagccattgggatagctggccttggtggaggatttgaaataggaattgaggtatcagacttggtgataattctgaattatgaccgtgctgtagaagcttttgcaaaaggcggaaatctgaccctcggagggaacttgactgtggcggttgggcccttgggaaggaacttggaaggaaacgtggccctgagaagctccgctgccgtcttcacgtactgcaagtcaaggggactctttgcaggcgtgtctttagaagggagctgtttgattgaaaggaaagaaactaatagaaaattttattgtcaagatatccgagcttatgacattttatttggagatacaccgcggcctgctcaagccgaagatctttatgaaattcttgattcctttactgaaaagtatgaaaatgaaggacaacgaatcaatgcaagaaaagcagcaagggagcagaggaagtcttctgctaaagaattacctccaaagccattgtcaagaccacagcagtcatctgcaccagtccagctgaactctggctctcaaagtaacagaaatgaatataagctctatcctggactttccagctatcatgagagagttggcaatttgaatcaacccatagaagtgacagcgctgtattcatttgaaggacagcagcctggggatttgaattttcaagctggagacagaatcacagttatatcaaaaacagattcacattttgattggtgggaaggaaaacttcgaggtcaaactggcatttttccagccaactacgtaaccatgaattaaagcgtatactattttcttctttgagaattacaaaaaaattatttctacactgacaggatttactagttaagcaatgtttaatataaattttaaaaaacttctgttctacaaaatttccattccgtatgtaaaagattttgtttttctatataaaaagagctgactgacatatctttaaatactttgtactaactttatcacacttactgtgtcatagaatatcatacagtttatacgctcatagttctcttgtgaacacttcaaacatcgctaagcatttgatctggccatgtatatggtagctgtgttttaatttgagaatcttgagggtagagccacaaatttcaattcttacatttccatttgcaaagtgactagagaaaaagaaatcagcttaaatgaggtattaagtaatgtttagagtcgtaggtattaactagaatataaatccttagaaattgtctttataccttcaaaaattatactatgcatttatcatagaaatgtgattacaaagaagtctgactaccatgtctttaaacatatggcatctctcaacttttcttccttatggggctacatttgttcatttccagcagtagcataaacttacggtgacatggtagacttgtctctaaataaaatttttaaatgtttactaagttaatatttcaaaaaaaaa

SEQ ID NO: 361288 - DNA, 1371 bp, Homo sapiens
  misc_feature (24)..(24): n is a, c, g, or t
agcaggctggtacaggcccgagangtaagatgggcagcctcgggacggggcgccgcggccgggcgggcagcatgaataaccctataccttccaatttgaaatcagaagcaaaaaaggctgccaaaatattaagagaattcacagaaataacttccagaaatggacctgataagatcattcctgctcacgtaattgcgaaggctaaaggccttgcaattctgtctgtgatcaaagccgggttcctggtgactgccagaggaggcagcgggattgtagtggcgcgccttccagatggaaaatggtctgcaccctcagccattgggatagctggccttggtggaggatttgaaataggaattgaggtatcagacttggtgataattctgaattatgaccgtgctgtagaagcttttgcaaaaggcggaaatctgaccctcggagggaacttgactgtggcggttgggcccttgggaaggaacttggaaggaaacgtggccctgagaagctccgctgccgtcttcacgtactgcaagtcaaggggactctttgcaggcgtgtctttagaagggagctgtttgattgaaaggaaagaaactaatagaaaattttattgtcaagatatccgagcttatgacattttatttggagatacaccgcggcctgctcaagccgaagatctttatgaaattcttgattcctttactgaaaagtatgaaaatgaaggacaacgaatcaatgcaagaaaagcagcaagggagcagaggaagtcttctgtaccgtttggttttatgtttcactcagtattctcagaaaatctctttctgtagaacattctgtccctgatatcaggttcctaagaacctactaagcctccttcgtagtttcactgacttcacattcttgtgaaaaggtcatgctaccttgacatttcctctgtacagatttcagggaaaaacataatttgtcctctgtgattgcatttctccaaggatggaactttgttgtatcaataatacaaataatatgtgggaggctgaggcaggtggagcacttgagatcaggagtttcagaccagcctggccaacatggcaaaaccccctctctaccataaaaatagaaacattagctgggcatggtggcgtgtgcccataatctcagctactcaggaggctgaaacaggaggatcgcttgagcccatgaggttgcactgagccaagatcatgccattgcactcagcctaggcaacagagtaagaccttatctcaataataatatatgaataatagttgcagatactgacgcctttgtatgtcaggccttggggcaccgagggatttgtgtgcattgttcatgatgttccacagcaccttt

SEQ ID NO: 361289 - DNA, 2581 bp, Homo sapiens
ccgtgccgggttcgtctgacagatcccaggggagcccacgccccacgtggccgccaaggggtgacatgggcactcgatggggtctgggcagaaagccgtgctcccctcacctccgtgcctctggtcttctggtacagcagggtcccggggagtccaggaggcggcggagtgcggcactgtctggagagttcactgtattgcagagaggttggagaaaatcaagtcttgcacgtggcgatggctcaagattccctgaggtcttcagtgctgactaaggagtctgaaatgatgattcatgttttacctttggggctgagccaagtgcatctctttgagcaatcgtcttaatttccttgtcgtcaccaattatcataaccaattatcatcgtaaaggatggtaattcctttaattatacccaccttaaaaacatgattctgttccacaaacgaaaggagcacatcagagatgccttcagttctgtgtgcttgaactttgaattccatgaattatagttgcactgaggggagaatcctgtttacatcctcctggttccttctccctttcctgtccccatgtttctctgaggcctggcaatgctctctggatacttgcagacggactggactgagccctggctcatggggctggccaccttccacgcgctctgcgtgctcctcacctgcttgtcctcccgaagctacagactacagatcgggcactttctgtgtctagtcatcttagtctactgtgctgaatacatcaatgaggcggctgcgatgaactggagattattttcgaaataccagtatttcgactccagggggatgttcatttctatagtattttcagccccactgctggtgaatgccatgatcattgtggttatgtgggtatggaagactttgaatgtgatgactgacctgaagaatgcacaagagagaagaaaggaaaagaaaaggagaaggaaagaagactgaggggcagcagctgcttggagtttgcgtccttcccgtccacccagtgcagctcccagtgctgcagtgtgcgtggcgtgggcatccttccagctgactcatggtttgaaaaaccgttgttttatttaaatatccacagtggtagggcacacactgaagttggcttttcagccagcactgaatgtatccatcaggacatgcgtcttcaggtgcctgatctttgtagtcaggctgtgggaacggtctctgcagagcttcataactggaatttgattgaagaagtccatgtcatatgtgtaactagtactaattataaatataaaatacacaatataaaatatgaaactcaataataaacagtgccacctgtacatgggcaccatgccctcctcctcgtgctgtgttttctagtgcatgccacagttcgcagtagagggtgttttcaccttccaagacatggggcaaagtttggagacacctggttgtcactggagggggtggtgctcctggcttctcctgtggagcccggggtgatgcataaaatcctgtgtgcctgggtcagccgcatcacagacaatgacttgacatgaaatgtcagctgtgctggggcagagagaccttggaaggaagctcttggaaaatacgttgtatctcagtttgatgaaccaattcacaagaggctaggccctctctagcaaagttatgggctgctttactgaaaacagaatggaagccctgaagtcaacactccatggagaagcgtgtctttcctaatgtcctggtgttctgttgatttaggtgcttgggaacacaatgctcccagttctgttaggacaggcatactgttactttgcaatatccactttataaaatagctcctgcccagtggctcttggttcctgtcaaatgtggacctgtagtttaagaatgacaggtggttagagacccagatatttaaaaataggtgttcaataagggaatactgattgtgcattgtatctggatagcatgcctaattgtgcatttctgaaagttaccaattcaaaatgtaattggaacagttatctttgattagacaagcctgggaagagaatgttgaggtgcagagctcaccagccaagttcatgcccctctcgggcctttgtggctgagaagtgggacagaaagatgattaaggtaatgtgtcctccctgtagcattgtccagggccgttgtgtagatatttgacttcactgacagaaaagaaaccagggagtttgtagagactgtgcatttttagtataacattttcaccatctgatatggtttggctttgtgtccccacccaaattgcatctcaaattgtaatccccatgtgtcaagggagggacctgatgggaggtgatgggatcatgggggtggtttcccctatgttgttatcataatagagagggagttctcacaagatctgctggttttaaagacagcagtttcccctgctgtcactgtctctctcctgctgccttgtgaagaaggtgcttgtttctccctctgccatgattgtaagtttcccgaggcctccccggccatgtggaactgagtcaattaaacttcttgtttataaagt

SEQ ID NO: 361290 - DNA, 1603 bp, Homo sapiens
  misc_feature (1536)..(1537): n is a, c, g, or t
ggcagatctcacgagagaggatttggcgccctcctctgtggattctggccaggccgggttcggcggttgctgtgagagcgggcttcccaacaccatgccgtccgccttctctgtcagctctttccccgtcagcatcccagccgtgctcacggtacagcagggtcccggggagtccaggaggcggcggagtgcggcactgtctggagagttcactgtattgcagagaggttggagaaaatcaagtcttgcacgtggcgatggctcaagattccctgaggtcttcagtgctgactaaggagtctgaaatgatgattcatgttttacctttggggctgagccaagtgcatctctttgagcaatcgtcttaatttccttgtcgtcaccaattatcataaccaattatcatcgtaaaggatggtaattcctttaattatacccaccttaaaaacatgattctgttccacaaacgaaaggagcacatcagagatgccttcagttctgtgtgcttgaactttgaattccatgaattatagttgcactgaggggagaatcctgtttacatcctcctggttccttctccctttcctgtccccatgtttctctgaggcctggcaatgctctctggatacttggtgagtagcccaggaggactcaggagtgagaggcccctgcctcctgcgctgggagaaggctgtgggtgggccgtgaaccccggccttgagtggcaggacagtgagtgtctgctggtgtgttcctacagcagacggactggactgagccctggctcatggggctggccaccttccacgcgctctgcgtgctcctcacctgcttgtcctcccgaagctacagactacagatcgggcactttctgtgtctagtcatcttagtctactgtgctgaatacatcaatgaggcggctgcgatgaactggagattattttcgaaataccagtatttcgactccagggggatgttcatttctatagtattttcagccccactgctggtgaatgccatgatcattgtggttatgtgggtatggaagactttgaatgtgatgactgacctgaagaatgcacaagagagaagaaaggaaaagaaaaggagaaggaaagaagactcgggggccccccgtggttggatttccgggcctttcccgaccacccaagcagctcccaaggcgtggaggtggggggggtgcgcccaccctccagcctgactagggggttaaaacaacctctttttattctaatatgccgcaggggcggggggccaccctttattttgcgtttctcccccaacctggtagttgttcttccgagaaatcgcccggtcgagggcgcatggttcttatggggcggcggtgtgggacacaccccctggcggagcgtcgtcacacggaacatggtgtatagaagaagcccatgccatactttgtggctgaccgtcggtggaaagtgaataaccggcgggcgtgaatcttgaaagtctggtataaatcgggtcggcctcgggcaggagaacgacgacaannaaaaagagcagcaagcgtccagaggacgcaacgagggagggcgggaggggtgacgggggtgggtgg

SEQ ID NO: 361291 - DNA, 2386 bp, Homo sapiens
ggcagatctcacgagagaggatttggcgccctcctctgtggattctggccaggccgggttcggcggttgctgtgagagcgggcttcccaacaccatgccgtccgccttctctgtcagctctttccccgtcagcatcccagccgtgctcacggtacagcagggtcccggggagtccaggaggcggcggagtgcggcactgtctggagagttcactgtattgcagagaggttggagaaaatcaagtcttgcacgtggcgatggctcaagattccctgaggtcttcagtgctgactaaggagtctgaaatgatgattcatgttttacctttggggctgagccaagtgcatctctttgagcaatcgtcttaatttccttgtcgtcaccaattatcataaccaattatcatcgtaaaggatgcagacggactggactgagccctggctcatggggctggccaccttccacgcgctctgcgtgctcctcacctgcttgtcctcccgaagctacagactacagatcgggcactttctgtgtctagtcatcttagtctactgtgctgaatacatcaatgaggcggctgcgatgaactggagattattttcgaaataccagtatttcgactccagggggatgttcatttctatagtattttcagccccactgctggtgaatgccatgatcattgtggttatgtgggtatggaagactttgaatgtgatgactgacctgaagaatgcacaagagagaagaaaggaaaagaaaaggagaaggaaagaagactgaggggcagcagctgcttggagtttgcgtccttcccgtccacccagtgcagctcccagtgctgcagtgtgcgtggcgtgggcatccttccagctgactcatggtttgaaaaaccgttgttttatttaaatatccacagtggtagggcacacactgaagttggcttttcagccagcactgaatgtatccatcaggacatgcgtcttcaggtgcctgatctttgtagtcaggctgtgggaacggtctctgcagagcttcataactggaatttgattgaagaagtccatgtcatatgtgtaactagtactaattataaatataaaatacacaatataaaatatgaaactcaataataaacagtgccacctgtacatgggcaccatgccctcctcctcgtgctgtgttttctagtgcatgccacagttcgcagtagagggtgttttcaccttccaagacatggggcaaagtttggagacacctggttgtcactggagggggtggtgctcctggcttctcctgtggagcccggggtgatgcataaaatcctgtgtgcctgggtcagccgcatcacagacaatgacttgacatgaaatgtcagctgtgctggggcagagagaccttggaaggaagctcttggaaaatacgttgtatctcagtttgatgaaccaattcacaagaggctaggccctctctagcaaagttatgggctgctttactgaaaacagaatggaagccctgaagtcaacactccatggagaagcgtgtctttcctaatgtcctggtgttctgttgatttaggtgcttgggaacacaatgctcccagttctgttaggacaggcatactgttactttgcaatatccactttataaaatagctcctgcccagtggctcttggttcctgtcaaatgtggacctgtagtttaagaatgacaggtggttagagacccagatatttaaaaataggtgttcaataagggaatactgattgtgcattgtatctggatagcatgcctaattgtgcatttctgaaagttaccaattcaaaatgtaattggaacagttatctttgattagacaagcctgggaagagaatgttgaggtgcagagctcaccagccaagttcatgcccctctcgggcctttgtggctgagaagtgggacagaaagatgattaaggtaatgtgtcctccctgtagcattgtccagggccgttgtgtagatatttgacttcactgacagaaaagaaaccagggagtttgtagagactgtgcatttttagtataacattttcaccatctgatatggtttggctttgtgtccccacccaaattgcatctcaaattgtaatccccatgtgtcaagggagggacctgatgggaggtgatgggatcatgggggtggtttcccctatgttgttatcataatagagagggagttctcacaagatctgctggttttaaagacagcagtttcccctgctgtcactgtctctctcctgctgccttgtgaagaaggtgcttgtttctccctctgccatgattgtaagtttcccgaggcctccccggccatgtggaactgagtcaattaaacttcttgtttataaagt

SEQ ID NO: 361292 - DNA, 368 bp, Homo sapiens
tacccagcccctatctaagatggagttgctctggttcaaatgcccctgacacatccagtggcaagggaggctaggaaatgaaagagttttgtttatctgaatttaccacataaaattgtaaagatgaaaggaggttatgtatatgagggcttggcaaatgtttgttctttgggctgtggtcttacacaagttactaaatgtctaggaaatttcagtttccaatttgtaaaatggaactaataagagtactttcctctattggcatttgttacttttggaccttgagcagctgaattcccctgcctaagctggggaattccccaccgtattactctaggtaggaagcagagtcacttcgcagtaatggc

SEQ ID NO: 361293 - DNA, 1158 bp, Homo sapiens
ggtcacacagagagtacgtgtcaaaggaaactcaaaagaacacattttctcagtgattacaggttttagagaagaggaacaatgcttcctctgagcctgaagaaaagaatgaaataagggctgcaagggaacatgcaggtttcacactacaggagcttgtctgtcttggtgcaagtgggagcattccagttggcttttgagtggatacgtgcagtgagatcattgacactggaaacactagttcccattttaattacttaaaacaccacgatgaaaagaaatacctgtgatttgctttctcggagcaaaagtgcctctgaggaaacactacattccagtaatgaagaggaagaccctttccgcggaatggaaccctatcttgtccggagactttcatgtcgcaatattcagcttccccctctcgccttcagacagttggaacaagctgacttgaaaagtgaatcagagaacattcaacgaccaaccagcctccccctgaagattctgccgctgattgctatcacttctgcagaatccagtgggtgagtgccctcagatgtcatttccccattttatattttagatggtgattgttgtctgtggtcttttgagtttttgtggctcattgcttgatttgagtgggagaacaatggggtttctagagtcaaaaaaaaaaggatgaatttctcaggtgacatttctatatctgcaggagaagacattttagtgaaattgttttacatggaagagctgaaaatgtattggtgaatgctaataaacatttgccaaagggcagttgtacttggaaaattaatattggccatatgtgacttgatagaagacattttaacaaatgagaactaatggacaaattaccatgtagtgatacatgtctagaaacaataggaaatgttcactgatgcaaaatgaatttggaatcaagaataaattgtattgtaattagaatcaaaagaaatatgcaatggtattcatgagtctaaaaattttgcctttgacattttgaggtattgcttaccagaatactatttcagctcccagtataaggtgattttatttagcattagtacttatagaggagtcagccacagccacgtctccatcatgtaacatttttatttcctactttgcagggtataa

SEQ ID NO: 361294 - DNA, 988 bp, Homo sapiens
ggtcacacagagagtacgtgtcaaaggaaactcaaaagaacacattttctcagtgattacaggttttagagaagaggaacaatgcttcctctgagcctgaagaaaagaatgaaataagggctgcaagggaacatgcaggtttcacactacaggagcttgtctgtcttggtgcaagtgggagcattccagttggcttttgagtggatacgtgcagtgagatcattgacactggaaacactagttcccattttaattacttaaaacaccacgatgaaaagaaatacctgtgatttgctttctcggagcaaaagtgcctctgaggaaacactacattccagtaatgaagaggaagaccctttccgcggaatggaaccctatcttgtccggagactttcatgtcgcaatattcagcttccccctctcgccttcagacagttggaacaagctgacttgaaaagtgaatcagagaacattcaacgaccaaccagcctccccctgaagattctgccgctgattgctatcacttctgcagaatccagtgggagaagacattttagtgaaattgttttacatggaagagctgaaaatgtattggtgaatgctaataaacatttgccaaagggcagttgtacttggaaaattaatattggccatatgtgacttgatagaagacattttaacaaatgagaactaatggacaaattaccatgtagtgatacatgtctagaaacaataggaaatgttcactgatgcaaaatgaatttggaatcaagaataaattgtattgtaattagaatcaaaagaaatatgcaatggtattcatgagtctaaaaattttgcctttgacattttgaggtattgcttaccagaatactatttcagctcccagtataaggtgattttatttagcattagtacttatagaggagtcagccacagccacgtctccatcatgtaacatttttatttcctactttgcagggtataa

SEQ ID NO: 361295 - DNA, 377 bp, Homo sapiens
tggactgtgggaagcgtgggcaggtgtgtgggtactggtgaacctcagagactcagagaagggctgcagagggcggagtggggggcacagcagagcaggtcggggaacagtgcccagctgggggcttgggaacaggacgctgggagacagcagcatttggggtggctgtgggaaggggctgcttctggccagggatgagtttgaccaggtggctggaggctgagcccgggcataccattctcaaagtgagtggtgagtttgggggcccctcagacagcgagctggaaatggagagggtggagggtgcagcttgatgatgggctggccaggtgcccacgtggtcaggcgaggtgctaggggagcaggaggaccctcgc

SEQ ID NO: 361296 - DNA, 2586 bp, Homo sapiens
gcggtcagggatcatgagggagagtgcgttggagccggggcctgtgcccgaggcgccggcggggggtcccgtgcacgccgtgacggtggtgaccctgctggagaagctggcctccatgctggagactctgcgggagcggcagggaggcctggctcgaaggcagggaggcctggcagggtccgtgcgccgcatccagagcggcctgggcgctctgagtcgcagccacgacaccaccagcaacaccttggcgcagctgctggccaaggcggagcgcgtgagctcgcacgccaacgccgcccaagagcgcgcggtgcgccgcgcagcccaggtgcagcggctggaggccaaccacgggctgctggtggcgcgcgggaagctccacgttctgctcttcaaggaggagggtgaagtcccagccagcgctttccagaaggcaccagagcccttgggcccggcggaccagtccgagctgggcccagagcagctggaggccgaagttggagagagctcggacgaggagccggtggagtccagggcccagcggctgcggcgcaccggattgcagaaggatgcaattcgaagtcacagcgaatcagcctcaccttcagccctgtccagtagccccaacaatctgagcccaacaggctggtcacagccgaaaacccccgtgccagcacaaagagagcgggcaccagtatctgggacccaggagaaaaacaaaattaggcctcgtggacagagagattcaagctattattgggaaatagaagccagtgaagtgatgctgtccactcggattgggtcaggctcttttggaactgtttataagggtaaatggcacggagatgttgcagtaaagatcctaaaggttgtcgacccaaccccagagcaattccaggccttcaggaatgaggtggctgttctgcgcaaaacacggcatgtgaacattctgcttttcatggggtacatgacaaaggacaacctggcaattgtgacccagtggtgcgagggcagcagcctctacaaacacctgcatgtccaggagaccaagtttcagatgttccagctaattgacattgcccggcagacggctcagggaatggactatttgcatgcaaagaacatcatccatagagacatgaaatccaacaatatatttctccatgaaggcttaacagtgaaaattggagattttggtttggcaacagtaaagtcacgctggagtggttctcagcaggttgaacaacctactggctctgtcctctggatggccccagaggtgatccgaatgcaggataacaacccattcagtttccagtcggatgtctactcctatggcatcgtattgtatgaactgatgacgggggagcttccttattctcacatcaacaaccgagatcagatcatcttcatggtgggccgaggatatgcctccccagatcttagtaagctatataagaactgccccaaagcaatgaagaggctggtagctgactgtgtgaagaaagtaaaggaagagaggcctctttttccccagatcctgtcttccattgagctgctccaacactctctaccgaagatcaaccggagcgcttccgagccatccttgcatcgggcagcccacactgaggatatcaatgcttgcacgctgaccacgtccccgaggctgcctgtcttctagttgactttgcacctgtcttcaggctgccaggggaggaggagaagccagcaggcaccacttttctgctccctttctccagaggcagaacacatgttttcagagaagctgctgctaaggaccttctagactgctcacagggccttaacttcatgttgccttcttttctatccctttgggccctgggagaaggaagccatttgcagtgctggtgtgtcctgctccctccccacattccccatgctcaaggcccagccttctgtagatgcgcaagtggatgttgatggtagtacaaaaagcaggggcccagccccagctgttggctacatgagtatttagaggaagtaaggtagcaggcagtccagccctgatgtggagacacatgggattttggaaatcagcttctggaggaatgcatgtcacaggcgggactttcttcagagagtggtgcagcgccagacattttgcacataaggcaccaaacagcccaggactgccgagactctggccgcccgaaggagcctgctttggtactatggaacttttcttaggggacacgtcctcctttcacagcttctaaggtgtccagtgcattgggatggttttccaggcaaggcactcggccaatccgcatctcagccctctcagggagcagtcttccatcatgctgaattttgtcttccaggagctgcccctatggggcggggccgcagggccagccttgtttctctaacaaacaaacaaacaaacagccttgtttctctagtcacatcatgtgtatacaaggaagccaggaatacaggttttcttgatgatttgggttttaattttgtttttattgcacctgacaaaatacagttatctgatggtccctcaattatgttattttaataaaataaattaaattt

SEQ ID NO: 361297 - DNA, 341 bp, Homo sapiens
  misc_feature (7)..(7): n is a, c, g, or t
  misc_feature (26)..(26): n is a, c, g, or t
  misc_feature (82)..(82): n is a, c, g, or t
  misc_feature (112)..(112): n is a, c, g, or t
ccgcccngggagttaggtctgcaggnagtccccaggggagccacgagcttgtttcctgcacggagctgtcgcctcatggagngtctcagccccggtgctcctttgcccgcgncgcacccagtggtgcgagggcagcagcctctacaaacacctgcatgtccaggagaccaagtttcagatgttccagctaattgacattgcccggcagacggctcagggaatggactatttgcatgcaaagaacatcatccatagagacatgaaatccaacagtatcctttggttgttgagttcatttgactgctcggttctaaatttagggaaacagaagggaggctttc

SEQ ID NO: 361298 - DNA, 273 bp, Homo sapiens
gtaaaaggagccagtcctgggacaagaagaatcagacaacgctggtgtgaaataggagagaagcacagaggtttaagaattgtttaagctgcatcaatggagcacatacagggagcttggaagacgatcagcaatggttttggattcaaagatgccgtgtttgatggctccagctgcatctctcctacaatagttcagcagtttggctcgcagctgcgccgcactgcgagcgtttatttgcacgatacaacatgagacggtaccgagctgata

SEQ ID NO: 361299 - DNA, 5109 bp, Homo sapiens
ggtcgggaggacgagcaccgagtcgagggctcgctcgtctgggccgcccgagagtcttaatcgcgggcgcttgggccgccatcttagatggcgggagtaagaggaaaacgattgtgaggcgggaacggctttctgctgccttttttgggccccgaaaagggtcagctggccgggctttggggcgcgtgccctgaggcgcggagcgcgtttgctacgatgcgggggctgctcggggctccgtcccctgggctggggacgcgccgaatgtgaccgcctcccgctccctcacccgccgcggggaggaggagcgggcgagaagctgccgccgaacgacaggacgttggggcggcctggctccctcaggtttaagaattgtttaagctgcatcaatggagcacatacagggagcttggaagacgatcagcaatggttttggattcaaagatgccgtgtttgatggctccagctgcatctctcctacaatagttcagcagtttggctatcagcgccgggcatcagatgatggcaaactcacagatccttctaagacaagcaacactatccgtgttttcttgccgaacaagcaaagaacagtggtcaatgtgcgaaatggaatgagcttgcatgactgccttatgaaagcactcaaggtgaggggcctgcaaccagagtgctgtgcagtgttcagacttctccacgaacacaaaggtaaaaaagcacgcttagattggaatactgatgctgcgtctttgattggagaagaacttcaagtagatttcctggatcatgttcccctcacaacacacaactttgctcggaagacgttcctgaagcttgccttctgtgacatctgtcagaaattcctgctcaatggatttcgatgtcagacttgtggctacaaatttcatgagcactgtagcaccaaagtacctactatgtgtgtggactggagtaacatcagacaactcttattgtttccaaattccactattggtgatagtggagtcccagcactaccttctttgactatgcgtcgtatgcgagagtctgtttccaggatgcctgttagttctcagcacagatattctacacctcacgccttcacctttaacacctccagtccctcatctgaaggttccctctcccagaggcagaggtcgacatccacacctaatgtccacatggtcagcaccaccctgcctgtggacagcaggatgattgaggatgcaattcgaagtcacagcgaatcagcctcaccttcagccctgtccagtagccccaacaatctgagcccaacaggctggtcacagccgaaaacccccgtgccagcacaaagagagcgggcaccagtatctgggacccaggagaaaaacaaaattaggcctcgtggacagagagattcaagctattattgggaaatagaagccagtgaagtgatgctgtccactcggattgggtcaggctcttttggaactgtttataagggtaaatggcacggagatgttgcagtaaagatcctaaaggttgtcgacccaaccccagagcaattccaggccttcaggaatgaggtggctgttctgcgcaaaacacggcatgtgaacattctgcttttcatggggtacatgacaaaggacaacctggcaattgtgacccagtggtgcgagggcagcagcctctacaaacacctgcatgtccaggagaccaagtttcagatgttccagctaattgacattgcccggcagacggctcagggaatggactatttgcatgcaaagaacatcatccatagagacatgaaatccaacaatatatttctccatgaaggcttaacagtgcaggttgaacaacctactggctctgtcctctggatggtgagaatctgggctcccaccagcagtctctggtatagggcaaaaggaatgccttggagatttatgtgcaaacttaaagcgtttctgtacatttccccgaaatccacatgacccctagtgacagccagcctcagggcaattgtagattttcttgaggaagctgttgatcagaaccactgtgaagcttagtgtggagaggagttaataagctgggtgacagaaatgctgggtcttggtcctttaaagacaaggattcctgagctgttttaaccagtgcctgagttggagtcctttgggggaaaagctatgtggggactgaagaatggactcattcataactaatgaaagggacagcctggcccctagatgtctgtgaggcctgtcatatggtgataaatgcacttttgtcatatggtgatacatgtaggccccagaggtgatccgaatgcaggataacaacccattcagtttccagtcggatgtctactcctatggcatcgtattgtatgaactgatgacgggggagcttccttattctcacatcaacaaccgagatcagatcatcttcatggtgggccgaggatatgcctccccagatcttagtaagctatataagaactgccccaaagcaatgaagaggctggtagctgactgtgtgaagaaagtaaaggaagagaggcctctttttccccagatcctgtcttccattgagctgctccaacactctctaccgaagatcaaccggagcgcttccgagccatccttgcatcgggcagcccacactgaggatatcaatgcttgcacgctgaccacgtccccgaggctgcctgtcttctagttgactttgcacctgtcttcaggctgccaggggaggaggagaagccagcaggcaccacttttctgctccctttctccagaggcagaacacatgttttcagagaagctgctgctaaggaccttctagactgctcacagggccttaacttcatgttgccttcttttctatccctttgggccctgggagaaggaagccatttgcagtgctggtgtgtcctgctccctccccacattccccatgctcaaggcccagccttctgtagatgcgcaagtggatgttgatggtagtacaaaaagcaggggcccagccccagctgttggctacatgagtatttagaggaagtaaggtagcaggcagtccagccctgatgtggagacacatgggattttggaaatcagcttctggaggaatgcatgtcacaggcgggactttcttcagagagtggtgcagcgccagacattttgcacataaggcaccaaacagcccaggactgccgagactctggccgcccgaaggagcctgctttggtactatggaacttttcttaggggacacgtcctcctttcacagcttctaaggtgtccagtgcattgggatggttttccaggcaaggcactcggccaatccgcatctcagccctctcagggagcagtcttccatcatgctgaattttgtcttccaggagctgcccctatggggcggggccgcagggccagccttgtttctctaacaaacaaacaaacaaacagccttgtttctctagtcacatcatgtgtatacaaggaagccaggaatacaggttttcttgatgatttgggttttaattttgtttttattgcacctgacaaaatacagttatctgatggtccctcaattatgttattttaataaaataaattaaatttaggtgtaatggctggctgttacctccttttaaagtaattctgagctcacaacttgaatgccccatttgttcaccctcttcaggagcagaattcaagaacaggaaatgtgcccagagcctaggctgggaatgaatttgtaatttaacctttgtactctttgtaaacctctactgaagagttaagtataaaaattaattaagcagaaagtactctaaactcagctaataccttaagtaatacattttataaactatttatttatttggtaggtacagcttttttaaacacaaaaatagattagataaattccagcttggaacaagctagtgctggttcacaaggttatgctcacccttcaattaaaatcaaaatgactacaagacttgccatcagctctcttcaggaccactgctgggtcagaatcagaaaccttgggtgccatgaaatttttacaaaatttcaaatcaaagccaggctttgcagctagataatagatcacttgagtacgaaccacacatgtaagtgcacgtatatttgagttctcaatacaattaccctgatgggcaagaacccacaggtgagagcagaggcttggttcccctagagggccctggctggaggccccaacaccaaccagacgacaggagggccagactgctacccagtactgtacctcctgctccttcaagagcctccctaagggagaagaagatctatacttccactttgtttgctgcacatgtggcaacaagattgctaccctgatttgggacacttgagagaacttgaaaaaaatgaccacccttaaagccctagaaaaaagttgtatgtttgttaacagctatgctgcgctcactttgcattgtgtgttcttgaaagctctgtataaatcaaaattttgacgacacactaaatacactagagaaatacactatagaggaatccttttatagggctgaagactcctttggtaagaaaaatatgctgcattaggggcagctgcaagtttactatttctggggaagaaaagatcaaagataagagccaggtttgttttttaaagcaatcaatccaaacagtttgggtgtttgttagttgttacccctgaggggcttgaggtgtaactatatcagctataaaaatagcaattccatacatttaattaggttactttatatctttcactcttccccatggctgtaataatggagattgaatgagactaaggctaagcccaactccactcaaatccaagtcacacgtcaccttggctgcagtacagggaagctccgcacaccctggcttgggaaagtttcggccgatggagcccaagatgcagggcaaccatctactctttagggttctgatgattccactccagaaaggtgcatgaagaggtccccgagctctgtcatgtcgacatcttcattgttggggacatgccggctttctcggttctcgatgaaatcccagagccgcactgaattaaagaact

SEQ ID NO: 361300 - DNA, 4637 bp, Homo sapiens
ggtcgggaggacgagcaccgagtcgagggctcgctcgtctgggccgcccgagagtcttaatcgcgggcgcttgggccgccatcttagatggcgggagtaagaggaaaacgattgtgaggcgggaacggctttctgctgccttttttgggccccgaaaagggtcagctggccgggctttggggcgcgtgccctgaggcgcggagcgcgtttgctacgatgcgggggctgctcggggctccgtcccctgggctggggacgcgccgaatgtgaccgcctcccgctccctcacccgccgcggggaggaggagcgggcgagaagctgccgccgaacgacaggacgttggggcggcctggctccctcaggtttaagaattgtttaagctgcatcaatggagcacatacagggagcttggaagacgatcagcaatggttttggattcaaagatgccgtgtttgatggctccagctgcatctctcctacaatagttcagcagtttggctatcagcgccgggcatcagatgatggcaaactcacagatccttctaagacaagcaacactatccgtgttttcttgccgaacaagcaaagaacagtggtcaatgtgcgaaatggaatgagcttgcatgactgccttatgaaagcactcaaggtgaggggcctgcaaccagagtgctgtgcagtgttcagacttctccacgaacacaaaggtaaaaaagcacgcttagattggaatactgatgctgcgtctttgattggagaagaacttcaagtagatttcctggatcatgttcccctcacaacacacaactttgctcggaagacgttcctgaagcttgccttctgtgacatctgtcagaaattcctgctcaatggatttcgatgtcagacttgtggctacaaatttcatgagcactgtagcaccaaagtacctactatgtgtgtggactggagtaacatcagacaactcttttctcagcacagatattctacacctcacgccttcacctttaacacctccagtccctcatctgaaggttccctctcccagaggcagaggtcgacatccacacctaatgtccacatggtcagcaccaccctgcctgtggacagcaggatgattgaggatgcaattcgaagtcacagcgaatcagcctcaccttcagccctgtccagtagccccaacaatctgagcccaacaggctggtcacagccgaaaacccccgtgccagcacaaagagagcgggcaccagtatctgggacccaggagaaaaacaaaattaggcctcgtggacagagagattcaagctattattgggaaatagaagccagtgaagtgatgctgtccactcggattgggtcaggctcttttggaactgtttataagggtaaatggcacggagatgttgcagtaaagatcctaaaggttgtcgacccaaccccagagcaattccaggccttcaggaatgaggtggctgttctgcgcaaaacacggcatgtgaacattctgcttttcatggggtacatgacaaaggacaacctggcaattgtgacccagtggtgcgagggcagcagcctctacaaacacctgcatgtccaggagaccaagtttcagatgttccagctaattgacattgcccggcagacggctcagggaatggactatttgcatgcaaagaacatcatccatagagacatgaaatccaacaatatatttctccatgaaggcttaacagtgaaaattggagattttggtttggcaacagtaaagtcacgctggagtggttctcagcaggttgaacaacctactggctctgtcctctggatggccccagaggtgatccgaatgcaggataacaacccattcagtttccagtcggatgtctactcctatggcatcgtattgtatgaactgatgacgggggagcttccttattctcacatcaacaaccgagatcagatcatcttcatggtgggccgaggatatgcctccccagatcttagtaagctatataagaactgccccaaagcaatgaagaggctggtagctgactgtgtgaagaaagtaaaggaagagaggcctctttttccccagatcctgtcttccattgagctgctccaacactctctaccgaagatcaaccggagcgcttccgagccatccttgcatcgggcagcccacactgaggatatcaatgcttgcacgctgaccacgtccccgaggctgcctgtcttctagttgactttgcacctgtcttcaggctgccaggggaggaggagaagccagcaggcaccacttttctgctccctttctccagaggcagaacacatgttttcagagaagctgctgctaaggaccttctagactgctcacagggccttaacttcatgttgccttcttttctatccctttgggccctgggagaaggaagccatttgcagtgctggtgtgtcctgctccctccccacattccccatgctcaaggcccagccttctgtagatgcgcaagtggatgttgatggtagtacaaaaagcaggggcccagccccagctgttggctacatgagtatttagaggaagtaaggtagcaggcagtccagccctgatgtggagacacatgggattttggaaatcagcttctggaggaatgcatgtcacaggcgggactttcttcagagagtggtgcagcgccagacattttgcacataaggcaccaaacagcccaggactgccgagactctggccgcccgaaggagcctgctttggtactatggaacttttcttaggggacacgtcctcctttcacagcttctaaggtgtccagtgcattgggatggttttccaggcaaggcactcggccaatccgcatctcagccctctcagggagcagtcttccatcatgctgaattttgtcttccaggagctgcccctatggggcggggccgcagggccagccttgtttctctaacaaacaaacaaacaaacagccttgtttctctagtcacatcatgtgtatacaaggaagccaggaatacaggttttcttgatgatttgggttttaattttgtttttattgcacctgacaaaatacagttatctgatggtccctcaattatgttattttaataaaataaattaaatttaggtgtaatggctggctgttacctccttttaaagtaattctgagctcacaacttgaatgccccatttgttcaccctcttcaggagcagaattcaagaacaggaaatgtgcccagagcctaggctgggaatgaatttgtaatttaacctttgtactctttgtaaacctctactgaagagttaagtataaaaattaattaagcagaaagtactctaaactcagctaataccttaagtaatacattttataaactatttatttatttggtaggtacagcttttttaaacacaaaaatagattagataaattccagcttggaacaagctagtgctggttcacaaggttatgctcacccttcaattaaaatcaaaatgactacaagacttgccatcagctctcttcaggaccactgctgggtcagaatcagaaaccttgggtgccatgaaatttttacaaaatttcaaatcaaagccaggctttgcagctagataatagatcacttgagtacgaaccacacatgtaagtgcacgtatatttgagttctcaatacaattaccctgatgggcaagaacccacaggtgagagcagaggcttggttcccctagagggccctggctggaggccccaacaccaaccagacgacaggagggccagactgctacccagtactgtacctcctgctccttcaagagcctccctaagggagaagaagatctatacttccactttgtttgctgcacatgtggcaacaagattgctaccctgatttgggacacttgagagaacttgaaaaaaatgaccacccttaaagccctagaaaaaagttgtatgtttgttaacagctatgctgcgctcactttgcattgtgtgttcttgaaagctctgtataaatcaaaattttgacgacacactaaatacactagagaaatacactatagaggaatccttttatagggctgaagactcctttggtaagaaaaatatgctgcattaggggcagctgcaagtttactatttctggggaagaaaagatcaaagataagagccaggtttgttttttaaagcaatcaatccaaacagtttgggtgtttgttagttgttacccctgaggggcttgaggtgtaactatatcagctataaaaatagcaattccatacatttaattaggttactttatatctttcactcttccccatggctgtaataatggagattgaatgagactaaggctaagcccaactccactcaaatccaagtcacacgtcaccttggctgcagtacagggaagctccgcacaccctggcttgggaaagtttcggccgatggagcccaagatgcagggcaaccatctactctttagggttctgatgattccactccagaaaggtgcatgaagaggtccccgagctctgtcatgtcgacatcttcattgttggggacatgccggctttctcggttctcgatgaaatcccagagccgcactgaattaaagaact

SEQ ID NO: 361301 - DNA, 3241 bp, Homo sapiens
ggtcgggaggacgagcaccgagtcgagggctcgctcgtctgggccgcccgagagtcttaatcgcgggcgcttgggccgccatcttagatggcgggagtaagaggaaaacgattgtgaggcgggaacggctttctgctgccttttttgggccccgaaaagggtcagctggccgggctttggggcgcgtgccctgaggcgcggagcgcgtttgctacgatgcgggggctgctcggggctccgtcccctgggctggggacgcgccgaatgtgaccgcctcccgctccctcacccgccgcggggaggaggagcgggcgagaagctgccgccgaacgacaggacgttggggcggcctggctccctcaggtttaagaattgtttaagctgcatcaatggagcacatacagggagcttggaagacgatcagcaatggttttggattcaaagatgccgtgtttgatggctccagctgcatctctcctacaatagttcagcagtttggctatcagcgccgggcatcagatgatggcaaactcacagatccttctaagacaagcaacactatccgtgttttcttgccgaacaagcaaagaacagtggtcaatgtgcgaaatggaatgagcttgcatgactgccttatgaaagcactcaaggtgaggggcctgcaaccagagtgctgtgcagtgttcagacttctccacgaacacaaaggtaaaaaagcacgcttagattggaatactgatgctgcgtctttgattggagaagaacttcaagtagatttcctggatcatgttcccctcacaacacacaactttgctcggaagacgttcctgaagcttgccttctgtgacatctgtcagaaattcctgctcaatggatttcgatgtcagacttgtggctacaaatttcatgagcactgtagcaccaaagtacctactatgtgtgtggactggagtaacatcagacaactcttattgtttccaaattccactattggtgatagtggagtcccagcactaccttctttgactatgcgtcgtatgcgagagtctgtttccaggatgcctgttagttctcagcacagatattctacacctcacgccttcacctttaacacctccagtccctcatctgaaggttccctctcccagaggcagaggtcgacatccacacctaatgtccacatggtcagcaccaccctgcctgtggacagcaggatgattgaggatgcaattcgaagtcacagcgaatcagcctcaccttcagccctgtccagtagccccaacaatctgagcccaacaggctggtcacagccgaaaacccccgtgccagcacaaagagagcgggcaccagtatctgggacccaggagaaaaacaaaattaggcctcgtggacagagagattcaagctattattgggaaatagaagccagtgaagtgatgctgtccactcggattgggtcaggctcttttggaactgtttataagggtaaatggcacggagatgttgcagtaaagatcctaaaggttgtcgacccaaccccagagcaattccaggccttcaggaatgaggtggctgttctgcgcaaaacacggcatgtgaacattctgcttttcatggggtacatgacaaaggacaacctggcaattgtgacccagtggtgcgagggcagcagcctctacaaacacctgcatgtccaggagaccaagtttcagatgttccagctaattgacattgcccggcagacggctcagggaatggactatttgcatgcaaagaacatcatccatagagacatgaaatccaacaatatatttctccatgaaggcttaacagtgaaaattggagattttggtttggcaacagtaaagtcacgctggagtggttctcagcaggttgaacaacctactggctctgtcctctggatggccccagaggtgatccgaatgcaggataacaacccattcagtttccagtcggatgtctactcctatggcatcgtattgtatgaactgatgacgggggagcttccttattctcacatcaacaaccgagatcagatcatcttcatggtgggccgaggatatgcctccccagatcttagtaagctatataagaactgccccaaagcaatgaagaggctggtagctgactgtgtgaagaaagtaaaggaagagaggcctctttttccccagatcctgtcttccattgagctgctccaacactctctaccgaagatcaaccggagcgcttccgagccatccttgcatcgggcagcccacactgaggatatcaatgcttgcacgctgaccacgtccccgaggctgcctgtcttctagttgactttgcacctgtcttcaggctgccaggggaggaggagaagccagcaggcaccacttttctgctccctttctccagaggcagaacacatgttttcagagaagctgctgctaaggaccttctagactgctcacagggccttaacttcatgttgccttcttttctatccctttgggccctgggagaaggaagccatttgcagtgctggtgtgtcctgctccctccccacattccccatgctcaaggcccagccttctgtagatgcgcaagtggatgttgatggtagtacaaaaagcaggggcccagccccagctgttggctacatgagtatttagaggaagtaaggtagcaggcagtccagccctgatgtggagacacatgggattttggaaatcagcttctggaggaatgcatgtcacaggcgggactttcttcagagagtggtgcagcgccagacattttgcacataaggcaccaaacagcccaggactgccgagactctggccgcccgaaggagcctgctttggtactatggaacttttcttaggggacacgtcctcctttcacagcttctaaggtgtccagtgcattgggatggttttccaggcaaggcactcggccaatccgcatctcagccctctcagggagcagtcttccatcatgctgaattttgtcttccaggagctgcccctatggggcggggccgcagggccagccttgtttctctaacaaacaaacaaacaaacagccttgtttctctagtcacatcatgtgtatacaaggaagccaggaatacaggttttcttgatgatttgggttttaattttgtttttattgcacctgacaaaatacagttatctgatggtccctcaattatgttattttaataaaataaattaaattt

SEQ ID NO: 361302 - DNA, 4627 bp, Homo sapiens
ggggatatctttttaaggaaagaggcagaggacaggaaaacagaaaagtcagaaaattagtaggcttggcctgtccctcagcagcttatgcctcacctggactgatgagagcgatgtttaggttaggttcctttctgagtttatctcagcaaaagtgatttggagagatttccgtaagcttgaaataggcataattttatcacactattagtaaatgtaacctgacggggattgggcttttgtcttaagtttatttctagtttgtggccagcgtgtgtatgtctatctgcttgttatgtggatagcaagtagctacaagccaaatgttgaaaggtttccaaaatcactaattaaaatagtctttcttgactgggcgtgatggctcacacctataatcccagcactttgggaggctgaggcaggtggatcacttgaggctaggagtttgagacttgcctggccaatgtggtgaaaccccatctctaaatttaaaaattagctgagtgtggtggcacgtacctataatcccagctactcaggaggctgaggcacgagaattgcttgaacctgggaggcagaggttgcagtgagctgagatcacgccactgcactccagccttggggacagagcaaggctgtgtctcaaaaaaataaataaataaaatggtctttctcaaaggtacataagtgggttcttcagaagtcactattagaagaggagaggggttgtttttatagaagagtaaatgaagaaaggtatttttaatgctgtgaggcgtgaaatttaacaattttgaatctgccaccctccacgagcctttccttgtgaaagaaagatggcattacaacccacgttttgcctcttgagcagtgagaggcatgatagttgtgttggattatgggacatggcctattttaggtacatgtctgaggtgtggaacacctttcagtggtggggtttttagcagccaaacattataccatgaaagcagacaccacagatttaaggaggtgtgaattcctgggcaccaacatcacaagttactttgtgtgtgtttgttttttaattttttgttcttttttaatttttttttcctcacaagtttgacttaaactgtatgacttctttacccagaagcgagccgacttcagttctcattttgaagtcactgagtggtaccgattctagtgaggaatttcttactacaacattgaacactcagtaagggatttgctattttgttaaccactcaagtttcagatggtgatttgagggcagaatacaggcagaaacgactgtaagctgtcaggccatccttggccctctggggagcactggagtgtggcctctgctcatcctgttagggtttcaagtacctgtattatgtggaaaggtcacaaggccagagacccagcacctagatgtgcaaatggggagaagaagcagggaagaaacgctggcttgcttttggctagggccaaataatctggcacattgaccaatccctgcctgtcttctggaagaaggtgcatttcaaaagcactttaaagaacttcagaaaccttaggaagttcagtgcagagaggctgtgacagaggtaaggtggagagattaccgtgttataaagaactttgggatatttttcaaaattaacctgaccattcttttgaaaccagagtccttaacaagcattgagatatatttctccatgaaggcttaacagtgaaaattggagattttggtttggcaacagtaaagtcacgctggagtggttctcagcaggttgaacaacctactggctctgtcctctggatggccccagaggtgatccgaatgcaggataacaacccattcagtttccagtcggatgtctactcctatggcatcgtattgtatgaactgatgacgggggagcttccttattctcacatcaacaaccgagatcagatcatcttcatggtgggccgaggatatgcctccccagatcttagtaagctatataagaactgccccaaagcaatgaagaggctggtagctgactgtgtgaagaaagtaaaggaagagaggcctctttttccccagatcctgtcttccattgagctgctccaacactctctaccgaagatcaaccggagcgcttccgagccatccttgcatcgggcagcccacactgaggatatcaatgcttgcacgctgaccacgtccccgaggctgcctgtcttctagttgactttgcacctgtcttcaggctgccaggggaggaggagaagccagcaggcaccacttttctgctccctttctccagaggcagaacacatgttttcagagaagctgctgctaaggaccttctagactgctcacagggccttaacttcatgttgccttcttttctatccctttgggccctgggagaaggaagccatttgcagtgctggtgtgtcctgctccctccccacattccccatgctcaaggcccagccttctgtagatgcgcaagtggatgttgatggtagtacaaaaagcaggggcccagccccagctgttggctacatgagtatttagaggaagtaaggtagcaggcagtccagccctgatgtggagacacatgggattttggaaatcagcttctggaggaatgcatgtcacaggcgggactttcttcagagagtggtgcagcgccagacattttgcacataaggcaccaaacagcccaggactgccgagactctggccgcccgaaggagcctgctttggtactatggaacttttcttaggggacacgtcctcctttcacagcttctaaggtgtccagtgcattgggatggttttccaggcaaggcactcggccaatccgcatctcagccctctcagggagcagtcttccatcatgctgaattttgtcttccaggagctgcccctatggggcggggccgcagggccagccttgtttctctaacaaacaaacaaacaaacagccttgtttctctagtcacatcatgtgtatacaaggaagccaggaatacaggttttcttgatgatttgggttttaattttgtttttattgcacctgacaaaatacagttatctgatggtccctcaattatgttattttaataaaataaattaaatttaggtgtaatggctggctgttacctccttttaaagtaattctgagctcacaacttgaatgccccatttgttcaccctcttcaggagcagaattcaagaacaggaaatgtgcccagagcctaggctgggaatgaatttgtaatttaacctttgtactctttgtaaacctctactgaagagttaagtataaaaattaattaagcagaaagtactctaaactcagctaataccttaagtaatacattttataaactatttatttatttggtaggtacagcttttttaaacacaaaaatagattagataaattccagcttggaacaagctagtgctggttcacaaggttatgctcacccttcaattaaaatcaaaatgactacaagacttgccatcagctctcttcaggaccactgctgggtcagaatcagaaaccttgggtgccatgaaatttttacaaaatttcaaatcaaagccaggctttgcagctagataatagatcacttgagtacgaaccacacatgtaagtgcacgtatatttgagttctcaatacaattaccctgatgggcaagaacccacaggtgagagcagaggcttggttcccctagagggccctggctggaggccccaacaccaaccagacgacaggagggccagactgctacccagtactgtacctcctgctccttcaagagcctccctaagggagaagaagatctatacttccactttgtttgctgcacatgtggcaacaagattgctaccctgatttgggacacttgagagaacttgaaaaaaatgaccacccttaaagccctagaaaaaagttgtatgtttgttaacagctatgctgcgctcactttgcattgtgtgttcttgaaagctctgtataaatcaaaattttgacgacacactaaatacactagagaaatacactatagaggaatccttttatagggctgaagactcctttggtaagaaaaatatgctgcattaggggcagctgcaagtttactatttctggggaagaaaagatcaaagataagagccaggtttgttttttaaagcaatcaatccaaacagtttgggtgtttgttagttgttacccctgaggggcttgaggtgtaactatatcagctataaaaatagcaattccatacatttaattaggttactttatatctttcactcttccccatggctgtaataatggagattgaatgagactaaggctaagcccaactccactcaaatccaagtcacacgtcaccttggctgcagtacagggaagctccgcacaccctggcttgggaaagtttcggccgatggagcccaagatgcagggcaaccatctactctttagggttctgatgattccactccagaaaggtgcatgaagaggtccccgagctctgtcatgtcgacatcttcattgttggggacatgccggctttctcggttctcgatgaaatcccagagccgcactgaattaaagaact

SEQ ID NO: 361303 - DNA, 5054 bp, Homo sapiens
ggggatatctttttaaggaaagaggcagaggacaggaaaacagaaaagtcagaaaattagtaggcttggcctgtccctcagcagcttatgcctcacctggactgatgagagcgatgtttaggttaggttcctttctgagtttatctcagcaaaagtgatttggagagatttccgtaagcttgaaataggcataattttatcacactattagtaaatgtaacctgacggggattgggcttttgtcttaagtttatttctagtttgtggccagcgtgtgtatgtctatctgcttgttatgtggatagcaagtagctacaagccaaatgttgaaaggtttccaaaatcactaattaaaatagtctttcttgactgggcgtgatggctcacacctataatcccagcactttgggaggctgaggcaggtggatcacttgaggctaggagtttgagacttgcctggccaatgtggtgaaaccccatctctaaatttaaaaattagctgagtgtggtggcacgtacctataatcccagctactcaggaggctgaggcacgagaattgcttgaacctgggaggcagaggttgcagtgagctgagatcacgccactgcactccagccttggggacagagcaaggctgtgtctcaaaaaaataaataaataaaatggtctttctcaaaggtacataagtgggttcttcagaagtcactattagaagaggagaggggttgtttttatagaagagtaaatgaagaaaggtatttttaatgctgtgaggcgtgaaatttaacaattttgaatctgccaccctccacgagcctttccttgtgaaagaaagatggcattacaacccacgttttgcctcttgagcagtgagaggcatgatagttgtgttggattatgggacatggcctattttaggtacatgtctgaggtgtggaacacctttcagtggtggggtttttagcagccaaacattataccatgaaagcagacaccacagatttaaggaggtgtgaattcctgggcaccaacatcacaagttactttgtgtgtgtttgttttttaattttttgttcttttttaatttttttttcctcacaagtttgacttaaactgtatgacttctttacccagaagcgagccgacttcagttctcattttgaagtcactgagtggtaccgattctagtgaggaatttcttactacaacattgaacactcagtaagggatttgctattttgttaaccactcaagtttcagatggtgatttgagggcagaatacaggcagaaacgactgtaagctgtcaggccatccttggccctctggggagcactggagtgtggcctctgctcatcctgttagggtttcaagtacctgtattatgtggaaaggtcacaaggccagagacccagcacctagatgtgcaaatggggagaagaagcagggaagaaacgctggcttgcttttggctagggccaaataatctggcacattgaccaatccctgcctgtcttctggaagaaggtgcatttcaaaagcactttaaagaacttcagaaaccttaggaagttcagtgcagagaggctgtgacagaggtaaggtggagagattaccgtgttataaagaactttgggatatttttcaaaattaacctgaccattcttttgaaaccagagtccttaacaagcattgagatatatttctccatgaaggcttaacagtgaaaattggagattttggtttggcaacagtaaagtcacgctggagtggttctcagcaggttgaacaacctactggctctgtcctctggatggtgagaatctgggctcccaccagcagtctctggtatagggcaaaaggaatgccttggagatttatgtgcaaacttaaagcgtttctgtacatttccccgaaatccacatgacccctagtgacagccagcctcagggcaattgtagattttcttgaggaagctgttgatcagaaccactgtgaagcttagtgtggagaggagttaataagctgggtgacagaaatgctgggtcttggtcctttaaagacaaggattcctgagctgttttaaccagtgcctgagttggagtcctttgggggaaaagctatgtggggactgaagaatggactcattcataactaatgaaagggacagcctggcccctagatgtctgtgaggcctgtcatatggtgataaatgcacttttgtcatatggtgatacatgtaggccccagaggtgatccgaatgcaggataacaacccattcagtttccagtcggatgtctactcctatggcatcgtattgtatgaactgatgacgggggagcttccttattctcacatcaacaaccgagatcagatcatcttcatggtgggccgaggatatgcctccccagatcttagtaagctatataagaactgccccaaagcaatgaagaggctggtagctgactgtgtgaagaaagtaaaggaagagaggcctctttttccccagatcctgtcttccattgagctgctccaacactctctaccgaagatcaaccggagcgcttccgagccatccttgcatcgggcagcccacactgaggatatcaatgcttgcacgctgaccacgtccccgaggctgcctgtcttctagttgactttgcacctgtcttcaggctgccaggggaggaggagaagccagcaggcaccacttttctgctccctttctccagaggcagaacacatgttttcagagaagctgctgctaaggaccttctagactgctcacagggccttaacttcatgttgccttcttttctatccctttgggccctgggagaaggaagccatttgcagtgctggtgtgtcctgctccctccccacattccccatgctcaaggcccagccttctgtagatgcgcaagtggatgttgatggtagtacaaaaagcaggggcccagccccagctgttggctacatgagtatttagaggaagtaaggtagcaggcagtccagccctgatgtggagacacatgggattttggaaatcagcttctggaggaatgcatgtcacaggcgggactttcttcagagagtggtgcagcgccagacattttgcacataaggcaccaaacagcccaggactgccgagactctggccgcccgaaggagcctgctttggtactatggaacttttcttaggggacacgtcctcctttcacagcttctaaggtgtccagtgcattgggatggttttccaggcaaggcactcggccaatccgcatctcagccctctcagggagcagtcttccatcatgctgaattttgtcttccaggagctgcccctatggggcggggccgcagggccagccttgtttctctaacaaacaaacaaacaaacagccttgtttctctagtcacatcatgtgtatacaaggaagccaggaatacaggttttcttgatgatttgggttttaattttgtttttattgcacctgacaaaatacagttatctgatggtccctcaattatgttattttaataaaataaattaaatttaggtgtaatggctggctgttacctccttttaaagtaattctgagctcacaacttgaatgccccatttgttcaccctcttcaggagcagaattcaagaacaggaaatgtgcccagagcctaggctgggaatgaatttgtaatttaacctttgtactctttgtaaacctctactgaagagttaagtataaaaattaattaagcagaaagtactctaaactcagctaataccttaagtaatacattttataaactatttatttatttggtaggtacagcttttttaaacacaaaaatagattagataaattccagcttggaacaagctagtgctggttcacaaggttatgctcacccttcaattaaaatcaaaatgactacaagacttgccatcagctctcttcaggaccactgctgggtcagaatcagaaaccttgggtgccatgaaatttttacaaaatttcaaatcaaagccaggctttgcagctagataatagatcacttgagtacgaaccacacatgtaagtgcacgtatatttgagttctcaatacaattaccctgatgggcaagaacccacaggtgagagcagaggcttggttcccctagagggccctggctggaggccccaacaccaaccagacgacaggagggccagactgctacccagtactgtacctcctgctccttcaagagcctccctaagggagaagaagatctatacttccactttgtttgctgcacatgtggcaacaagattgctaccctgatttgggacacttgagagaacttgaaaaaaatgaccacccttaaagccctagaaaaaagttgtatgtttgttaacagctatgctgcgctcactttgcattgtgtgttcttgaaagctctgtataaatcaaaattttgacgacacactaaatacactagagaaatacactatagaggaatccttttatagggctgaagactcctttggtaagaaaaatatgctgcattaggggcagctgcaagtttactatttctggggaagaaaagatcaaagataagagccaggtttgttttttaaagcaatcaatccaaacagtttgggtgtttgttagttgttacccctgaggggcttgaggtgtaactatatcagctataaaaatagcaattccatacatttaattaggttactttatatctttcactcttccccatggctgtaataatggagattgaatgagactaaggctaagcccaactccactcaaatccaagtcacacgtcaccttggctgcagtacagggaagctccgcacaccctggcttgggaaagtttcggccgatggagcccaagatgcagggcaaccatctactctttagggttctgatgattccactccagaaaggtgcatgaagaggtccccgagctctgtcatgtcgacatcttcattgttggggacatgccggctttctcggttctcgatgaaatcccagagccgcactgaattaaagaact

SEQ ID NO: 361304 - DNA, 3202 bp, Homo sapiens
gatggagaggatacctgatgtaagaattgagggtgtcagagacatacaggtctagagagttagaagaagtcggtgtatatcattcgggagtacctatttgccatgaggggatgaaatactgaagctgttgatcagaaccactgtgaagcttagtgtggagaggagttaataagctgggtgacagaaatgctgggtcttggtcctttaaagacaaggattcctgagctgttttaaccagtgcctgagttggagtcctttgggggaaaagctatgtggggactgaagaatggactcattcataactaatgaaagggacagcctggcccctagatgtctgtgaggcctgtcatatggtgataaatgcacttttgtcatatggtgatacatgtaggccccagaggtgatccgaatgcaggataacaacccattcagtttccagtcggatgtctactcctatggcatcgtattgtatgaactgatgacgggggagcttccttattctcacatcaacaaccgagatcagatcatcttcatggtgggccgaggatatgcctccccagatcttagtaagctatataagaactgccccaaagcaatgaagaggctggtagctgactgtgtgaagaaagtaaaggaagagaggcctctttttccccagatcctgtcttccattgagctgctccaacactctctaccgaagatcaaccggagcgcttccgagccatccttgcatcgggcagcccacactgaggatatcaatgcttgcacgctgaccacgtccccgaggctgcctgtcttctagttgactttgcacctgtcttcaggctgccaggggaggaggagaagccagcaggcaccacttttctgctccctttctccagaggcagaacacatgttttcagagaagctgctgctaaggaccttctagactgctcacagggccttaacttcatgttgccttcttttctatccctttgggccctgggagaaggaagccatttgcagtgctggtgtgtcctgctccctccccacattccccatgctcaaggcccagccttctgtagatgcgcaagtggatgttgatggtagtacaaaaagcaggggcccagccccagctgttggctacatgagtatttagaggaagtaaggtagcaggcagtccagccctgatgtggagacacatgggattttggaaatcagcttctggaggaatgcatgtcacaggcgggactttcttcagagagtggtgcagcgccagacattttgcacataaggcaccaaacagcccaggactgccgagactctggccgcccgaaggagcctgctttggtactatggaacttttcttaggggacacgtcctcctttcacagcttctaaggtgtccagtgcattgggatggttttccaggcaaggcactcggccaatccgcatctcagccctctcagggagcagtcttccatcatgctgaattttgtcttccaggagctgcccctatggggcggggccgcagggccagccttgtttctctaacaaacaaacaaacaaacagccttgtttctctagtcacatcatgtgtatacaaggaagccaggaatacaggttttcttgatgatttgggttttaattttgtttttattgcacctgacaaaatacagttatctgatggtccctcaattatgttattttaataaaataaattaaatttaggtgtaatggctggctgttacctccttttaaagtaattctgagctcacaacttgaatgccccatttgttcaccctcttcaggagcagaattcaagaacaggaaatgtgcccagagcctaggctgggaatgaatttgtaatttaacctttgtactctttgtaaacctctactgaagagttaagtataaaaattaattaagcagaaagtactctaaactcagctaataccttaagtaatacattttataaactatttatttatttggtaggtacagcttttttaaacacaaaaatagattagataaattccagcttggaacaagctagtgctggttcacaaggttatgctcacccttcaattaaaatcaaaatgactacaagacttgccatcagctctcttcaggaccactgctgggtcagaatcagaaaccttgggtgccatgaaatttttacaaaatttcaaatcaaagccaggctttgcagctagataatagatcacttgagtacgaaccacacatgtaagtgcacgtatatttgagttctcaatacaattaccctgatgggcaagaacccacaggtgagagcagaggcttggttcccctagagggccctggctggaggccccaacaccaaccagacgacaggagggccagactgctacccagtactgtacctcctgctccttcaagagcctccctaagggagaagaagatctatacttccactttgtttgctgcacatgtggcaacaagattgctaccctgatttgggacacttgagagaacttgaaaaaaatgaccacccttaaagccctagaaaaaagttgtatgtttgttaacagctatgctgcgctcactttgcattgtgtgttcttgaaagctctgtataaatcaaaattttgacgacacactaaatacactagagaaatacactatagaggaatccttttatagggctgaagactcctttggtaagaaaaatatgctgcattaggggcagctgcaagtttactatttctggggaagaaaagatcaaagataagagccaggtttgttttttaaagcaatcaatccaaacagtttgggtgtttgttagttgttacccctgaggggcttgaggtgtaactatatcagctataaaaatagcaattccatacatttaattaggttactttatatctttcactcttccccatggctgtaataatggagattgaatgagactaaggctaagcccaactccactcaaatccaagtcacacgtcaccttggctgcagtacagggaagctccgcacaccctggcttgggaaagtttcggccgatggagcccaagatgcagggcaaccatctactctttagggttctgatgattccactccagaaaggtgcatgaagaggtccccgagctctgtcatgtcgacatcttcattgttggggacatgccggctttctcggttctcgatgaaatcccagagccgcactgaattaaagaact

SEQ ID NO: 361305 - DNA, 2716 bp, Homo sapiens
tagaatgtgattaaagcatgggttggttcgtaaagatggcaatataaggtgggagtgttttgttttgttttatagggaggggacccaggtcctctacaagatggtggggggcagggtacatcctgtgtctttgagacacagctaatgagagcattcttgggctttgtttcagatcctgtcttccattgagctgctccaacactctctaccgaagatcaaccggagcgcttccgagccatccttgcatcgggcagcccacactgaggatatcaatgcttgcacgctgaccacgtccccgaggctgcctgtcttctagttgactttgcacctgtcttcaggctgccaggggaggaggagaagccagcaggcaccacttttctgctccctttctccagaggcagaacacatgttttcagagaagctgctgctaaggaccttctagactgctcacagggccttaacttcatgttgccttcttttctatccctttgggccctgggagaaggaagccatttgcagtgctggtgtgtcctgctccctccccacattccccatgctcaaggcccagccttctgtagatgcgcaagtggatgttgatggtagtacaaaaagcaggggcccagccccagctgttggctacatgagtatttagaggaagtaaggtagcaggcagtccagccctgatgtggagacacatgggattttggaaatcagcttctggaggaatgcatgtcacaggcgggactttcttcagagagtggtgcagcgccagacattttgcacataaggcaccaaacagcccaggactgccgagactctggccgcccgaaggagcctgctttggtactatggaacttttcttaggggacacgtcctcctttcacagcttctaaggtgtccagtgcattgggatggttttccaggcaaggcactcggccaatccgcatctcagccctctcagggagcagtcttccatcatgctgaattttgtcttccaggagctgcccctatggggcggggccgcagggccagccttgtttctctaacaaacaaacaaacaaacagccttgtttctctagtcacatcatgtgtatacaaggaagccaggaatacaggttttcttgatgatttgggttttaattttgtttttattgcacctgacaaaatacagttatctgatggtccctcaattatgttattttaataaaataaattaaatttaggtgtaatggctggctgttacctccttttaaagtaattctgagctcacaacttgaatgccccatttgttcaccctcttcaggagcagaattcaagaacaggaaatgtgcccagagcctaggctgggaatgaatttgtaatttaacctttgtactctttgtaaacctctactgaagagttaagtataaaaattaattaagcagaaagtactctaaactcagctaataccttaagtaatacattttataaactatttatttatttggtaggtacagcttttttaaacacaaaaatagattagataaattccagcttggaacaagctagtgctggttcacaaggttatgctcacccttcaattaaaatcaaaatgactacaagacttgccatcagctctcttcaggaccactgctgggtcagaatcagaaaccttgggtgccatgaaatttttacaaaatttcaaatcaaagccaggctttgcagctagataatagatcacttgagtacgaaccacacatgtaagtgcacgtatatttgagttctcaatacaattaccctgatgggcaagaacccacaggtgagagcagaggcttggttcccctagagggccctggctggaggccccaacaccaaccagacgacaggagggccagactgctacccagtactgtacctcctgctccttcaagagcctccctaagggagaagaagatctatacttccactttgtttgctgcacatgtggcaacaagattgctaccctgatttgggacacttgagagaacttgaaaaaaatgaccacccttaaagccctagaaaaaagttgtatgtttgttaacagctatgctgcgctcactttgcattgtgtgttcttgaaagctctgtataaatcaaaattttgacgacacactaaatacactagagaaatacactatagaggaatccttttatagggctgaagactcctttggtaagaaaaatatgctgcattaggggcagctgcaagtttactatttctggggaagaaaagatcaaagataagagccaggtttgttttttaaagcaatcaatccaaacagtttgggtgtttgttagttgttacccctgaggggcttgaggtgtaactatatcagctataaaaatagcaattccatacatttaattaggttactttatatctttcactcttccccatggctgtaataatggagattgaatgagactaaggctaagcccaactccactcaaatccaagtcacacgtcaccttggctgcagtacagggaagctccgcacaccctggcttgggaaagtttcggccgatggagcccaagatgcagggcaaccatctactctttagggttctgatgattccactccagaaaggtgcatgaagaggtccccgagctctgtcatgtcgacatcttcattgttggggacatgccggctttctcggttctcgatgaaatcccagagccgcactgaattaaagaact

SEQ ID NO: 361306 - DNA, 4830 bp, Homo sapiens
ggtcgggaggacgagcaccgagtcgagggctcgctcgtctgggccgcccgagagtcttaatcgcgggcgcttgggccgccatcttagatggcgggagtaagaggaaaacgattgtgaggcgggaacggctttctgctgccttttttgggccccgaaaagggtcagctggccgggctttggggcgcgtgccctgaggcgcggagcgcgtttgctacgatgcgggggctgctcggggctccgtcccctgggctggggacgcgccgaatgtgaccgcctcccgctccctcacccgccgcggggaggaggagcgggcgagaagctgccgccgaacgacaggacgttggggcggcctggctccctcaggtttaagaattgtttaagctgcatcaatggagcacatacagggagcttggaagacgatcagcaatggttttggattcaaagatgccgtgtttgatggctccagctgcatctctcctacaatagttcagcagtttggctatcagcgccgggcatcagatgatggcaaactcacagatccttctaagacaagcaacactatccgtgttttcttgccgaacaagcaaagaacagtggtcaatgtgcgaaatggaatgagcttgcatgactgccttatgaaagcactcaaggtgaggggcctgcaaccagagtgctgtgcagtgttcagacttctccacgaacacaaaggtaaaaaagcacgcttagattggaatactgatgctgcgtctttgattggagaagaacttcaagtagatttcctggatcatgttcccctcacaacacacaactttgctcggaagacgttcctgaagcttgccttctgtgacatctgtcagaaattcctgctcaatggatttcgatgtcagacttgtggctacaaatttcatgagcactgtagcaccaaagtacctactatgtgtgtggactggagtaacatcagacaactcttattgtttccaaattccactattggtgatagtggagtcccagcactaccttctttgactatgcgtcgtatgcgagagtctgtttccaggatgcctgttagttctcagcacagatattctacacctcacgccttcacctttaacacctccagtccctcatctgaaggttccctctcccagaggcagaggtcgacatccacacctaatgtccacatggtcagcaccaccctgcctgtggacagcaggatgattgaggatgcaattcgaagtcacagcgaatcagcctcaccttcagccctgtccagtagccccaacaatctgagcccaacaggctggtcacagccgaaaacccccgtgccagcacaaagagagcgggcaccagtatctgggacccaggagaaaaacaaaattaggcctcgtggacagagagattcaagctattattgggaaatagaagccagtgaagtgatgctgtccactcggattgggtcaggctcttttggaactgtttataagggtaaatggcacggagatgttgcagtaaagatcctaaaggttgtcgacccaaccccagagcaattccaggccttcaggaatgaggtggctgttctgcgcaaaacacggcatgtgaacattctgcttttcatggggtacatgacaaaggacaacctggcaattgtgacccagtggtgcgagggcagcagcctctacaaacacctgcatgtccaggagaccaagtttcagatgttccagctaattgacattgcccggcagacggctcagggaatggactatttgcatgcaaagaacatcatccatagagacatgaaatccaacaatatatttctccatgaaggcttaacagtgaaaattggagattttggtttggcaacagtaaagtcacgctggagtggttctcagcaggttgaacaacctactggctctgtcctctggatggccccagaggtgatccgaatgcaggataacaacccattcagtttccagtcggatgtctactcctatggcatcgtattgtatgaactgatgacgggggagcttccttattctcacatcaacaaccgagatcagatcatcttcatggtgggccgaggatatgcctccccagatcttagtaagctatataagaactgccccaaagcaatgaagaggctggtagctgactgtgtgaagaaagtaaaggaagagaggcctctttttccccagatcctgtcttccattgagctgctccaacactctctaccgaagatcaaccggagcgcttccgagccatccttgcatcgggcagcccacactgaggatatcaatgcttgcacgctgaccacgtccccgaggctgcctgtcttctagttgactttgcacctgtcttcaggctgccaggggaggaggagaagccagcaggcaccacttttctgctccctttctccagaggcagaacacatgttttcagagaagctgctgctaaggaccttctagactgctcacagggccttaacttcatgttgccttcttttctatccctttgggccctgggagaaggaagccatttgcagtgctggtgtgtcctgctccctccccacattccccatgctcaaggcccagccttctgtagatgcgcaagtggatgttgatggtagtacaaaaagcaggggcccagccccagctgttggctacatgagtatttagaggaagtaaggtagcaggcagtccagccctgatgtggagacacatgggattttggaaatcagcttctggaggaatgcatgtcacaggcgggactttcttcagagagtggtgcagcgccagacattttgcacataaggcaccaaacagcccaggactgccgagactctggccgcccgaaggagcctgctttggtactatggaacttttcttaggggacacgtcctcctttcacagcttctaaggtgtccagtgcattgggatggttttccaggcaaggcactcggccaatccgcatctcagccctctcagggagcagtcttccatcatgctgaattttgtcttccaggagctgcccctatggggcggggccgcagggccagccttgtttctctaacaaacaaacaaacaaacagccttgtttctctagtcacatcatgtgtatacaaggaagccaggaatacaggttttcttgtatacacatgatgtgactagagaaacctgtattcctggcttccttgtatacacatgatgtgactacaaggaagccaggaatacaggttttcttgatgatttgggttttaattttgtttttattgcacctgacaaaatacagttatctgatggtccctcaattatgttattttaataaaataaattaaatttaggtgtaatggctggctgttacctccttttaaagtaattctgagctcacaacttgaatgccccatttgttcaccctcttcaggagcagaattcaagaacaggaaatgtgcccagagcctaggctgggaatgaatttgtaatttaacctttgtactctttgtaaacctctactgaagagttaagtataaaaattaattaagcagaaagtactctaaactcagctaataccttaagtaatacattttataaactatttatttatttggtaggtacagcttttttaaacacaaaaatagattagataaattccagcttggaacaagctagtgctggttcacaaggttatgctcacccttcaattaaaatcaaaatgactacaagacttgccatcagctctcttcaggaccactgctgggtcagaatcagaaaccttgggtgccatgaaatttttacaaaatttcaaatcaaagccaggctttgcagctagataatagatcacttgagtacgaaccacacatgtaagtgcacgtatatttgagttctcaatacaattaccctgatgggcaagaacccacaggtgagagcagaggcttggttcccctagagggccctggctggaggccccaacaccaaccagacgacaggagggccagactgctacccagtactgtacctcctgctccttcaagagcctccctaagggagaagaagatctatacttccactttgtttgctgcacatgtggcaacaagattgctaccctgatttgggacacttgagagaacttgaaaaaaatgaccacccttaaagccctagaaaaaagttgtatgtttgttaacagctatgctgcgctcactttgcattgtgtgttcttgaaagctctgtataaatcaaaattttgacgacacactaaatacactagagaaatacactatagaggaatccttttatagggctgaagactcctttggtaagaaaaatatgctgcattaggggcagctgcaagtttactatttctggggaagaaaagatcaaagataagagccaggtttgttttttaaagcaatcaatccaaacagtttgggtgtttgttagttgttacccctgaggggcttgaggtgtaactatatcagctataaaaatagcaattccatacatttaattaggttactttatatctttcactcttccccatggctgtaataatggagattgaatgagactaaggctaagcccaactccactcaaatccaagtcacacgtcaccttggctgcagtacagggaagctccgcacaccctggcttgggaaagtttcggccgatggagcccaagatgcagggcaaccatctactctttagggttctgatgattccactccagaaaggtgcatgaagaggtccccgagctctgtcatgtcgacatcttcattgttggggacatgccggctttctcggttctcgatgaaatcccagagccgcactgaattaaagaact

SEQ ID NO: 361307 - DNA, 3293 bp, Homo sapiens
  misc_feature (3250)..(3250): n is a, c, g, or t
  misc_feature (3252)..(3252): n is a, c, g, or t
  misc_feature (3254)..(3263): n is a, c, g, or t
  misc_feature (3277)..(3280): n is a, c, g, or t
ggtcgggaggacgagcaccgagtcgagggctcgctcgtctgggccgcccgagagtcttaatcgcgggcgcttgggccgccatcttagatggcgggagtaagaggaaaacgattgtgaggcgggaacggctttctgctgccttttttgggccccgaaaagggtcagctggccgggctttggggcgcgtgccctgaggcgcggagcgcgtttgctacgatgcgggggctgctcggggctccgtcccctgggctggggacgcgccgaatgtgaccgcctcccgctccctcacccgccgcggggaggaggagcgggcgagaagctgccgccgaacgacaggacgttggggcggcctggctccctcaggtttaagaattgtttaagctgcatcaatggagcacatacagggagcttggaagacgatcagcaatggttttggattcaaagatgccgtgtttgatggctccagctgcatctctcctacaatagttcagcagtttggctatcagcgccgggcatcagatgatggcaaactcacagatccttctaagacaagcaacactatccgtgttttcttgccgaacaagcaaagaacagtggtcaatgtgcgaaatggaatgagcttgcatgactgccttatgaaagcactcaaggtgaggggcctgcaaccagagtgctgtgcagtgttcagacttctccacgaacacaaaggtaaaaaagcacgcttagattggaatactgatgctgcgtctttgattggagaagaacttcaagtagatttcctggatcatgttcccctcacaacacacaactttgctcggaagacgttcctgaagcttgccttctgtgacatctgtcagaaattcctgctcaatggatttcgatgtcagacttgtggctacaaatttcatgagcactgtagcaccaaagtacctactatgtgtgtggactggagtaacatcagacaactcttattgtttccaaattccactattggtgatagtggagtcccagcactaccttctttgactatgcgtcgtatgcgagagtctgtttccaggatgcctgttagttctcagcacagatattctacacctcacgccttcacctttaacacctccagtccctcatctgaaggttccctctcccagaggcagaggtcgacatccacacctaatgtccacatggtcagcaccaccctgcctgtggacagcaggatgattgaggatgcaattcgaagtcacagcgaatcagcctcaccttcagccctgtccagtagccccaacaatctgagcccaacaggctggtcacagccgaaaacccccgtgccagcacaaagagagcgggcaccagtatctgggacccaggagaaaaacaaaattaggcctcgtggacagagagattcaagctattattgggaaatagaagccagtgaagtgatgctgtccactcggattgggtcaggctcttttggaactgtttataagggtaaatggcacggagatgttgcagtaaagatcctaaaggttgtcgacccaaccccagagcaattccaggccttcaggaatgaggtggctgttctgcgcaaaacacggcatgtgaacattctgcttttcatggggtacatgacaaaggacaacctggcaattgtgacccagtggtgcgagggcagcagcctctacaaacacctgcatgtccaggagaccaagtttcagatgttccagctaattgacattgcccggcagacggctcagggaatggactatttgcatgcaaagaacatcatccatagagacatgaaatccaacaatatatttctccatgaaggcttaacagtgaaaattggagattttggtttggcaacagtaaagtcacgctggagtggttctcagcaggttgaacaacctactggctctgtcctctggatggccccagaggtgatccgaatgcaggataacaacccattcagtttccagtcggatgtctactcctatggcatcgtattgtatgaactgatgacgggggagcttccttattctcacatcaacaaccgagatcagatcatcttcatggtgggccgaggatatgcctccccagatcttagtaagctatataagaactgccccaaagcaatgaagaggctggtagctgactgtgtgaagaaagtaaaggaagagaggcctctttttccccagatcctgtcttccattgagctgctccaacactctctaccgaagatcaaccggagcgcttccgagccatccttgcatcgggcagcccacactgaggatatcaatgcttgcacgctgaccacgtccccgaggctgcctgtcttctagttgactttgcacctgtcttcaggctgccaggggaggaggagaagccagcaggcaccacttttctgctccctttctccagaggcagaacacatgttttcagagaagctgctgctaaggaccttctagactgctcacagggccttaacttcatgttgccttcttttctatccctttgggccctgggagaaggaagccatttgcagtgctggtgtgtcctgctccctccccacattccccatgctcaaggcccagccttctgtagatgcgcaagtggatgttgatggtagtacaaaaagcaggggcccagccccagctgttggctacatgagtatttagaggaagtaaggtagcaggcagtccagccctgatgtggagacacatgggattttggaaatcagcttctggaggaatgcatgtcacaggcgggactttcttcagagagtggtgcagcgccagacattttgcacataaggcaccaaacagcccaggactgccgagactctggccgcccgaaggagcctgctttggtactatggaacttttcttaggggacacgtcctcctttcacagcttctaaggtgtccagtgcattgggatggttttccaggcaaggcactcggccaatccgcatctcagccctctcagggagcagtcttccatcatgctgaattttgtcttccaggagctgcccctatggggcggggccgcagggccagccttgtttctctaacaaacaaacaaacaaacagccttgtttctctagtcacatcatgtgtatacaaggaagccaggaatacaggttttcttgatgatttgggttttaattttgtttttattgcacctgacaaaatacagttatctgatggtccctcaattatgttattttaataaaataaattaaatttaaaaaaagngngnnnnnnnnnntttttttttttttnnnnttttttttttttt

SEQ ID NO: 361308 - DNA, 2667 bp, Homo sapiens
  misc_feature (2617)..(2617): n is a, c, g, or t
ggtcgggaggacgagcaccgagtcgagggctcgctcgtctgggccgcccgagagtcttaatcgcgggcgcttgggccgccatcttagatggcgggagtaagaggaaaacgattgtgaggcgggaacggctttctgctgccttttttgggccccgaaaagggtcagctggccgggctttggggcgcgtgccctgaggcgcggagcgcgtttgctacgatgcgggggctgctcggggctccgtcccctgggctggggacgcgccgaatgtgaccgcctcccgctccctcacccgccgcggggaggaggagcgggcgagaagctgccgccgaacgacaggacgttggggcggcctggctccctcaggtttaagaattgtttaagctgcatcaatggagcacatacagggagcttggaagacgatcagcaatggttttggattcaaagatgccgtgtttgatggctccagctgcatctctcctacaatagttcagcagtttggctatcagcgccgggcatcagatgatggcaaactcacagatccttctaagacaagcaacactatccgtgttttcttgccgaacaagcaaagaacagtggtcaatgtgcgaaatggaatgagcttgcatgactgccttatgaaagcactcaaggtgaggggcctgcaaccagagtgctgtgcagtgttcagacttctccacgaacacaaaggtaaaaaagcacgcttagattggaatactgatgctgcgtctttgattggagaagaacttcaagtagatttcctggatcatgttcccctcacaacacacaactttgctcggaagacgttcctgaagcttgccttctgtgacatctgtcagaaattcctgctcaatggatttcgatgtcagacttgtggctacaaatttcatgagcactgtagcaccaaagtacctactatgtgtgtggactggagtaacatcagacaactcttattgtttccaaattccactattggtgatagtggagtcccagcactaccttctttgactatgcgtcgtatgcgagagtctgtttccaggatgcctgttagttctcagcacagatattctacacctcacgccttcacctttaacacctccagtccctcatctgaaggttccctctcccagaggcagaggtcgacatccacacctaatgtccacatggtcagcaccaccctgcctgtggacagcaggatgattgaggatgcaattcgaagtcacagcgaatcagcctcaccttcagccctgtccagtagccccaacaatctgagcccaacaggctggtcacagccgaaaacccccgtgccagcacaaagagagcgggcaccagtatctgggacccaggagaaaaacaaaattaggcctcgtggacagagagattcaagctattattgggaaatagaagccagtgaagtgatgctgtccactcggattgggtcaggctcttttggaactgtttataagggtaaatggcacggagatgttgcagtaaagatcctaaaggttgtcgacccaaccccagagcaattccaggccttcaggaatgaggtggctgttctgcgcaaaacacggcatgtgaacattctgcttttcatggggtacatgacaaaggacaacctggcaattgtgacccagtggtgcgagggcagcagcctctacaaacacctgcatgtccaggagaccaagtttcagatgttccagctaattgacattgcccggcagacggctcagggaatggactatttgcatgcaaagaacatcatccatagagacatgaaatccaacaatatatttctccatgaaggcttaacagtgaaaattggagattttggtttggcaacagtaaagtcacgctggagtggttctcagcaggttgaacaacctactggctctgtcctctggatggccccagaggtgatccgaatgcaggataacaacccattcagtttccagtcggatgtctactcctatggcatcgtattgtatgaactgatgacgggggagcttccttattctcacatcaacaaccgagatcagatcatcttcatggtgggccgaggatatgcctccccagatcttagtaagctatataagaactgccccaaagcaatgaagaggctggtagctgactgtgtgaagaaagtaaaggaagagaggcctctttttccccagatcctgtcttccattgagctgctccaacactctctaccgaagatcaaccggagcgcttccgagccatccttgcatcgggcagcccacactgaggatatcaatgcttgcacgctgaccacgtccccgaggctgcctgtcttctagttgactttgcacctgtcttcaggctgccaggggaggaggagaagccagcaggcaccacttttctgctccctttctccagaggcagaacacatgttttcagagaagctgctgctaaggaccttctagactgctcacagggccttaacttcatgttgccttcttttctatccctttgggccctgggagaaggaagccatttgcagtgctggtgtgtcctgctccctccccacattacttcctctaaatactcatgtagccaacagctggggctgggcatgctnttttgtactaccatcaacatccacttgcgcatctacagaaggctgggcct

SEQ ID NO: 361309 - DNA, 1883 bp, Homo sapiens
ccggttcacagagtctcggcagtcctgggctgtttggtgccttatgtgcaaatgtctggcgctgcaccactctctgaagaaagtcccgcctgtgacatgcattcctccagaagctgatttccaaaatcccatgtgtcttccatcatgctgaattttgtcttccaggagctgcccctatggggcggggccgcagggccagccttgtttctctaacaaacaaacaaacaaacagccttgtttctctagtcacatcatgtgtatacaaggaagccaggaatacaggttttcttgatgatttgggttttaattttgtttttattgcacctgacaaaatacagttatctgatggtccctcaattatgttattttaataaaataaattaaatttaggtgtaatggctggctgttacctccttttaaagtaattctgagctcacaacttgaatgccccatttgttcaccctcttcaggagcagaattcaagaacaggaaatgtgcccagagcctaggctgggaatgaatttgtaatttaacctttgtactctttgtaaacctctactgaagagttaagtataaaaattaattaagcagaaagtactctaaactcagctaataccttaagtaatacattttataaactatttatttatttggtaggtacagcttttttaaacacaaaaatagattagataaattccagcttggaacaagctagtgctggttcacaaggttatgctcacccttcaattaaaatcaaaatgactacaagacttgccatcagctctcttcaggaccactgctgggtcagaatcagaaaccttgggtgccatgaaatttttacaaaatttcaaatcaaagccaggctttgcagctagataatagatcacttgagtacgaaccacacatgtaagtgcacgtatatttgagttctcaatacaattaccctgatgggcaagaacccacaggtgagagcagaggcttggttcccctagagggccctggctggaggccccaacaccaaccagacgacaggagggccagactgctacccagtactgtacctcctgctccttcaagagcctccctaagggagaagaagatctatacttccactttgtttgctgcacatgtggcaacaagattgctaccctgatttgggacacttgagagaacttgaaaaaaatgaccacccttaaagccctagaaaaaagttgtatgtttgttaacagctatgctgcgctcactttgcattgtgtgttcttgaaagctctgtataaatcaaaattttgacgacacactaaatacactagagaaatacactatagaggaatccttttatagggctgaagactcctttggtaagaaaaatatgctgcattaggggcagctgcaagtttactatttctggggaagaaaagatcaaagataagagccaggtttgttttttaaagcaatcaatccaaacagtttgggtgtttgttagttgttacccctgaggggcttgaggtgtaactatatcagctataaaaatagcaattccatacatttaattaggttactttatatctttcactcttccccatggctgtaataatggagattgaatgagactaaggctaagcccaactccactcaaatccaagtcacacgtcaccttggctgcagtacagggaagctccgcacaccctggcttgggaaagtttcggccgatggagcccaagatgcagggcaaccatctactctttagggttctgatgattccactccagaaaggtgcatgaagaggtccccgagctctgtcatgtcgacatcttcattgttggggacatgccggctttctcggttctcgatgaaatcccagagccgcactgaattaaagaact

SEQ ID NO: 361310 - DNA, 894 bp, Homo sapiens
ggtcgggaggacgagcaccgagtcgagggctcgctcgtctgggccgcccgagagtcttaatcgcgggcgcttgggccgccatcttagatggcgggagtaagaggaaaacgattgtgaggcgggaacggctttctgctgccttttttgggccccgaaaagggtcagctggccgggctttggggcgcgtgccctgaggcgcggagcgcgtttgctacgatgcgggggctgctcggggctccgtcccctgggctggggacgcgccgaatgtgaccgcctcccgctccctcacccgccgcggggaggaggagcgggcgagaagctgccgccgaacgacaggacgttggggcggcctggctccctcaggtttaagaattgtttaagctgcatcaatggagcacatacagggagcttggaagacgatcagcaatggttttggattcaaagatgccgtgtttgatggctccagctgcatctctcctacaatagttcagcagtttggctatcagcgccgggcatcagatgatggcaaactcacagatccttctaagacaagcaacactatccgtgttttcttgccgaacaagcaaagaacagtggtcaatgtgcgaaatggaatgagcttgcatgactgccttatgaaagcactcaaggtgaggggcctgcaaccagagtgctgtgcagtgttcagacttctccacgaacacaaagggtaagagctcaaaagtcaattgacttcttcagactagtaaggatcttctagcttcaaatagctatgtttgtattaaattgtactagcttcctatagaatattgtatatttctatacctttctttataaagagataattcagaaaaataggtattaagaaattgaaattattgcttggacattctc

SEQ ID NO: 361311 - DNA, 760 bp, Homo sapiens
ggtcgggaggacgagcaccgagtcgagggctcgctcgtctgggccgcccgagagtcttaatcgcgggcgcttgggccgccatcttagatggcgggagtaagaggaaaacgattgtgaggcgggaacggctttctgctgccttttttgggccccgaaaagggtcagctggccgggctttggggcgcgtgccctgaggcgcggagcgcgtttgctacgatgcgggggctgctcggggctccgtcccctgggctggggacgcgccgaatgtgaccgcctcccgctccctcacccgccgcggggaggaggagcgggcgagaagctgccgccgaacgacaggacgttggggcggcctggctccctcaggtttaagaattgtttaagctgcatcaatggagcacatacagggagcttggaagacgatcagcaatggttttggattcaaagatgccgtgtttgatggctccagctgcatctctcctacaatagttcagcagtttggctatcagcgccgggcatcagatgatggcaaactcacagatccttctaagacaagcaacactatccgtgttttcttgccgaacaagcaaagaacagtggtatgtgaacattctacttaggaaatttagctatttatctgcctgtggagcacattaaggatcatgttcaacttaaagacaggcaaaatattcattgtcatttagggtctttatttttttttttctaactgcagatttatttttttatattgcttgttccgctg

SEQ ID NO: 361312 - DNA, 338 bp, Homo sapiens
tttctactcatgcccctcaaacttatttttaataatttcttttcccttcacagctatttgcatgcaaagaacatcatccatagagacatgaaatccaacagtatcctttggttgttgagttcatttgactgctcggttctaaatttagggaaacagaagggaggctttctatcacaagtggctctcggtgccaggggatatctttttaaggaaagaggcagaggacaggaaaacagaaaagtcagaaaattagtaggcttggcctgtccctcagcagcttatgcctcacctggactgatgagagcgatgtttaggttaggttcctttctgagtttatc

SEQ ID NO: 361313 - DNA, 967 bp, Homo sapiens
ccacggggcaccataggcttagggtctgaggcctgtgtgtttaatcccgtacagatagatttacgatgcacgattaatgtggtcgtgcggtctgagccgtcgagaaatttactcgcgcatacttggtttccgtgatcctaagattgttggtaccgtaagaggaaaatcattgtgatggcgctaattaggtgtaagtctggcatgcctttcgagtgacccaggattaggctgaagtttggttcgagatctttggggcgcgtgccctgaggcgcggagcgcgtttgctacgatgcgggggctgctcggggctccgtcccctgggctggggacgcgccgaatgtgaccgcctcccgctccctcacccgccgcggggaggaggagcgggcgagaagctgccgccgaacgacaggacgttggggcggcctggctccctcaggtttaagaattgtttaagctgcatcaatggagcacatacagggagcttggaagacgatcagcaatggttttggattcaaagatgccgtgtttgatggctccagctgcatctctcctacaatagttcagcagtttggctatcagcgccgggcatcagatgatggcaaactcacagatccttctaagacaagcaacactatccgtgttttcttgccgaacaagcaaagaacagtggtcaatgtgcgaaatggaatgagcttgcatgactgccttatgaaagcactcaaggtgaggggcctgcaaccagagtgctgtgcagtgttcagacttctccacgaacacaaagggtaagagctcaaaagtcaattgacttcttcagactagtaaggatcttctagcttcaaatagctatgtttgtattaaattgtactagcttcctatagaatattgtatatttctatacctttctttataaagagataattcagaaaaataggtattaagaaattgaaattattgcttggacattctc

SEQ ID NO: 361314 - DNA, 4736 bp, Homo sapiens
ggtcgggaggacgagcaccgagtcgagggctcgctcgtctgggccgcccgagagtcttaatcgcgggcgcttgggccgccatcttagatggcgggagtaagaggaaaacgattgtgaggcgggaacggctttctgctgccttttttgggccccgaaaagggtcagctggccgggctttggggcgcgtgccctgaggcgcggagcgcgtttgctacgatgcgggggctgctcggggctccgtcccctgggctggggacgcgccgaatgtgaccgcctcccgctccctcacccgccgcggggaggaggagcgggcgagaagctgccgccgaacgacaggacgttggggcggcctggctccctcaggtttaagaattgtttaagctgcatcaatggagcacatacagggagcttggaagacgatcagcaatggttttggattcaaagatgccgtgtttgatggctccagctgcatctctcctacaatagttcagcagtttggctatcagcgccgggcatcagatgatggcaaactcacagatccttctaagacaagcaacactatccgtgttttcttgccgaacaagcaaagaacagtggtcaatgtgcgaaatggaatgagcttgcatgactgccttatgaaagcactcaaggtgaggggcctgcaaccagagtgctgtgcagtgttcagacttctccacgaacacaaaggtaaaaaagcacgcttagattggaatactgatgctgcgtctttgattggagaagaacttcaagtagatttcctggatcatgttcccctcacaacacacaactttgctcggaagacgttcctgaagcttgccttctgtgacatctgtcagaaattcctgctcaatggatttcgatgtcagacttgtggctacaaatttcatgagcactgtagcaccaaagtacctactatgtgtgtggactggagtaacatcagacaactcttattgtttccaaattccactattggtgatagtggagtcccagcactaccttctttgactatgcgtcgtatgcgagagtctgtttccaggatgcctgttagttctcagcacagatattctacacctcacgccttcacctttaacacctccagtccctcatctgaaggttccctctcccagaggcagaggtcgacatccacacctaatgtccacatggtcagcaccaccctgcctgtggacagcaggatgattgaggatgcaattcgaagtcacagcgaatcagcctcaccttcagccctgtccagtagccccaacaatctgagcccaacaggctggtcacagccgaaaacccccgtgccagcacaaagagagcgggcaccagtatctgggacccaggagaaaaacaaaattaggcctcgtggacagagagattcaagctattattgggaaatagaagccagtgaagtgatgctgtccactcggattgggtcaggctcttttggaactgtttataagggtaaatggcacggagatgttgcagtaaagatcctaaaggttgtcgacccaaccccagagcaattccaggccttcaggaatgaggtggctgttctgcgcaaaacacggcatgtgaacattctgcttttcatggggtacatgacaaaggacaacctggcaattgtgacccagtggtgcgagggcagcagcctctacaaacacctgcatgtccaggagaccaagtttcagatgttccagctaattgacattgcccggcagacggctcagggaatggactatttgcatgcaaagaacatcatccatagagacatgaaatccaacaatatatttctccatgaaggcttaacagtgaaaattggagattttggtttggcaacagtaaagtcacgctggagtggttctcagcaggttgaacaacctactggctctgtcctctggatggccccagaggtgatccgaatgcaggataacaacccattcagtttccagtcggatgtctactcctatggcatcgtattgtatgaactgatgacgggggagcttccttattctcacatcaacaaccgagatcagatcatcttcatggtgggccgaggatatgcctccccagatcttagtaagctatataagaactgccccaaagcaatgaagaggctggtagctgactgtgtgaagaaagtaaaggaagagaggcctctttttccccagatcctgtcttccattgagctgctccaacactctctaccgaagatcaaccggagcgcttccgagccatccttgcatcgggcagcccacactgaggatatcaatgcttgcacgctgaccacgtccccgaggctgcctgtcttctagttgactttgcacctgtcttcaggctgccaggggaggaggagaagccagcaggcaccacttttctgctccctttctccagaggcagaacacatgttttcagagaagctgctgctaaggaccttctagactgctcacagggccttaacttcatgttgccttcttttctatccctttgggccctgggagaaggaagccatttgcagtgctggtgtgtcctgctccctccccacattccccatgctcaaggcccagccttctgtagatgcgcaagtggatgttgatggtagtacaaaaagcaggggcccagccccagctgttggctacatgagtatttagaggaagtaaggtagcaggcagtccagccctgatgtggagacacatgggattttggaaatcagcttctggaggaatgcatgtcacaggcgggactttcttcagagagtggtgcagcgccagacattttgcacataaggcaccaaacagcccaggactgccgagactctggccgcccgaaggagcctgctttggtactatggaacttttcttaggggacacgtcctcctttcacagcttctaaggtgtccagtgcattgggatggttttccaggcaaggcactcggccaatccgcatctcagccctctcagggagcagtcttccatcatgctgaattttgtcttccaggagctgcccctatggggcggggccgcagggccagccttgtttctctaacaaacaaacaaacaaacagccttgtttctctagtcacatcatgtgtatacaaggaagccaggaatacaggttttcttgatgatttgggttttaattttgtttttattgcacctgacaaaatacagttatctgatggtccctcaattatgttattttaataaaataaattaaatttaggtgtaatggctggctgttacctccttttaaagtaattctgagctcacaacttgaatgccccatttgttcaccctcttcaggagcagaattcaagaacaggaaatgtgcccagagcctaggctgggaatgaatttgtaatttaacctttgtactctttgtaaacctctactgaagagttaagtataaaaattaattaagcagaaagtactctaaactcagctaataccttaagtaatacattttataaactatttatttatttggtaggtacagcttttttaaacacaaaaatagattagataaattccagcttggaacaagctagtgctggttcacaaggttatgctcacccttcaattaaaatcaaaatgactacaagacttgccatcagctctcttcaggaccactgctgggtcagaatcagaaaccttgggtgccatgaaatttttacaaaatttcaaatcaaagccaggctttgcagctagataatagatcacttgagtacgaaccacacatgtaagtgcacgtatatttgagttctcaatacaattaccctgatgggcaagaacccacaggtgagagcagaggcttggttcccctagagggccctggctggaggccccaacaccaaccagacgacaggagggccagactgctacccagtactgtacctcctgctccttcaagagcctccctaagggagaagaagatctatacttccactttgtttgctgcacatgtggcaacaagattgctaccctgatttgggacacttgagagaacttgaaaaaaatgaccacccttaaagccctagaaaaaagttgtatgtttgttaacagctatgctgcgctcactttgcattgtgtgttcttgaaagctctgtataaatcaaaattttgacgacacactaaatacactagagaaatacactatagaggaatccttttatagggctgaagactcctttggtaagaaaaatatgctgcattaggggcagctgcaagtttactatttctggggaagaaaagatcaaagataagagccaggtttgttttttaaagcaatcaatccaaacagtttgggtgtttgttagttgttacccctgaggggcttgaggtgtaactatatcagctataaaaatagcaattccatacatttaattaggttactttatatctttcactcttccccatggctgtaataatggagattgaatgagactaaggctaagcccaactccactcaaatccaagtcacacgtcaccttggctgcagtacagggaagctccgcacaccctggcttgggaaagtttcggccgatggagcccaagatgcagggcaaccatctactctttagggttctgatgattccactccagaaaggtgcatgaagaggtccccgagctctgtcatgtcgacatcttcattgttggggacatgccggctttctcggttctcgatgaaatcccagagccgcactgaattaaagaact

SEQ ID NO: 361315 - DNA, 4682 bp, Homo sapiens
ggtcgggaggacgagcaccgagtcgagggctcgctcgtctgggccgcccgagagtcttaatcgcgggcgcttgggccgccatcttagatggcgggagtaagaggaaaacgattgtgaggcgggaacggctttctgctgccttttttgggccccgaaaagggtcagctggccgggctttggggcgcgtgccctgaggcgcggagcgcgtttgctacgatgcgggggctgctcggggctccgtcccctgggctggggacgcgccgaatgtgaccgcctcccgctccctcacccgccgcggggaggaggagcgggcgagaagctgccgccgaacgacaggacgttggggcggcctggctccctcaggtttaagaattgtttaagctgcatcaatggagcacatacagggagcttggaagacgatcagcaatggttttggattcaaagatgccgtgtttgatggctccagctgcatctctcctacaatagttcagcagtttggctatcagcgccgggcatcagatgatggcaaactcacagatccttctaagacaagcaacactatccgtgttttcttgccgaacaagcaaagaacagtggtcaatgtgcgaaatggaatgagcttgcatgactgccttatgaaagcactcaaggtgaggggcctgcaaccagagtgctgtgcagtgttcagacttctccacgaacacaaaggtaaaaaagcacgcttagattggaatactgatgctgcgtctttgattggagaagaacttcaagtagatttcctggatcatgttcccctcacaacacacaactttgctcggaagacgttcctgaagcttgccttctgtgacatctgtcagaaattcctgctcaatggatttcgatgtcagacttgtggctacaaatttcatgagcactgtagcaccaaagtacctactatgtgtgtggactggagtaacatcagacaactcttattgtttccaaattccactattggtgatagtggagtcccagcactaccttctttgactatgcgtcgtatgcgagagtctgtttccaggatgcctgttagttctcagcacagatattctacacctcacgccttcacctttaacacctccagtccctcatctgaaggttccctctcccagaggcagaggtcgacatccacacctaatgtccacatggtcagcaccaccctgcctgtggacagcaggatgattgaggatgcaattcgaagtcacagcgaatcagcctcaccttcagccctgtccagtagccccaacaatctgagcccaacaggctggtcacagccgaaaacccccgtgccagcacaaagagagcgggcaccagtatctgggacccaggagaaaaacaaaattaggcctcgtggacagagagattcaagctattattgggaaatagaagccagtgaagtgatgctgtccactcggattgggtcaggctcttttggaactgtttataagggtaaatggcacggagatgttgcagtaaagatcctaaaggttgtcgacccaaccccagagcaattccaggccttcaggaatgaggtggctgttctgcgcaaaacacggcatgtgaacattctgcttttcatggggtacatgacaaaggacaacctggcaattgtgacccagtggtgcgagggcagcagcctctacaaacacctgcatgtccaggagaccaagtttcagatgttccagctaattgacattgcccggcagacggctcagggaatggactatttgcatgcaaagaacatcatccatagagacatgaaatccaacaatatatttctccatgaaggcttaacagtgcaggttgaacaacctactggctctgtcctctggatggccccagaggtgatccgaatgcaggataacaacccattcagtttccagtcggatgtctactcctatggcatcgtattgtatgaactgatgacgggggagcttccttattctcacatcaacaaccgagatcagatcatcttcatggtgggccgaggatatgcctccccagatcttagtaagctatataagaactgccccaaagcaatgaagaggctggtagctgactgtgtgaagaaagtaaaggaagagaggcctctttttccccagatcctgtcttccattgagctgctccaacactctctaccgaagatcaaccggagcgcttccgagccatccttgcatcgggcagcccacactgaggatatcaatgcttgcacgctgaccacgtccccgaggctgcctgtcttctagttgactttgcacctgtcttcaggctgccaggggaggaggagaagccagcaggcaccacttttctgctccctttctccagaggcagaacacatgttttcagagaagctgctgctaaggaccttctagactgctcacagggccttaacttcatgttgccttcttttctatccctttgggccctgggagaaggaagccatttgcagtgctggtgtgtcctgctccctccccacattccccatgctcaaggcccagccttctgtagatgcgcaagtggatgttgatggtagtacaaaaagcaggggcccagccccagctgttggctacatgagtatttagaggaagtaaggtagcaggcagtccagccctgatgtggagacacatgggattttggaaatcagcttctggaggaatgcatgtcacaggcgggactttcttcagagagtggtgcagcgccagacattttgcacataaggcaccaaacagcccaggactgccgagactctggccgcccgaaggagcctgctttggtactatggaacttttcttaggggacacgtcctcctttcacagcttctaaggtgtccagtgcattgggatggttttccaggcaaggcactcggccaatccgcatctcagccctctcagggagcagtcttccatcatgctgaattttgtcttccaggagctgcccctatggggcggggccgcagggccagccttgtttctctaacaaacaaacaaacaaacagccttgtttctctagtcacatcatgtgtatacaaggaagccaggaatacaggttttcttgatgatttgggttttaattttgtttttattgcacctgacaaaatacagttatctgatggtccctcaattatgttattttaataaaataaattaaatttaggtgtaatggctggctgttacctccttttaaagtaattctgagctcacaacttgaatgccccatttgttcaccctcttcaggagcagaattcaagaacaggaaatgtgcccagagcctaggctgggaatgaatttgtaatttaacctttgtactctttgtaaacctctactgaagagttaagtataaaaattaattaagcagaaagtactctaaactcagctaataccttaagtaatacattttataaactatttatttatttggtaggtacagcttttttaaacacaaaaatagattagataaattccagcttggaacaagctagtgctggttcacaaggttatgctcacccttcaattaaaatcaaaatgactacaagacttgccatcagctctcttcaggaccactgctgggtcagaatcagaaaccttgggtgccatgaaatttttacaaaatttcaaatcaaagccaggctttgcagctagataatagatcacttgagtacgaaccacacatgtaagtgcacgtatatttgagttctcaatacaattaccctgatgggcaagaacccacaggtgagagcagaggcttggttcccctagagggccctggctggaggccccaacaccaaccagacgacaggagggccagactgctacccagtactgtacctcctgctccttcaagagcctccctaagggagaagaagatctatacttccactttgtttgctgcacatgtggcaacaagattgctaccctgatttgggacacttgagagaacttgaaaaaaatgaccacccttaaagccctagaaaaaagttgtatgtttgttaacagctatgctgcgctcactttgcattgtgtgttcttgaaagctctgtataaatcaaaattttgacgacacactaaatacactagagaaatacactatagaggaatccttttatagggctgaagactcctttggtaagaaaaatatgctgcattaggggcagctgcaagtttactatttctggggaagaaaagatcaaagataagagccaggtttgttttttaaagcaatcaatccaaacagtttgggtgtttgttagttgttacccctgaggggcttgaggtgtaactatatcagctataaaaatagcaattccatacatttaattaggttactttatatctttcactcttccccatggctgtaataatggagattgaatgagactaaggctaagcccaactccactcaaatccaagtcacacgtcaccttggctgcagtacagggaagctccgcacaccctggcttgggaaagtttcggccgatggagcccaagatgcagggcaaccatctactctttagggttctgatgattccactccagaaaggtgcatgaagaggtccccgagctctgtcatgtcgacatcttcattgttggggacatgccggctttctcggttctcgatgaaatcccagagccgcactgaattaaagaact

SEQ ID NO: 361316 - DNA, 4682 bp, Homo sapiens
ggtcgggaggacgagcaccgagtcgagggctcgctcgtctgggccgcccgagagtcttaatcgcgggcgcttgggccgccatcttagatggcgggagtaagaggaaaacgattgtgaggcgggaacggctttctgctgccttttttgggccccgaaaagggtcagctggccgggctttggggcgcgtgccctgaggcgcggagcgcgtttgctacgatgcgggggctgctcggggctccgtcccctgggctggggacgcgccgaatgtgaccgcctcccgctccctcacccgccgcggggaggaggagcgggcgagaagctgccgccgaacgacaggacgttggggcggcctggctccctcaggtttaagaattgtttaagctgcatcaatggagcacatacagggagcttggaagacgatcagcaatggttttggattcaaagatgccgtgtttgatggctccagctgcatctctcctacaatagttcagcagtttggctatcagcgccgggcatcagatgatggcaaactcacagatccttctaagacaagcaacactatccgtgttttcttgccgaacaagcaaagaacagtggtcaatgtgcgaaatggaatgagcttgcatgactgccttatgaaagcactcaaggtgaggggcctgcaaccagagtgctgtgcagtgttcagacttctccacgaacacaaaggtaaaaaagcacgcttagattggaatactgatgctgcgtctttgattggagaagaacttcaagtagatttcctggatcatgttcccctcacaacacacaactttgctcggaagacgttcctgaagcttgccttctgtgacatctgtcagaaattcctgctcaatggatttcgatgtcagacttgtggctacaaatttcatgagcactgtagcaccaaagtacctactatgtgtgtggactggagtaacatcagacaactcttattgtttccaaattccactattggtgatagtggagtcccagcactaccttctttgactatgcgtcgtatgcgagagtctgtttccaggatgcctgttagttctcagcacagatattctacacctcacgccttcacctttaacacctccagtccctcatctgaaggttccctctcccagaggcagaggtcgacatccacacctaatgtccacatggtcagcaccaccctgcctgtggacagcaggatgattgaggatgcaattcgaagtcacagcgaatcagcctcaccttcagccctgtccagtagccccaacaatctgagcccaacaggctggtcacagccgaaaacccccgtgccagcacaaagagagcgggcaccagtatctgggacccaggagaaaaacaaaattaggcctcgtggacagagagattcaagctattattgggaaatagaagccagtgaagtgatgctgtccactcggattgggtcaggctcttttggaactgtttataagggtaaatggcacggagatgttgcagtaaagatcctaaaggttgtcgacccaaccccagagcaattccaggccttcaggaatgaggtggctgttctgcgcaaaacacggcatgtgaacattctgcttttcatggggtacatgacaaaggacaacctggcaattgtgacccagtggtgcgagggcagcagcctctacaaacacctgcatgtccaggagaccaagtttcagatgttccagctaattgacattgcccggcagacggctcagggaatggactatttgcatgcaaagaacatcatccatagagacatgaaatccaacaatatatttctccatgaaggcttaacagtgaaaattggagattttggtttggcaacagtaaagtcacgctggagtggttctcagcaggttgaacaacctactggctctgtcctctggatggccccagaggtgatccgaatgcaggataacaacccattcagtttccagtcggatgtctactcctatggcatcgtattgtatgaactgatgacgggggagcttccttattctcacatcaacaaccgagatcagatcatcttcatggtgggccgaggatatgcctccccagatcttagtaagctatataagaactgccccaaagcaatgaagaggctggtagctgactgtgtgaagaaagtaaaggaagagaggcctctttttccccagatcctgtcttccattgagctgctccaacactctctaccgaagatcaaccggagcgcttccgagccatccttgcatcgggcagcccacactgaggatatcaatgcttgcacgctgaccacgtccccgaggctgcctgtcttctagttgactttgcacctgtcttcaggctgccaggggaggaggagaagccagcaggcaccacttttctgctccctttctccagaggcagaacacatgttttcagagaagctgctgctaaggaccttctagactgctcacagggccttaacttcatgttgccttcttttctatccctttgggccctgggagaaggaagccatttgcagtgctggtgtgtcctgctccctccccacattccccatgctcaaggcccagccttctgtagatgcgcaagtggatgttgatggtagtacaaaaagcaggggcccagccccagctgttggctacatgagtatttagaggaagtaaggtagcaggcagtccagccctgatgtggagacacatgggattttggaaatcagcttctggaggaatgcatgtcacaggcgggactttcttcagagagtggtgcagcgccagacattttgcacataaggcaccaaacagcccaggactgccgagactctggccgcccgaaggagcctgctttggtactatggaacttttcttaggggacacgtcctcctttcacagcttctaaggtgtccagtgcattgggatggttttccaggcaaggcactcggccaatccgcatctcagccctctcagggagcagtcttccatcatgctgaattttgtcttccaggagctgcccctatggggcggggccgcagggccagccttgtttctctaacaaacaaacaaacaaacagccttgtttctctagtcacatcatgtgtatacaaggaagccaggaatacaggttttcttgatgatttgggttttaattttgtttttattgcacctgacaaaatacagttatctgatggtccctcaattatgttattttaataaaataaattaaatttaggtgtaatggctggctgttacctccttttaaagtaattctgagctcacaacttgaatgccccatttgttcaccctcttcaggagcagaattcaagaacaggaaatgtgcccagagcctaggctgggaatgaatttgtaatttaacctttgtactctttgtaaacctctactgaagagttaagtataaaaattaattaagcagaaagtactctaaactcagctaataccttaagtaatacattttataaactatttatttatttggtaggtacagcttttttaaacacaaaaatagattagataaattccagcttggaacaagctagtgctggttcacaaggttatgctcacccttcaattaaaatcaaaatgactacaagacttgccatcagctctcttcaggaccactgctgggtcagaatcagaaaccttgggtgccatgaaatttttacaaaatttcaaatcaaagccaggctttgcagctagataatagatcacttgagtacgaaccacacatgtaagtgcacgtatatttgagttctcaatacaattaccctgatgggcaagaacccacaggtgagagcagaggcttggttcccctagagggccctggctggaggccccaacaccaaccagacgacaggagggccagactgctacccagtactgtacctcctgctccttcaagagcctccctaagggagaagaagatctatacttccactttgtttgctgcacatgtggcaacaagattgctaccctgatttgggacacttgagagaacttgaaaaaaatgaccacccttaaagccctagaaaaaagttgtatgtttgttaacagctatggacgacacactaaatacactagagaaatacactatagaggaatccttttatagggctgaagactcctttggtaagaaaaatatgctgcattaggggcagctgcaagtttactatttctggggaagaaaagatcaaagataagagccaggtttgttttttaaagcaatcaatccaaacagtttgggtgtttgttagttgttacccctgaggggcttgaggtgtaactatatcagctataaaaatagcaattccatacatttaattaggttactttatatctttcactcttccccatggctgtaataatggagattgaatgagactaaggctaagcccaactccactcaaatccaagtcacacgtcaccttggctgcagtacagggaagctccgcacaccctggcttgggaaagtttcggccgatggagcccaagatgcagggcaaccatctactctttagggttctgatgattccactccagaaaggtgcatgaagaggtccccgagctctgtcatgtcgacatcttcattgttggggacatgccggctttctcggttctcgatgaaatcccagagccgcactgaattaaagaact

SEQ ID NO: 361317 - DNA, 4623 bp, Homo sapiens
ggtcgggaggacgagcaccgagtcgagggctcgctcgtctgggccgcccgagagtcttaatcgcgggcgcttgggccgccatcttagatggcgggagtaagaggaaaacgattgtgaggcgggaacggctttctgctgccttttttgggccccgaaaagggtcagctggccgggctttggggcgcgtgccctgaggcgcggagcgcgtttgctacgatgcgggggctgctcggggctccgtcccctgggctggggacgcgccgaatgtgaccgcctcccgctccctcacccgccgcggggaggaggagcgggcgagaagctgccgccgaacgacaggacgttggggcggcctggctccctcaggtttaagaattgtttaagctgcatcaatggagcacatacagggagcttggaagacgatcagcaatggttttggattcaaagatgccgtgtttgatggctccagctgcatctctcctacaatagttcagcagtttggctatcagcgccgggcatcagatgatggcaaactcacagatccttctaagacaagcaacactatccgtgttttcttgccgaacaagcaaagaacagtgtaaaaaagcacgcttagattggaatactgatgctgcgtctttgattggagaagaacttcaagtagatttcctggatcatgttcccctcacaacacacaactttgctcggaagacgttcctgaagcttgccttctgtgacatctgtcagaaattcctgctcaatggatttcgatgtcagacttgtggctacaaatttcatgagcactgtagcaccaaagtacctactatgtgtgtggactggagtaacatcagacaactcttattgtttccaaattccactattggtgatagtggagtcccagcactaccttctttgactatgcgtcgtatgcgagagtctgtttccaggatgcctgttagttctcagcacagatattctacacctcacgccttcacctttaacacctccagtccctcatctgaaggttccctctcccagaggcagaggtcgacatccacacctaatgtccacatggtcagcaccaccctgcctgtggacagcaggatgattgaggatgcaattcgaagtcacagcgaatcagcctcaccttcagccctgtccagtagccccaacaatctgagcccaacaggctggtcacagccgaaaacccccgtgccagcacaaagagagcgggcaccagtatctgggacccaggagaaaaacaaaattaggcctcgtggacagagagattcaagctattattgggaaatagaagccagtgaagtgatgctgtccactcggattgggtcaggctcttttggaactgtttataagggtaaatggcacggagatgttgcagtaaagatcctaaaggttgtcgacccaaccccagagcaattccaggccttcaggaatgaggtggctgttctgcgcaaaacacggcatgtgaacattctgcttttcatggggtacatgacaaaggacaacctggcaattgtgacccagtggtgcgagggcagcagcctctacaaacacctgcatgtccaggagaccaagtttcagatgttccagctaattgacattgcccggcagacggctcagggaatggactatttgcatgcaaagaacatcatccatagagacatgaaatccaacaatatatttctccatgaaggcttaacagtgaaaattggagattttggtttggcaacagtaaagtcacgctggagtggttctcagcaggttgaacaacctactggctctgtcctctggatggccccagaggtgatccgaatgcaggataacaacccattcagtttccagtcggatgtctactcctatggcatcgtattgtatgaactgatgacgggggagcttccttattctcacatcaacaaccgagatcagatcatcttcatggtgggccgaggatatgcctccccagatcttagtaagctatataagaactgccccaaagcaatgaagaggctggtagctgactgtgtgaagaaagtaaaggaagagaggcctctttttccccagatcctgtcttccattgagctgctccaacactctctaccgaagatcaaccggagcgcttccgagccatccttgcatcgggcagcccacactgaggatatcaatgcttgcacgctgaccacgtccccgaggctgcctgtcttctagttgactttgcacctgtcttcaggctgccaggggaggaggagaagccagcaggcaccacttttctgctccctttctccagaggcagaacacatgttttcagagaagctgctgctaaggaccttctagactgctcacagggccttaacttcatgttgccttcttttctatccctttgggccctgggagaaggaagccatttgcagtgctggtgtgtcctgctccctccccacattccccatgctcaaggcccagccttctgtagatgcgcaagtggatgttgatggtagtacaaaaagcaggggcccagccccagctgttggctacatgagtatttagaggaagtaaggtagcaggcagtccagccctgatgtggagacacatgggattttggaaatcagcttctggaggaatgcatgtcacaggcgggactttcttcagagagtggtgcagcgccagacattttgcacataaggcaccaaacagcccaggactgccgagactctggccgcccgaaggagcctgctttggtactatggaacttttcttaggggacacgtcctcctttcacagcttctaaggtgtccagtgcattgggatggttttccaggcaaggcactcggccaatccgcatctcagccctctcagggagcagtcttccatcatgctgaattttgtcttccaggagctgcccctatggggcggggccgcagggccagccttgtttctctaacaaacaaacaaacaaacagccttgtttctctagtcacatcatgtgtatacaaggaagccaggaatacaggttttcttgatgatttgggttttaattttgtttttattgcacctgacaaaatacagttatctgatggtccctcaattatgttattttaataaaataaattaaatttaggtgtaatggctggctgttacctccttttaaagtaattctgagctcacaacttgaatgccccatttgttcaccctcttcaggagcagaattcaagaacaggaaatgtgcccagagcctaggctgggaatgaatttgtaatttaacctttgtactctttgtaaacctctactgaagagttaagtataaaaattaattaagcagaaagtactctaaactcagctaataccttaagtaatacattttataaactatttatttatttggtaggtacagcttttttaaacacaaaaatagattagataaattccagcttggaacaagctagtgctggttcacaaggttatgctcacccttcaattaaaatcaaaatgactacaagacttgccatcagctctcttcaggaccactgctgggtcagaatcagaaaccttgggtgccatgaaatttttacaaaatttcaaatcaaagccaggctttgcagctagataatagatcacttgagtacgaaccacacatgtaagtgcacgtatatttgagttctcaatacaattaccctgatgggcaagaacccacaggtgagagcagaggcttggttcccctagagggccctggctggaggccccaacaccaaccagacgacaggagggccagactgctacccagtactgtacctcctgctccttcaagagcctccctaagggagaagaagatctatacttccactttgtttgctgcacatgtggcaacaagattgctaccctgatttgggacacttgagagaacttgaaaaaaatgaccacccttaaagccctagaaaaaagttgtatgtttgttaacagctatgctgcgctcactttgcattgtgtgttcttgaaagctctgtataaatcaaaattttgacgacacactaaatacactagagaaatacactatagaggaatccttttatagggctgaagactcctttggtaagaaaaatatgctgcattaggggcagctgcaagtttactatttctggggaagaaaagatcaaagataagagccaggtttgttttttaaagcaatcaatccaaacagtttgggtgtttgttagttgttacccctgaggggcttgaggtgtaactatatcagctataaaaatagcaattccatacatttaattaggttactttatatctttcactcttccccatggctgtaataatggagattgaatgagactaaggctaagcccaactccactcaaatccaagtcacacgtcaccttggctgcagtacagggaagctccgcacaccctggcttgggaaagtttcggccgatggagcccaagatgcagggcaaccatctactctttagggttctgatgattccactccagaaaggtgcatgaagaggtccccgagctctgtcatgtcgacatcttcattgttggggacatgccggctttctcggttctcgatgaaatcccagagccgcactgaattaaagaact

SEQ ID NO: 361318 - DNA, 3610 bp, Homo sapiens
aggtgggcagaaataggccctatttttacctgtatttcccagaaccctttttgttatagctgagttgccttattttagacttcagaacagtcagctttccaatctttcagtcactatttagacttgtaggaataagtcatataatggagacttctacaaggagtccttgtgacctccacaggagggtcatggagtgtacattgatgaaagagaatgtcctctctgtaagcaaggctggcactgaactgatggcccagtgaactaatggtgggcttctgtttgctcagaatgccacccgggttatcagccgtgccatgtgtttgtttttgggactgggggtggtgttgggactgggggtggtgtcgacagcacagaacccactgtccacgggaaagcacagtagacctccctgagcactttcctcctccctctcctctcttcccctcccctccccagcaaaacacggcatgtgaacattctgcttttcatggggtacatgacaaaggacaacctggcaattgtgacccagtggtgcgagggcagcagcctctacaaacacctgcatgtccaggagaccaagtttcagatgttccagctaattgacattgcccggcagacggctcagggaatggactatttgcatgcaaagaacatcatccatagagacatgaaatccaacaatatatttctccatgaaggcttaacagtgaaaattggagattttggtttggcaacagtaaagtcacgctggagtggttctcagcaggttgaacaacctactggctctgtcctctggatggccccagaggtgatccgaatgcaggataacaacccattcagtttccagtcggatgtctactcctatggcatcgtattgtatgaactgatgacgggggagcttccttattctcacatcaacaaccgagatcagatcatcttcatggtgggccgaggatatgcctccccagatcttagtaagctatataagaactgccccaaagcaatgaagaggctggtagctgactgtgtgaagaaagtaaaggaagagaggcctctttttccccagatcctgtcttccattgagctgctccaacactctctaccgaagatcaaccggagcgcttccgagccatccttgcatcgggcagcccacactgaggatatcaatgcttgcacgctgaccacgtccccgaggctgcctgtcttctagttgactttgcacctgtcttcaggctgccaggggaggaggagaagccagcaggcaccacttttctgctccctttctccagaggcagaacacatgttttcagagaagctgctgctaaggaccttctagactgctcacagggccttaacttcatgttgccttcttttctatccctttgggccctgggagaaggaagccatttgcagtgctggtgtgtcctgctccctccccacattccccatgctcaaggcccagccttctgtagatgcgcaagtggatgttgatggtagtacaaaaagcaggggcccagccccagctgttggctacatgagtatttagaggaagtaaggtagcaggcagtccagccctgatgtggagacacatgggattttggaaatcagcttctggaggaatgcatgtcacaggcgggactttcttcagagagtggtgcagcgccagacattttgcacataaggcaccaaacagcccaggactgccgagactctggccgcccgaaggagcctgctttggtactatggaacttttcttaggggacacgtcctcctttcacagcttctaaggtgtccagtgcattgggatggttttccaggcaaggcactcggccaatccgcatctcagccctctcagggagcagtcttccatcatgctgaattttgtcttccaggagctgcccctatggggcggggccgcagggccagccttgtttctctaacaaacaaacaaacaaacagccttgtttctctagtcacatcatgtgtatacaaggaagccaggaatacaggttttcttgatgatttgggttttaattttgtttttattgcacctgacaaaatacagttatctgatggtccctcaattatgttattttaataaaataaattaaatttaggtgtaatggctggctgttacctccttttaaagtaattctgagctcacaacttgaatgccccatttgttcaccctcttcaggagcagaattcaagaacaggaaatgtgcccagagcctaggctgggaatgaatttgtaatttaacctttgtactctttgtaaacctctactgaagagttaagtataaaaattaattaagcagaaagtactctaaactcagctaataccttaagtaatacattttataaactatttatttatttggtaggtacagcttttttaaacacaaaaatagattagataaattccagcttggaacaagctagtgctggttcacaaggttatgctcacccttcaattaaaatcaaaatgactacaagacttgccatcagctctcttcaggaccactgctgggtcagaatcagaaaccttgggtgccatgaaatttttacaaaatttcaaatcaaagccaggctttgcagctagataatagatcacttgagtacgaaccacacatgtaagtgcacgtatatttgagttctcaatacaattaccctgatgggcaagaacccacaggtgagagcagaggcttggttcccctagagggccctggctggaggccccaacaccaaccagacgacaggagggccagactgctacccagtactgtacctcctgctccttcaagagcctccctaagggagaagaagatctatacttccactttgtttgctgcacatgtggcaacaagattgctaccctgatttgggacacttgagagaacttgaaaaaaatgaccacccttaaagccctagaaaaaagttgtatgtttgttaacagctatgctgcgctcactttgcattgtgtgttcttgaaagctctgtataaatcaaaattttgacgacacactaaatacactagagaaatacactatagaggaatccttttatagggctgaagactcctttggtaagaaaaatatgctgcattaggggcagctgcaagtttactatttctggggaagaaaagatcaaagataagagccaggtttgttttttaaagcaatcaatccaaacagtttgggtgtttgttagttgttacccctgaggggcttgaggtgtaactatatcagctataaaaatagcaattccatacatttaattaggttactttatatctttcactcttccccatggctgtaataatggagattgaatgagactaaggctaagcccaactccactcaaatccaagtcacacgtcaccttggctgcagtacagggaagctccgcacaccctggcttgggaaagtttcggccgatggagcccaagatgcagggcaaccatctactctttagggttctgatgattccactccagaaaggtgcatgaagaggtccccgagctctgtcatgtcgacatcttcattgttggggacatgccggctttctcggttctcgatgaaatcccagagccgcactgaattaaagaact

SEQ ID NO: 361319 - DNA, 2526 bp, Homo sapiens
  misc_feature (143)..(143): n is a, c, g, or t
  misc_feature (186)..(186): n is a, c, g, or t
  misc_feature (351)..(351): n is a, c, g, or t
  misc_feature (354)..(354): n is a, c, g, or t
ttttttttgtctcttggtggttccttgagggctttgatgatcagggcagaggcagaaggcaccacctcaatctgggcctgtctgttctgaatggtcagtttcactgtaatcctcaggcccttccagtcaccccgttgccttgnaactgtcatcaccaactttttttggagacagacccaggggccngatcttgggggccagggcagaagtggcaccgacttcacctccggtcacctcaggtatacgactttgatctcgttggggtcgaacttcggcggcatggtggaggcggctggtgtcggatgaacccggattcgggacgaccgaagaaagttctcgtgccgaattcgnaangcattccccatgctcaaggcccagccttctgtagatgcgcaagtggatgttgatggtagtacaaaaagcaggggcccagccccagctgttggctacatgagtatttagaggaagtaaggtagcaggcagtccagccctgatgtggagacacatgggattttggaaatcagcttctggaggaatgcatgtcacaggcgggactttcttcagagagtggtgcagcgccagacattttgcacataaggcaccaaacagcccaggactgccgagactctggccgcccgaaggagcctgctttggtactatggaacttttcttaggggacacgtcctcctttcacagcttctaaggtgtccagtgcattgggatggttttccaggcaaggcactcggccaatccgcatctcagccctctcagggagcagtcttccatcatgctgaattttgtcttccaggagctgcccctatggggcggggccgcagggccagccttgtttctctaacaaacaaacaaacaaacagccttgtttctctagtcacatcatgtgtatacaaggaagccaggaatacaggttttcttgatgatttgggttttaattttgtttttattgcacctgacaaaatacagttatctgatggtccctcaattatgttattttaataaaataaattaaatttaggtgtaatggctggctgttacctccttttaaagtaattctgagctcacaacttgaatgccccatttgttcaccctcttcaggagcagaattcaagaacaggaaatgtgcccagagcctaggctgggaatgaatttgtaatttaacctttgtactctttgtaaacctctactgaagagttaagtataaaaattaattaagcagaaagtactctaaactcagctaataccttaagtaatacattttataaactatttatttatttggtaggtacagcttttttaaacacaaaaatagattagataaattccagcttggaacaagctagtgctggttcacaaggttatgctcacccttcaattaaaatcaaaatgactacaagacttgccatcagctctcttcaggaccactgctgggtcagaatcagaaaccttgggtgccatgaaatttttacaaaatttcaaatcaaagccaggctttgcagctagataatagatcacttgagtacgaaccacacatgtaagtgcacgtatatttgagttctcaatacaattaccctgatgggcaagaacccacaggtgagagcagaggcttggttcccctagagggccctggctggaggccccaacaccaaccagacgacaggagggccagactgctacccagtactgtacctcctgctccttcaagagcctccctaagggagaagaagatctatacttccactttgtttgctgcacatgtggcaacaagattgctaccctgatttgggacacttgagagaacttgaaaaaaatgaccacccttaaagccctagaaaaaagttgtatgtttgttaacagctatgctgcgctcactttgcattgtgtgttcttgaaagctctgtataaatcaaaattttgacgacacactaaatacactagagaaatacactatagaggaatccttttatagggctgaagactcctttggtaagaaaaatatgctgcattaggggcagctgcaagtttactatttctggggaagaaaagatcaaagataagagccaggtttgttttttaaagcaatcaatccaaacagtttgggtgtttgttagttgttacccctgaggggcttgaggtgtaactatatcagctataaaaatagcaattccatacatttaattaggttactttatatctttcactcttccccatggctgtaataatggagattgaatgagactaaggctaagcccaactccactcaaatccaagtcacacgtcaccttggctgcagtacagggaagctccgcacaccctggcttgggaaagtttcggccgatggagcccaagatgcagggcaaccatctactctttagggttctgatgattccactccagaaaggtgcatgaagaggtccccgagctctgtcatgtcgacatcttcattgttggggacatgccggctttctcggttctcgatgaaatcccagagccgcactgaattaaagaact

SEQ ID NO: 361320 - DNA, 3335 bp, Homo sapiens
ggtcgggaggacgagcaccgagtcgagggctcgctcgtctgggccgcccgagagtcttaatcgcgggcgcttgggccgccatcttagatggcgggagtaagaggaaaacgattgtgaggcgggaacggctttctgctgccttttttgggccccgaaaagggtcagctggccgggctttggggcgcgtgccctgaggcgcggagcgcgtttgctacgatgcgggggctgctcggggctccgtcccctgggctggggacgcgccgaatgtgaccgcctcccgctccctcacccgccgcggggaggaggagcgggcgagaagctgccgccgaacgacaggacgttggggcggcctggctccctcaggtttaagaattgtttaagctgcatcaatggagcacatacagggagcttggaagacgatcagcaatggttttggattcaaagatgccgtgtttgatggctccagctgcatctctcctacaatagttcagcagtttggctatcagcgccgggcatcagatgatggcaaactcacagatccttctaagacaagcaacactatccgtgttttcttgccgaacaagcaaagaacagtggtcaatgtgcgaaatggaatgagcttgcatgactgccttatgaaagcactcaaggtgaggggcctgcaaccagagtgctgtgcagtgttcagacttctccacgaacacaaaggtaaaaaagcacgcttagattggaatactgatgctgcgtctttgattggagaagaacttcaagtagatttcctggatcatgttcccctcacaacacacaactttgctcggaagacgttcctgaagcttgccttctgtgacatctgtcagaaattcctgctcaatggatttcgatgtcagacttgtggctacaaatttcatgagcactgtagcaccaaagtacctactatgtgtgtggactggagtaacatcagacaactcttattgtttccaaattccactattggtgatagtggagtcccagcactaccttctttgactatgcgtcgtatgcgagagtctgtttccaggatgcctgttagttctcagcacagatattctacacctcacgccttcacctttaacacctccagtccctcatctgaaggttccctctcccagaggcagaggtcgacatccacacctaatgtccacatggtcagcaccaccctgcctgtggacagcaggatgattgaggatgcaattcgaagtcacagcgaatcagcctcaccttcagccctgtccagtagccccaacaatctgagcccaacaggctggtcacagccgaaaacccccgtgccagcacaaagagagcgggcaccagtatctgggacccaggagaaaaacaaaattaggcctcgtggacagagagattcaagctattattgggaaatagaagccagtgaagtgatgctgtccactcggattgggtcaggctcttttggaactgtttataagggtaaatggcacggagatgttgcagtaaagatcctaaaggttgtcgacccaaccccagagcaattccaggccttcaggaatgaggtggctgttctgcgcaaaacacggcatgtgaacattctgcttttcatggggtacatgacaaaggacaacctggcaattgtgacccagtggtgcgagggcagcagcctctacaaacacctgcatgtccaggagaccaagtttcagatgttccagctaattgacattgcccggcagacggctcagggaatggactatttgcatgcaaagaacatcatccatagagacatgaaatccaacaatatatttctccatgaaggcttaacagtgaaaattggagattttggtttggcaacagtaaagtcacgctggagtggttctcagcaggttgaacaacctactggctctgtcctctggatggccccagaggtgatccgaatgcaggataacaacccattcagtttccagtcggatgtctactcctatggcatcgtattgtatgaactgatgacgggggagcttccttattctcacatcaacaaccgagatcagatcatcttcatggtgggccgaggatatgcctccccagatcttagtaagctatataagaactgccccaaagcaatgaagaggctggtagctgactgtgtgaagaaagtaaaggaagagaggcctctttttccccagatcctgtcttccattgagctgctccaacactctctaccgaagatcaaccggagcgcttccgagccatccttgcatcgggcagcccacactgaggatatcaatgcttgcacgctgaccacgtccccgaggctgcctgtcttctagttgactttgcacctgtcttcaggctgccaggggaggaggagaagccagcaggcaccacttttctgctccctttctccagaggcagaacacatgttttcagagaagctgctgctaaggaccttctagactgctcacagggccttaacttcatgttgccttcttttctatccctttgggccctgggagaaggaagccatttgcagtgctggtgtgtcctgctccctccccacattccccatgctcaaggcccagccttctgtagatgcgcaagtggatgttgatggtagtacaaaaagcaggggcccagccccagctgttggctacatgagtatttagaggaagtaaggtagcaggcagtccagccctgatgtggagacacatgggattttggaaatcagcttctggaggaatgcatgtcacaggcgggactttcttcagagagtggtgcagcgccagacattttgcacataaggcaccaaacagcccaggactgccgagactctggccgcccgaaggagcctgctttggtactatggaacttttcttaggggacacgtcctcctttcacagcttctaaggtgtccagtgcattgggatggttttccaggcaaggcactcggccaatccgcatctcagccctctcagggagcagtcttccatcatgctgaattttgtcttccaggagctgcccctatggggcggggccgcagggccagccttgtttctctaacaaacaaacaaacaaacagccttgtttctctagtcacatcatgtgtatacaaggaagccaggaatacaggttttcttgtatacacatgatgtgactagagaaacctgtattcctggcttccttgtatacacatgatgtgactacaaggaagccaggaatacaggttttcttgatgatttgggttttaattttgtttttattgcacctgacaaaatacagttatctgatggtccctcaattatgttattttaataaaataaattaaattt

SEQ ID NO: 361321 - DNA, 2550 bp, Homo sapiens
ggtcgggaggacgagcaccgagtcgagggctcgctcgtctgggccgcccgagagtcttaatcgcgggcgcttgggccgccatcttagatggcgggagtaagaggaaaacgattgtgaggcgggaacggctttctgctgccttttttgggccccgaaaagggtcagctggccgggctttggggcgcgtgccctgaggcgcggagcgcgtttgctacgatgcgggggctgctcggggctccgtcccctgggctggggacgcgccgaatgtgaccgcctcccgctccctcacccgccgcggggaggaggagcgggcgagaagctgccgccgaacgacaggacgttggggcggcctggctccctcaggtttaagaattgtttaagctgcatcaatggagcacatacagggagcttggaagacgatcagcaatggttttggattcaaagatgccgtgtttgatggctccagctgcatctctcctacaatagttcagcagtttggctatcagcgccgggcatcagatgatggcaaactcacagatccttctaagacaagcaacactatccgtgttttcttgccgaacaagcaaagaacagtggtcaatgtgcgaaatggaatgagcttgcatgactgccttatgaaagcactcaaggtgaggggcctgcaaccagagtgctgtgcagtgttcagacttctccacgaacacaaaggtaaaaaagcacgcttagattggaatactgatgctgcgtctttgattggagaagaacttcaagtagatttcctggatcatgttcccctcacaacacacaactttgctcggaagacgttcctgaagcttgccttctgtgacatctgtcagaaattcctgctcaatggatttcgatgtcagacttgtggctacaaatttcatgagcactgtagcaccaaagtacctactatgtgtgtggactggagtaacatcagacaactcttattgtttccaaattccactattggtgatagtggagtcccagcactaccttctttgactatgcgtcgtatgcgagagtctgtttccaggatgcctgttagttctcagcacagatattctacacctcacgccttcacctttaacacctccagtccctcatctgaaggttccctctcccagaggcagaggtcgacatccacacctaatgtccacatggtcagcaccaccctgcctgtggacagcaggatgattgaggatgcaattcgaagtcacagcgaatcagcctcaccttcagccctgtccagtagccccaacaatctgagcccaacaggctggtcacagccgaaaacccccgtgccagcacaaagagagcgggcaccagtatctgggacccaggagaaaaacaaaattaggcctcgtggacagagagattcaagctattattgggaaatagaagccagtgaagtgatgctgtccactcggattgggtcaggctcttttggaactgtttataagggtaaatggcacggagatgttgcagtaaagatcctaaaggttgtcgacccaaccccagagcaattccaggccttcaggaatgaggtggctgttctgcgcaaaacacggcatgtgaacattctgcttttcatggggtacatgacaaaggacaacctggcaattgtgacccagtggtgcgagggcagcagcctctacaaacacctgcatgtccaggagaccaagtttcagatgttccagctaattgacattgcccggcagacggctcagggaatggactatttgcatgcaaagaacatcatccatagagacatgaaatccaacaatatatttctccatgaaggcttaacagtgcaggttgaacaacctactggctctgtcctctggatggtgagaatctgggctcccaccagcagtctctggtatagggcaaaaggaatgccttggagatttatgtgcaaacttaaagcgtttctgtacatttccccgaaatccacatgacccctagtgacagccagcctcagggcaattgtagattttcttgaggaagctgttgatcagaaccactgtgaagcttagtgtggagaggagttaataagctgggtgacagaaatgctgggtcttggtcctttaaagacaaggattcctgagctgttttaaccagtgcctgagttggagtcctttgggggaaaagctatgtggggactgaagaatggactcattcataactaatgaaagggacagcctggcccctagatgtctgtgaggcctgtcatatggtgataaatgcacttttgtcatatggtgatacatgtaggccccagaggtgatccgaatgcaggataacaacccattcagtttccagtcggatgtctactcctatggcatcgtattgtatgaactgatgacgggggagcttccttattctcacatcaacaaccgagatcaggtaagtctgtgctggtgcgaaaggacccaactcgtgggagccccctgggcctccgccagcctaagcagctagaagggttaggacttgttattatctgttgttcattcaccccccattagc

SEQ ID NO: 361322 - DNA, 4143 bp, Homo sapiens
  misc_feature (1679)..(1679): n is a, c, g, or t
  misc_feature (2392)..(2392): n is a, c, g, or t
  misc_feature (2430)..(2430): n is a, c, g, or t
  misc_feature (2914)..(2914): n is a, c, g, or t
  misc_feature (2920)..(2920): n is a, c, g, or t
  misc_feature (2945)..(2945): n is a, c, g, or t
cccattgtctctcgctgacgcgtcggagatccagctatcgtcttcactgctctgtgccgtcagctcctagaggcccagcctctgtggccctgtgacctgcaggtattaggagggtcacagctaggacgccgggaccccctggaagcctagaaatgggaccattgcaatttagagatgtggccatagaattctctctggaggagtggcattgcctggacgctgcacagcggaatctatatagggatgtgatgttagagaactacagaaacctgatcttccttggtattgttgtctctaaaccaaacctgatcacctgtctggagcaaggaaaaaaacctttaactatgaagaggcatgagatgattgccaaacccccagttatgtattctcattttgcccaagacctttggtcagagcagagcataaaagattctttccaaaaagtgatactaagaagatatgaaaaatgtagacatgacaatttacagttaaaaaaaggctgtgaaagtgtagatgagtgtccagtgcacaaaagaggttataatggacttaaacaatgtttggcaactacccagagaaaaatatttcaatgtgatgaatatgtgaaattcttgcataaattttcaaattcaaacaaacataagataagagatactggaaaaaaatcttttaaatgtatagaatatgggaaaacttttaaccagtcttcaacccgtactacatataagaaaattgatgctggagagaaacgctataaatgtgaagaatgtggtaaagcctataagcagtcctcacaccttactacacataagaaaattcatactggagagaaaccctacaaatgtgaagaatgtggcaaagcctataagcagtcctgtaaccttactacacataagataattcatactggagagaaaccctacagatgtagagaatgtggcaaagcttttaaccaccctgcaacccttttttcacataagaaaattcatactggagagaaaccatacaagtgtgataaatgtggcaaagcctttatttcatcctcaacccttactaaacatgagataattcatactggagagaaaccctacaaatgtgaggaatgtggcaaagcttttaaccgttcctcaaaccttactaaacataagagaattcatactggagatgtaccctacaaatgtgacgaatgtggcaaaacctttacctggtactcaagcctctctaaacataagagagctcatactggagagaaaccctacaagtgtgaagaatgtggcaaagcctttactgcattctcaactctaactgaacataagataattcatactggagagaaaccgtacaaatgtgaagaatgtggcaaagcttttaactggtcctcagcccttaataaacataagaaaattcatattagacagaaaccctgcatagtgaagaatgtggaaaatcttttaaatgttcctcaacccttaataagcataagataattcatactggagagaaaccgtatgaatgtgatgaatgtgggaaagcctttaactagccctggactctgactaaatatgagaatttatatggaacataaaccctacaaatataaagaatgtgacaaagctttttaaggaagttctcaacccttattacacataatttatactggacagaaaccctacaagtgngaagaatatggcaaagcctataacaacctgtcaactctttttgttttttgagatggagtttcactcttgtcacccaggctggagtgcaatggcacgatctcagctcactgcaacttctgcctcctggtatcaagccattctcctgcctcagcctcccgagtagctgggattactggtgcccaccaccatgcccagctaatttttgtatttttagtagagatggggtttcatcatgtttgccagactggtctccaactcctgacctcagatggtccacccacctcggcatcctaaagtgctgagatgacaggcatgagccacgacgcccagccacaagttctcaattcttaagagacatggcgataattcatgctgaagaggaactctacaaacctgaaagatgcaacagtgcttttaccaccacctccaacttttgtatacataaaaataaattatactaatgtgaaaccctggaaatgtatgaaatgagacaaagcgtttatatggttgccacacttgattgtagatggagtctcggtctttcacccaggctggagcgctgtggcacgatctcggctcactgcaacctccacctcccaggttcacaccattctcctgcctcagcttcctgagtagctgggactgcaggcacccgccaccatgcccggctaatttttttgtatttttagtagagatggggtttcactgtgttngccgggatggtcaatctcctgaccttgtgatccgcccnccttggccctccaaagtgctgggattacaggcgtgagccaccgcacctggccattatgccactaactttaacctatcccaccttaatcaagggtgtacttaaaagatggtaacaatatactgtttggtacgtagtggaataacatctctacttgtcactttgccagtggctttaaactgcaaatgagttgaattgttcccatagcttaaattttttttcttattgaaatctattactagtatttgtgggtatacagtatgtgtatatctttatgccttatatggcatattttgattcaggcctacaatatgtagtaattacattagggtaaagtatccatcacctctagcatttatcctttgaattacagtgtaattatacatttttaattattttaaaatgtacaattaaattgttactgactacaggtttatttttatggtcataataaaaattatacagaaaaataaataaaatatggccnggtgcngtggctcaggcctgtaatcccagcnctttccaaggcaggtggattgtctgaggtcaggagttcaagaccatcctggccaacatagtgaaaccccgtctgaggaagcgctcctttcgcgggggcactcgctgtggatgaataaagtacactgacacacattctgctctgccagtccagctgagggtccgagccgcttacaggctccaaggccaggcacggtggctcatgcctataattccagcactttggagggccaaggcaggcggatcatctgaggtcaggagttcacgcaaatcagggggcccgtgaaaggcaactgagcagggatccatgggaaagacaccctcagaggcacaagattctctcgttacctttcagtttgctgatacttcagttaaagtctcctgggaaacgtctgcattaggttcttcctctgtagttcttcttaccttgcctgtaaaacaaaacctatctagtgtctgcataggtttccacttcttgtccccacctgaggaatggaaagcaacggcacagtccttgctcatgttttggagtgaaaggagcttgaaggtcatgtgagctttgccaaggcttctcctggcctcatgtcagatacagctcctaactcccaagcagcctaccatagtgtcctcctttttttgcgtgtgtgatggggtttcgcacttgttgcccaggctggagtgcaatggtacaatctcggctcactgcaacctccgcctcccaggttcaagtgattcttctgcctcagcctctcaagtaactgggattacaggcatgcgccactaagggaggagaccactcctcatattgtcttatgcccaatttctgcttccaaagaaagaagaagtaaaaactaaaaggcagaaatgaaatccacaggcagacagcccagcgccacaccatgggcctggtagttaaagatcgagccctgacctaatcggttatgttatctacagattacagacattgtatagaaaagcactttgaaaatccctgtcctgttctgttccattctaattactggtgcatgcagccttcagtcacttactccctgcttgctcaatcgatcacgaccctctcatgcaaacccccttagagttgtaagcccttaagagggataggaattgctcactcagggagctcagtttttgagacgtgagtcttgccaatgctcccggccgaataaagcccttccttcttta

SEQ ID NO: 361323 - DNA, 1046 bp, Homo sapiens
cccattgtctctcgctgacgcgtcggagatccagctatcgtcttcactgctctgtgccgtcagctcctagaggcccagcctctgtggccctgtgacctgcaggtattaggagggtcacagctaggacgccgggaccccctggaagcctagaaatgggaccattgcaatttagagatgtggccatagaattctctctggaggagtggcattgcctggacgctgcacagcggaatctatatagggatgtgatgttagagaactacagaaacctgatcttccttggtattgttgtctctaaaccaaacctgatcacctgtctggagcaaggaaaaaaacctttaactatgaagaggcatgagatgattgccaaacccccaggtggtctatgaagaggaatgttttatgagctattgagaaggctatgtatcctgatgatgttgaggagtgttctctataccttcattagaaataattgttttttactgccttctagtcctctgttcccttactaatatactgtcttgttttattattattacagaaagtggggtattgaaatatcctactataattatattgctctattcaactttgttagtatttgctttatatatttgaaaccccaatttgagacacacacacgcacaaatacacacatggatcaacaaatttgtcataggtttccatgaattaatctatatattgtttaatgtccttcttttttgaagttttaacttaaagtacattttataaaatatgacagcttttgactttaacaatgtagcttgtgtaatattattttgacctcttctgctctcattttgttagtatttacatgaaatttctacttggtcttgccactttcagtcttttcttatcattagatctcagctgactcttgtaaaaaggcaagttgagtcttgatttttaaaattttttaatgagcctttttagaagtatgtctcttgattggaaagataattatatttaaatagttttctgaaagagaaaaacttactgttaataaaataattgttttgattctt

SEQ ID NO: 361324 - DNA, 322 bp, Homo sapiens
ctgtttttatttcttcaaaaatacaatgagaaatttgaaaaatattgcattaaatctataggttaaattgagcggtatagacatcttcacaatattaattatttcctttttgattgtttttgagatggagttaaattcacccgcctcggcctcccaaagtgctggggtaacaggcatgagccaccgcacccagcctgaaacaggtttttaatcctgtctacgtgagtagtcataaaaattctcctaatttcaacatctatttatttatgaatctatattatttttgtgtgggggaaacacataacaaaatgtgttatctgtc

SEQ ID NO: 361325 - DNA, 5492 bp, Homo sapiens
  misc_feature (1679)..(1679): n is a, c, g, or t
  misc_feature (3741)..(3741): n is a, c, g, or t
  misc_feature (3779)..(3779): n is a, c, g, or t
  misc_feature (4263)..(4263): n is a, c, g, or t
  misc_feature (4269)..(4269): n is a, c, g, or t
  misc_feature (4294)..(4294): n is a, c, g, or t
cccattgtctctcgctgacgcgtcggagatccagctatcgtcttcactgctctgtgccgtcagctcctagaggcccagcctctgtggccctgtgacctgcaggtattaggagggtcacagctaggacgccgggaccccctggaagcctagaaatgggaccattgcaatttagagatgtggccatagaattctctctggaggagtggcattgcctggacgctgcacagcggaatctatatagggatgtgatgttagagaactacagaaacctgatcttccttggtattgttgtctctaaaccaaacctgatcacctgtctggagcaaggaaaaaaacctttaactatgaagaggcatgagatgattgccaaacccccagttatgtattctcattttgcccaagacctttggtcagagcagagcataaaagattctttccaaaaagtgatactaagaagatatgaaaaatgtagacatgacaatttacagttaaaaaaaggctgtgaaagtgtagatgagtgtccagtgcacaaaagaggttataatggacttaaacaatgtttggcaactacccagagaaaaatatttcaatgtgatgaatatgtgaaattcttgcataaattttcaaattcaaacaaacataagataagagatactggaaaaaaatcttttaaatgtatagaatatgggaaaacttttaaccagtcttcaacccgtactacatataagaaaattgatgctggagagaaacgctataaatgtgaagaatgtggtaaagcctataagcagtcctcacaccttactacacataagaaaattcatactggagagaaaccctacaaatgtgaagaatgtggcaaagcctataagcagtcctgtaaccttactacacataagataattcatactggagagaaaccctacagatgtagagaatgtggcaaagcttttaaccaccctgcaacccttttttcacataagaaaattcatactggagagaaaccatacaagtgtgataaatgtggcaaagcctttatttcatcctcaacccttactaaacatgagataattcatactggagagaaaccctacaaatgtgaggaatgtggcaaagcttttaaccgttcctcaaaccttactaaacataagagaattcatactggagatgtaccctacaaatgtgacgaatgtggcaaaacctttacctggtactcaagcctctctaaacataagagagctcatactggagagaaaccctacaagtgtgaagaatgtggcaaagcctttactgcattctcaactctaactgaacataagataattcatactggagagaaaccgtacaaatgtgaagaatgtggcaaagcttttaactggtcctcagcccttaataaacataagaaaattcatattagacagaaaccctgcatagtgaagaatgtggaaaatcttttaaatgttcctcaacccttaataagcataagataattcatactggagagaaaccgtatgaatgtgatgaatgtgggaaagcctttaactagccctggactctgactaaatatgagaatttatatggaacataaaccctacaaatataaagaatgtgacaaagctttttaaggaagttctcaacccttattacacataatttatactggacagaaaccctacaagtgngaagaatatggcaaagcctataacaacctgtcaactctttttgttttttgagatggagtttcactcttgtcacccaggctggagtgcaatggcacgatctcagctcactgcaacttctgcctcctggtatcaagccattctcctgcctcagcctcccgagtagctgggattactggtgcccaccaccatgcccagctaatttttgtatttttagtagagatggggtttcatcatgtttgccagactggtctccaactcctgacctcagatggtccacccacctcggcatcctaaagtgctgagatgacaggcatgagccacgacgcccagccacaagttctcaattcttaagagacatggcgataattcatgctgaagaggaactctacaaacctgaaagatgcaacagtgcttttaccaccacctccaacttttgtatacataaaaataaattatactaatgtgaaaccctggaaatgtatgaaatgagacaaagcgtttatatggttgccacacttgattgtaggtaagagaattaatgctgccaaaactcctacaagtgtgaagaatgtggcaaaacttttgagtgcttacaccttatttcacaggaaagcttttatccttgagaaaaatcgtacagatataaagaatatggaaacgccattaacgcccactcacatctcaacagaaggttcatagttaataaaagcaataaaagtgcaattactgtcaaaaaatctttcagaaaatataagcctttaaagaagaatatttattctgaaatcagctattacaaatataagggggggttgtagtacctttacttgtatcacagatcttgttgcacacattgtgtactagaggaaaacctgaagcagttgctccagctttattcaacaacatggaatttatattggagaagagtcctgcaaatataatgaatttggaaagactttttttttcaaaatctatagcttagaaaacatcagagagtttatactaaagtatatttttgcagatgtaaatatgaaaaaaatatttaattcaaaattgattttacgtaaatatgagaatttacactagaataaggcactgacacttcagacattacactaaatcagagtattgagtataaaaatgaatccacaactaaagctgtttttgtatataactttaaaagggagattttctgaagcattgtaatttcattgaaagtgtacttgtttcttgaaaaaaatttttgaacagtgaataatgatgtaatacaactttcaaatttctttacgctgttattttattcctattgtggtcacatgtgaaagcatgtgatcaattgttgctgcatcagggatattacagattcttttttattgggtattatgaccttttctataaaagaataaggacattaaaatgtaagatgcatgataaaaatgtaagtggagaggctctttgtagttaacttatattaagtaatgtataaggtgggggttctcatttgtataatcctagcctatgacttaatgttgatgttttgctttgtcttttggatggcctaacctacattaacatgttggcagaccattttaaaacttttttttttcaaaaattataatgaattactttattaataaagatttttaaaaagtgggggttcagagtaatagttttctacattatagtgagaaaaattacagttaaaagtattaaatgagaatattattttactaattgtacttttatgtaatcgaatgcagtatatttaaaaattgttagatgatgtgtgaacttaatttcattttttataccatgttaagactattctgcgtttaatgaagcattattatgccactaactttttttctttttttttgaatggagtctcggtctttcacccaggctggagcgctgtggcacgatctcggctcactgcaacctccacctcccaggttcacaccattctcctgcctcagcttcctgagtagctgggactgcaggcacccgccaccatgcccggctaatttttttgtatttttagtagagatggggtttcactgtgttngccgggatggtcaatctcctgaccttgtgatccgcccnccttggccctccaaagtgctgggattacaggcgtgagccaccgcacctggccattatgccactaactttaacctatcccaccttaatcaagggtgtacttaaaagatggtaacaatatactgtttggtacgtagtggaataacatctctacttgtcactttgccagtggctttaaactgcaaatgagttgaattgttcccatagcttaaattttttttcttattgaaatctattactagtatttgtgggtatacagtatgtgtatatctttatgccttatatggcatattttgattcaggcctacaatatgtagtaattacattagggtaaagtatccatcacctctagcatttatcctttgaattacagtgtaattatacatttttaattattttaaaatgtacaattaaattgttactgactacaggtttatttttatggtcataataaaaattatacagaaaaataaataaaatatggccnggtgcngtggctcaggcctgtaatcccagcnctttccaaggcaggtggattgtctgaggtcaggagttcaagaccatcctggccaacatagtgaaaccccgtctgaggaagcgctcctttcgcgggggcactcgctgtggatgaataaagtacactgacacacattctgctctgccagtccagctgagggtccgagccgcttacaggctccaaggccaggcacggtggctcatgcctataattccagcactttggagggccaaggcaggcggatcatctgaggtcaggagttcacgcaaatcagggggcccgtgaaaggcaactgagcagggatccatgggaaagacaccctcagaggcacaagattctctcgttacctttcagtttgctgatacttcagttaaagtctcctgggaaacgtctgcattaggttcttcctctgtagttcttcttaccttgcctgtaaaacaaaacctatctagtgtctgcataggtttccacttcttgtccccacctgaggaatggaaagcaacggcacagtccttgctcatgttttggagtgaaaggagcttgaaggtcatgtgagctttgccaaggcttctcctggcctcatgtcagatacagctcctaactcccaagcagcctaccatagtgtcctcctttttttgcgtgtgtgatggggtttcgcacttgttgcccaggctggagtgcaatggtacaatctcggctcactgcaacctccgcctcccaggttcaagtgattcttctgcctcagcctctcaagtaactgggattacaggcatgcgccactaagggaggagaccactcctcatattgtcttatgcccaatttctgcttccaaagaaagaagaagtaaaaactaaaaggcagaaatgaaatccacaggcagacagcccagcgccacaccatgggcctggtagttaaagatcgagccctgacctaatcggttatgttatctacagattacagacattgtatagaaaagcactttgaaaatccctgtcctgttctgttccattctaattactggtgcatgcagccttcagtcacttactccctgcttgctcaatcgatcacgaccctctcatgcaaacccccttagagttgtaagcccttaagagggataggaattgctcactcagggagctcagtttttgagacgtgagtcttgccaatgctcccggccgaataaagcccttccttcttta

SEQ ID NO: 361326 - DNA, 3329 bp, Homo sapiens
  misc_feature (1679)..(1679): n is a, c, g, or t
cccattgtctctcgctgacgcgtcggagatccagctatcgtcttcactgctctgtgccgtcagctcctagaggcccagcctctgtggccctgtgacctgcaggtattaggagggtcacagctaggacgccgggaccccctggaagcctagaaatgggaccattgcaatttagagatgtggccatagaattctctctggaggagtggcattgcctggacgctgcacagcggaatctatatagggatgtgatgttagagaactacagaaacctgatcttccttggtattgttgtctctaaaccaaacctgatcacctgtctggagcaaggaaaaaaacctttaactatgaagaggcatgagatgattgccaaacccccagttatgtattctcattttgcccaagacctttggtcagagcagagcataaaagattctttccaaaaagtgatactaagaagatatgaaaaatgtagacatgacaatttacagttaaaaaaaggctgtgaaagtgtagatgagtgtccagtgcacaaaagaggttataatggacttaaacaatgtttggcaactacccagagaaaaatatttcaatgtgatgaatatgtgaaattcttgcataaattttcaaattcaaacaaacataagataagagatactggaaaaaaatcttttaaatgtatagaatatgggaaaacttttaaccagtcttcaacccgtactacatataagaaaattgatgctggagagaaacgctataaatgtgaagaatgtggtaaagcctataagcagtcctcacaccttactacacataagaaaattcatactggagagaaaccctacaaatgtgaagaatgtggcaaagcctataagcagtcctgtaaccttactacacataagataattcatactggagagaaaccctacagatgtagagaatgtggcaaagcttttaaccaccctgcaacccttttttcacataagaaaattcatactggagagaaaccatacaagtgtgataaatgtggcaaagcctttatttcatcctcaacccttactaaacatgagataattcatactggagagaaaccctacaaatgtgaggaatgtggcaaagcttttaaccgttcctcaaaccttactaaacataagagaattcatactggagatgtaccctacaaatgtgacgaatgtggcaaaacctttacctggtactcaagcctctctaaacataagagagctcatactggagagaaaccctacaagtgtgaagaatgtggcaaagcctttactgcattctcaactctaactgaacataagataattcatactggagagaaaccgtacaaatgtgaagaatgtggcaaagcttttaactggtcctcagcccttaataaacataagaaaattcatattagacagaaaccctgcatagtgaagaatgtggaaaatcttttaaatgttcctcaacccttaataagcataagataattcatactggagagaaaccgtatgaatgtgatgaatgtgggaaagcctttaactagccctggactctgactaaatatgagaatttatatggaacataaaccctacaaatataaagaatgtgacaaagctttttaaggaagttctcaacccttattacacataatttatactggacagaaaccctacaagtgngaagaatatggcaaagcctataacaacctgtcaactctttttgttttttgagatggagtttcactcttgtcacccaggctggagtgcaatggcacgatctcagctcactgcaacttctgcctcctggtatcaagccattctcctgcctcagcctcccgagtagctgggattactggtgcccaccaccatgcccagctaatttttgtatttttagtagagatggggtttcatcatgtttgccagactggtctccaactcctgacctcagatggtccacccacctcggcatcctaaagtgctgagatgacaggcatgagccacgacgcccagccacaagttctcaattcttaagagacatggcgataattcatgctgaagaggaactctacaaacctgaaagatgcaacagtgcttttaccaccacctccaacttttgtatacataaaaataaattatactaatgtgaaaccctggaaatgtatgaaatgagacaaagcgtttatatggttgccacacttgattgtaggtaagagaattaatgctgccaaaactcctacaagtgtgaagaatgtggcaaaacttttgagtgcttacaccttatttcacaggaaagcttttatccttgagaaaaatcgtacagatataaagaatatggaaacgccattaacgcccactcacatctcaacagaaggttcatagttaataaaagcaataaaagtgcaattactgtcaaaaaatctttcagaaaatataagcctttaaagaagaatatttattctgaaatcagctattacaaatataagggggggttgtagtacctttacttgtatcacagatcttgttgcacacattgtgtactagaggaaaacctgaagcagttgctccagctttattcaacaacatggaatttatattggagaagagtcctgcaaatataatgaatttggaaagactttttttttcaaaatctatagcttagaaaacatcagagagtttatactaaagtatatttttgcagatgtaaatatgaaaaaaatatttaattcaaaattgattttacgtaaatatgagaatttacactagaataaggcactgacacttcagacattacactaaatcagagtattgagtataaaaatgaatccacaactaaagctgtttttgtatataactttaaaagggagattttctgaagcattgtaatttcattgaaagtgtacttgtttcttgaaaaaaatttttgaacagtgaataatgatgtaatacaactttcaaatttctttacgctgttattttattcctattgtggtcacatgtgaaagcatgtgatcaattgttgctgcatcagggatattacagattcttttttattgggtattatgaccttttctataaaagaataaggacattaaaatgtaagatgcatgataaaaatgtaagtggagaggctctttgtagttaacttatattaagtaatgtataaggtgggggttctcatttgtataatcctagcctatgacttaatgttgatgttttgctttgtcttttggatggcctaacctacattaacatgttggcagaccattttaaaacttttttttttcaaaaattataatgaattactttattaataaagatttttaaaaagtg

SEQ ID NO: 361327 - DNA, 5364 bp, Homo sapiens
  misc_feature (1551)..(1551): n is a, c, g, or t
  misc_feature (3613)..(3613): n is a, c, g, or t
  misc_feature (3651)..(3651): n is a, c, g, or t
  misc_feature (4135)..(4135): n is a, c, g, or t
  misc_feature (4141)..(4141): n is a, c, g, or t
  misc_feature (4166)..(4166): n is a, c, g, or t
tctatgtggctctttgcattgtgctcacctggagccctttacacacttaactaatttataaattttttacaaatgtattttggtcagtatgtttttgttacagttatatatccaggaagaaattacagcttgtggtattttgctgtgtcatcttgcttacgtagtttgtataattttataggttagatttgtgaagtatatttatctgagtctagcaattgaagtcatgtgtttttattgtttctttcagttatgtattctcattttgcccaagacctttggtcagagcagagcataaaagattctttccaaaaagtgatactaagaagatatgaaaaatgtagacatgacaatttacagttaaaaaaaggctgtgaaagtgtagatgagtgtccagtgcacaaaagaggttataatggacttaaacaatgtttggcaactacccagagaaaaatatttcaatgtgatgaatatgtgaaattcttgcataaattttcaaattcaaacaaacataagataagagatactggaaaaaaatcttttaaatgtatagaatatgggaaaacttttaaccagtcttcaacccgtactacatataagaaaattgatgctggagagaaacgctataaatgtgaagaatgtggtaaagcctataagcagtcctcacaccttactacacataagaaaattcatactggagagaaaccctacaaatgtgaagaatgtggcaaagcctataagcagtcctgtaaccttactacacataagataattcatactggagagaaaccctacagatgtagagaatgtggcaaagcttttaaccaccctgcaacccttttttcacataagaaaattcatactggagagaaaccatacaagtgtgataaatgtggcaaagcctttatttcatcctcaacccttactaaacatgagataattcatactggagagaaaccctacaaatgtgaggaatgtggcaaagcttttaaccgttcctcaaaccttactaaacataagagaattcatactggagatgtaccctacaaatgtgacgaatgtggcaaaacctttacctggtactcaagcctctctaaacataagagagctcatactggagagaaaccctacaagtgtgaagaatgtggcaaagcctttactgcattctcaactctaactgaacataagataattcatactggagagaaaccgtacaaatgtgaagaatgtggcaaagcttttaactggtcctcagcccttaataaacataagaaaattcatattagacagaaaccctgcatagtgaagaatgtggaaaatcttttaaatgttcctcaacccttaataagcataagataattcatactggagagaaaccgtatgaatgtgatgaatgtgggaaagcctttaactagccctggactctgactaaatatgagaatttatatggaacataaaccctacaaatataaagaatgtgacaaagctttttaaggaagttctcaacccttattacacataatttatactggacagaaaccctacaagtgngaagaatatggcaaagcctataacaacctgtcaactctttttgttttttgagatggagtttcactcttgtcacccaggctggagtgcaatggcacgatctcagctcactgcaacttctgcctcctggtatcaagccattctcctgcctcagcctcccgagtagctgggattactggtgcccaccaccatgcccagctaatttttgtatttttagtagagatggggtttcatcatgtttgccagactggtctccaactcctgacctcagatggtccacccacctcggcatcctaaagtgctgagatgacaggcatgagccacgacgcccagccacaagttctcaattcttaagagacatggcgataattcatgctgaagaggaactctacaaacctgaaagatgcaacagtgcttttaccaccacctccaacttttgtatacataaaaataaattatactaatgtgaaaccctggaaatgtatgaaatgagacaaagcgtttatatggttgccacacttgattgtaggtaagagaattaatgctgccaaaactcctacaagtgtgaagaatgtggcaaaacttttgagtgcttacaccttatttcacaggaaagcttttatccttgagaaaaatcgtacagatataaagaatatggaaacgccattaacgcccactcacatctcaacagaaggttcatagttaataaaagcaataaaagtgcaattactgtcaaaaaatctttcagaaaatataagcctttaaagaagaatatttattctgaaatcagctattacaaatataagggggggttgtagtacctttacttgtatcacagatcttgttgcacacattgtgtactagaggaaaacctgaagcagttgctccagctttattcaacaacatggaatttatattggagaagagtcctgcaaatataatgaatttggaaagactttttttttcaaaatctatagcttagaaaacatcagagagtttatactaaagtatatttttgcagatgtaaatatgaaaaaaatatttaattcaaaattgattttacgtaaatatgagaatttacactagaataaggcactgacacttcagacattacactaaatcagagtattgagtataaaaatgaatccacaactaaagctgtttttgtatataactttaaaagggagattttctgaagcattgtaatttcattgaaagtgtacttgtttcttgaaaaaaatttttgaacagtgaataatgatgtaatacaactttcaaatttctttacgctgttattttattcctattgtggtcacatgtgaaagcatgtgatcaattgttgctgcatcagggatattacagattcttttttattgggtattatgaccttttctataaaagaataaggacattaaaatgtaagatgcatgataaaaatgtaagtggagaggctctttgtagttaacttatattaagtaatgtataaggtgggggttctcatttgtataatcctagcctatgacttaatgttgatgttttgctttgtcttttggatggcctaacctacattaacatgttggcagaccattttaaaacttttttttttcaaaaattataatgaattactttattaataaagatttttaaaaagtgggggttcagagtaatagttttctacattatagtgagaaaaattacagttaaaagtattaaatgagaatattattttactaattgtacttttatgtaatcgaatgcagtatatttaaaaattgttagatgatgtgtgaacttaatttcattttttataccatgttaagactattctgcgtttaatgaagcattattatgccactaactttttttctttttttttgaatggagtctcggtctttcacccaggctggagcgctgtggcacgatctcggctcactgcaacctccacctcccaggttcacaccattctcctgcctcagcttcctgagtagctgggactgcaggcacccgccaccatgcccggctaatttttttgtatttttagtagagatggggtttcactgtgttngccgggatggtcaatctcctgaccttgtgatccgcccnccttggccctccaaagtgctgggattacaggcgtgagccaccgcacctggccattatgccactaactttaacctatcccaccttaatcaagggtgtacttaaaagatggtaacaatatactgtttggtacgtagtggaataacatctctacttgtcactttgccagtggctttaaactgcaaatgagttgaattgttcccatagcttaaattttttttcttattgaaatctattactagtatttgtgggtatacagtatgtgtatatctttatgccttatatggcatattttgattcaggcctacaatatgtagtaattacattagggtaaagtatccatcacctctagcatttatcctttgaattacagtgtaattatacatttttaattattttaaaatgtacaattaaattgttactgactacaggtttatttttatggtcataataaaaattatacagaaaaataaataaaatatggccnggtgcngtggctcaggcctgtaatcccagcnctttccaaggcaggtggattgtctgaggtcaggagttcaagaccatcctggccaacatagtgaaaccccgtctgaggaagcgctcctttcgcgggggcactcgctgtggatgaataaagtacactgacacacattctgctctgccagtccagctgagggtccgagccgcttacaggctccaaggccaggcacggtggctcatgcctataattccagcactttggagggccaaggcaggcggatcatctgaggtcaggagttcacgcaaatcagggggcccgtgaaaggcaactgagcagggatccatgggaaagacaccctcagaggcacaagattctctcgttacctttcagtttgctgatacttcagttaaagtctcctgggaaacgtctgcattaggttcttcctctgtagttcttcttaccttgcctgtaaaacaaaacctatctagtgtctgcataggtttccacttcttgtccccacctgaggaatggaaagcaacggcacagtccttgctcatgttttggagtgaaaggagcttgaaggtcatgtgagctttgccaaggcttctcctggcctcatgtcagatacagctcctaactcccaagcagcctaccatagtgtcctcctttttttgcgtgtgtgatggggtttcgcacttgttgcccaggctggagtgcaatggtacaatctcggctcactgcaacctccgcctcccaggttcaagtgattcttctgcctcagcctctcaagtaactgggattacaggcatgcgccactaagggaggagaccactcctcatattgtcttatgcccaatttctgcttccaaagaaagaagaagtaaaaactaaaaggcagaaatgaaatccacaggcagacagcccagcgccacaccatgggcctggtagttaaagatcgagccctgacctaatcggttatgttatctacagattacagacattgtatagaaaagcactttgaaaatccctgtcctgttctgttccattctaattactggtgcatgcagccttcagtcacttactccctgcttgctcaatcgatcacgaccctctcatgcaaacccccttagagttgtaagcccttaagagggataggaattgctcactcagggagctcagtttttgagacgtgagtcttgccaatgctcccggccgaataaagcccttccttcttta

SEQ ID NO: 361328 - DNA, 4956 bp, Homo sapiens
  misc_feature (1679)..(1679): n is a, c, g, or t
  misc_feature (3741)..(3741): n is a, c, g, or t
  misc_feature (3779)..(3779): n is a, c, g, or t
  misc_feature (4263)..(4263): n is a, c, g, or t
  misc_feature (4269)..(4269): n is a, c, g, or t
  misc_feature (4294)..(4294): n is a, c, g, or t
cccattgtctctcgctgacgcgtcggagatccagctatcgtcttcactgctctgtgccgtcagctcctagaggcccagcctctgtggccctgtgacctgcaggtattaggagggtcacagctaggacgccgggaccccctggaagcctagaaatgggaccattgcaatttagagatgtggccatagaattctctctggaggagtggcattgcctggacgctgcacagcggaatctatatagggatgtgatgttagagaactacagaaacctgatcttccttggtattgttgtctctaaaccaaacctgatcacctgtctggagcaaggaaaaaaacctttaactatgaagaggcatgagatgattgccaaacccccagttatgtattctcattttgcccaagacctttggtcagagcagagcataaaagattctttccaaaaagtgatactaagaagatatgaaaaatgtagacatgacaatttacagttaaaaaaaggctgtgaaagtgtagatgagtgtccagtgcacaaaagaggttataatggacttaaacaatgtttggcaactacccagagaaaaatatttcaatgtgatgaatatgtgaaattcttgcataaattttcaaattcaaacaaacataagataagagatactggaaaaaaatcttttaaatgtatagaatatgggaaaacttttaaccagtcttcaacccgtactacatataagaaaattgatgctggagagaaacgctataaatgtgaagaatgtggtaaagcctataagcagtcctcacaccttactacacataagaaaattcatactggagagaaaccctacaaatgtgaagaatgtggcaaagcctataagcagtcctgtaaccttactacacataagataattcatactggagagaaaccctacagatgtagagaatgtggcaaagcttttaaccaccctgcaacccttttttcacataagaaaattcatactggagagaaaccatacaagtgtgataaatgtggcaaagcctttatttcatcctcaacccttactaaacatgagataattcatactggagagaaaccctacaaatgtgaggaatgtggcaaagcttttaaccgttcctcaaaccttactaaacataagagaattcatactggagatgtaccctacaaatgtgacgaatgtggcaaaacctttacctggtactcaagcctctctaaacataagagagctcatactggagagaaaccctacaagtgtgaagaatgtggcaaagcctttactgcattctcaactctaactgaacataagataattcatactggagagaaaccgtacaaatgtgaagaatgtggcaaagcttttaactggtcctcagcccttaataaacataagaaaattcatattagacagaaaccctgcatagtgaagaatgtggaaaatcttttaaatgttcctcaacccttaataagcataagataattcatactggagagaaaccgtatgaatgtgatgaatgtgggaaagcctttaactagccctggactctgactaaatatgagaatttatatggaacataaaccctacaaatataaagaatgtgacaaagctttttaaggaagttctcaacccttattacacataatttatactggacagaaaccctacaagtgngaagaatatggcaaagcctataacaacctgtcaactctttttgttttttgagatggagtttcactcttgtcacccaggctggagtgcaatggcacgatctcagctcactgcaacttctgcctcctggtatcaagccattctcctgcctcagcctcccgagtagctgggattactggtgcccaccaccatgcccagctaatttttgtatttttagtagagatggggtttcatcatgtttgccagactggtctccaactcctgacctcagatggtccacccacctcggcatcctaaagtgctgagatgacaggcatgagccacgacgcccagccacaagttctcaattcttaagagacatggcgataattcatgctgaagaggaactctacaaacctgaaagatgcaacagtgcttttaccaccacctccaacttttgtatacataaaaataaattatactaatgtgaaaccctggaaatgtatgaaatgagacaaagcgtttatatggttgccacacttgattgtaggtaagagaattaatgctgccaaaactcctacaagtgtgaagaatgtggcaaaacttttgagtgcttacaccttatttcacaggaaagcttttatccttgagaaaaatcgtacagatataaagaatatggaaacgccattaacgcccactcacatctcaacagaaggttcatagttaataaaagcaataaaagtgcaattactgtcaaaaaatctttcagaaaatataagcctttaaagaagaatatttattctgaaatcagctattacaaatataagggggggttgtagtacctttacttgtatcacagatcttgttgcacacattgtgtactagaggaaaacctgaagcagttgctccagctttattcaacaacatggaatttatattggagaagagtcctgcaaatataatgaatttggaaagactttttttttcaaaatctatagcttagaaaacatcagagagtttatactaaagtatatttttgcagatgtaaatatgaaaaaaatatttaattcaaaattgattttacgtaaatatgagaatttacactagaataaggcactgacacttcagacattacactaaatcagagtattgagtataaaaatgaatccacaactaaagctgtttttgtatataactttaaaagggagattttctgaagcattgtaatttcattgaaagtgtacttgtttcttgaaaaaaatttttgaacagtgaataatgatgtaatacaactttcaaatttctttacgctgttattttattcctattgtggtcacatgtgaaagcatgtgatcaattgttgctgcatcagggatattacagattcttttttattgggtattatgaccttttctataaaagaataaggacattaaaatgtaagatgcatgataaaaatgtaagtggagaggctctttgtagttaacttatattaagtaatgtataaggtgggggttctcatttgtataatcctagcctatgacttaatgttgatgttttgctttgtcttttggatggcctaacctacattaacatgttggcagaccattttaaaacttttttttttcaaaaattataatgaattactttattaataaagatttttaaaaagtgggggttcagagtaatagttttctacattatagtgagaaaaattacagttaaaagtattaaatgagaatattattttactaattgtacttttatgtaatcgaatgcagtatatttaaaaattgttagatgatgtgtgaacttaatttcattttttataccatgttaagactattctgcgtttaatgaagcattattatgccactaactttttttctttttttttgaatggagtctcggtctttcacccaggctggagcgctgtggcacgatctcggctcactgcaacctccacctcccaggttcacaccattctcctgcctcagcttcctgagtagctgggactgcaggcacccgccaccatgcccggctaatttttttgtatttttagtagagatggggtttcactgtgttngccgggatggtcaatctcctgaccttgtgatccgcccnccttggccctccaaagtgctgggattacaggcgtgagccaccgcacctggccattatgccactaactttaacctatcccaccttaatcaagggtgtacttaaaagatggtaacaatatactgtttggtacgtagtggaataacatctctacttgtcactttgccagtggctttaaactgcaaatgagttgaattgttcccatagcttaaattttttttcttattgaaatctattactagtatttgtgggtatacagtatgtgtatatctttatgccttatatggcatattttgattcaggcctacaatatgtagtaattacattagggtaaagtatccatcacctctagcatttatcctttgaattacagtgtaattatacatttttaattattttaaaatgtacaattaaattgttactgactacaggtttatttttatggtcataataaaaattatacagaaaaataaataaaatatggccnggtgcngtggctcaggcctgtaatcccagcnctttccaaggcaggtggattgtctgaggtcaggagttcaagaccatcctggccaacatagtgaaaccccgtctgaggaagcgctcctttcgcgggggcactcgctgtggatgaataaagtacactgacacacattctgctctgccagtccagctgagggtccgagccgcttacaggctccaaggccaggcacggtggctcatgcctataattccagcactttggagggccaaggcaggcggatcatctgaggtcaggagttcacgcaaatcagggggcccaatttctgcttccaaagaaagaagaagtaaaaactaaaaggcagaaatgaaatccacaggcagacagcccagcgccacaccatgggcctggtagttaaagatcgagccctgacctaatcggttatgttatctacagattacagacattgtatagaaaagcactttgaaaatccctgtcctgttctgttccattctaattactggtgcatgcagccttcagtcacttactccctgcttgctcaatcgatcacgaccctctcatgcaaacccccttagagttgtaagcccttaagagggataggaattgctcactcagggagctcagtttttgagacgtgagtcttgccaatgctcccggccgaataaagcccttccttcttta

SEQ ID NO: 361329 - DNA, 4930 bp, Homo sapiens
  misc_feature (1679)..(1679): n is a, c, g, or t
  misc_feature (3741)..(3741): n is a, c, g, or t
  misc_feature (3779)..(3779): n is a, c, g, or t
  misc_feature (4263)..(4263): n is a, c, g, or t
  misc_feature (4269)..(4269): n is a, c, g, or t
  misc_feature (4294)..(4294): n is a, c, g, or t
cccattgtctctcgctgacgcgtcggagatccagctatcgtcttcactgctctgtgccgtcagctcctagaggcccagcctctgtggccctgtgacctgcaggtattaggagggtcacagctaggacgccgggaccccctggaagcctagaaatgggaccattgcaatttagagatgtggccatagaattctctctggaggagtggcattgcctggacgctgcacagcggaatctatatagggatgtgatgttagagaactacagaaacctgatcttccttggtattgttgtctctaaaccaaacctgatcacctgtctggagcaaggaaaaaaacctttaactatgaagaggcatgagatgattgccaaacccccagttatgtattctcattttgcccaagacctttggtcagagcagagcataaaagattctttccaaaaagtgatactaagaagatatgaaaaatgtagacatgacaatttacagttaaaaaaaggctgtgaaagtgtagatgagtgtccagtgcacaaaagaggttataatggacttaaacaatgtttggcaactacccagagaaaaatatttcaatgtgatgaatatgtgaaattcttgcataaattttcaaattcaaacaaacataagataagagatactggaaaaaaatcttttaaatgtatagaatatgggaaaacttttaaccagtcttcaacccgtactacatataagaaaattgatgctggagagaaacgctataaatgtgaagaatgtggtaaagcctataagcagtcctcacaccttactacacataagaaaattcatactggagagaaaccctacaaatgtgaagaatgtggcaaagcctataagcagtcctgtaaccttactacacataagataattcatactggagagaaaccctacagatgtagagaatgtggcaaagcttttaaccaccctgcaacccttttttcacataagaaaattcatactggagagaaaccatacaagtgtgataaatgtggcaaagcctttatttcatcctcaacccttactaaacatgagataattcatactggagagaaaccctacaaatgtgaggaatgtggcaaagcttttaaccgttcctcaaaccttactaaacataagagaattcatactggagatgtaccctacaaatgtgacgaatgtggcaaaacctttacctggtactcaagcctctctaaacataagagagctcatactggagagaaaccctacaagtgtgaagaatgtggcaaagcctttactgcattctcaactctaactgaacataagataattcatactggagagaaaccgtacaaatgtgaagaatgtggcaaagcttttaactggtcctcagcccttaataaacataagaaaattcatattagacagaaaccctgcatagtgaagaatgtggaaaatcttttaaatgttcctcaacccttaataagcataagataattcatactggagagaaaccgtatgaatgtgatgaatgtgggaaagcctttaactagccctggactctgactaaatatgagaatttatatggaacataaaccctacaaatataaagaatgtgacaaagctttttaaggaagttctcaacccttattacacataatttatactggacagaaaccctacaagtgngaagaatatggcaaagcctataacaacctgtcaactctttttgttttttgagatggagtttcactcttgtcacccaggctggagtgcaatggcacgatctcagctcactgcaacttctgcctcctggtatcaagccattctcctgcctcagcctcccgagtagctgggattactggtgcccaccaccatgcccagctaatttttgtatttttagtagagatggggtttcatcatgtttgccagactggtctccaactcctgacctcagatggtccacccacctcggcatcctaaagtgctgagatgacaggcatgagccacgacgcccagccacaagttctcaattcttaagagacatggcgataattcatgctgaagaggaactctacaaacctgaaagatgcaacagtgcttttaccaccacctccaacttttgtatacataaaaataaattatactaatgtgaaaccctggaaatgtatgaaatgagacaaagcgtttatatggttgccacacttgattgtaggtaagagaattaatgctgccaaaactcctacaagtgtgaagaatgtggcaaaacttttgagtgcttacaccttatttcacaggaaagcttttatccttgagaaaaatcgtacagatataaagaatatggaaacgccattaacgcccactcacatctcaacagaaggttcatagttaataaaagcaataaaagtgcaattactgtcaaaaaatctttcagaaaatataagcctttaaagaagaatatttattctgaaatcagctattacaaatataagggggggttgtagtacctttacttgtatcacagatcttgttgcacacattgtgtactagaggaaaacctgaagcagttgctccagctttattcaacaacatggaatttatattggagaagagtcctgcaaatataatgaatttggaaagactttttttttcaaaatctatagcttagaaaacatcagagagtttatactaaagtatatttttgcagatgtaaatatgaaaaaaatatttaattcaaaattgattttacgtaaatatgagaatttacactagaataaggcactgacacttcagacattacactaaatcagagtattgagtataaaaatgaatccacaactaaagctgtttttgtatataactttaaaagggagattttctgaagcattgtaatttcattgaaagtgtacttgtttcttgaaaaaaatttttgaacagtgaataatgatgtaatacaactttcaaatttctttacgctgttattttattcctattgtggtcacatgtgaaagcatgtgatcaattgttgctgcatcagggatattacagattcttttttattgggtattatgaccttttctataaaagaataaggacattaaaatgtaagatgcatgataaaaatgtaagtggagaggctctttgtagttaacttatattaagtaatgtataaggtgggggttctcatttgtataatcctagcctatgacttaatgttgatgttttgctttgtcttttggatggcctaacctacattaacatgttggcagaccattttaaaacttttttttttcaaaaattataatgaattactttattaataaagatttttaaaaagtgggggttcagagtaatagttttctacattatagtgagaaaaattacagttaaaagtattaaatgagaatattattttactaattgtacttttatgtaatcgaatgcagtatatttaaaaattgttagatgatgtgtgaacttaatttcattttttataccatgttaagactattctgcgtttaatgaagcattattatgccactaactttttttctttttttttgaatggagtctcggtctttcacccaggctggagcgctgtggcacgatctcggctcactgcaacctccacctcccaggttcacaccattctcctgcctcagcttcctgagtagctgggactgcaggcacccgccaccatgcccggctaatttttttgtatttttagtagagatggggtttcactgtgttngccgggatggtcaatctcctgaccttgtgatccgcccnccttggccctccaaagtgctgggattacaggcgtgagccaccgcacctggccattatgccactaactttaacctatcccaccttaatcaagggtgtacttaaaagatggtaacaatatactgtttggtacgtagtggaataacatctctacttgtcactttgccagtggctttaaactgcaaatgagttgaattgttcccatagcttaaattttttttcttattgaaatctattactagtatttgtgggtatacagtatgtgtatatctttatgccttatatggcatattttgattcaggcctacaatatgtagtaattacattagggtaaagtatccatcacctctagcatttatcctttgaattacagtgtaattatacatttttaattattttaaaatgtacaattaaattgttactgactacaggtttatttttatggtcataataaaaattatacagaaaaataaataaaatatggccnggtgcngtggctcaggcctgtaatcccagcnctttccaaggcaggtggattgtctgaggtcaggagttcaagaccatcctggccaacatagtgaaaccccgtctgaggaagcgctcctttcgcgggggcactcgctgtggatgaataaagtacactgacacacattctgctctgccagtccagctgagggtccgagccgcttacaggctccaaggtgagttctgtaaacagttgcaacttggctctgatcagatagtgaggcttgcatttattcagtaagactaattaacaaaagttgtgagtaaacaccactagagggtaaaattaaaggccaggttcccaggcctaaagcaaacaccatttgtgggtaataaactgcggacccccgagtaggcggcagtaaagtaccctcagcaggacaaaagttagtcttaagcccatataactaaacaggttagtaagataaacttcctacattccttttcacttgcaccctaatcttcctggcctcctgcaaagagaccctggctgccttcagccaagcaatcaagctatgcaaactctcaggccttttaggacagcttttgactgttactcttttaaatatttttcccaccagcctgattgaaccccaacacccagctctactaaaaacacaaaaattagc

SEQ ID NO: 361330 - DNA, 3941 bp, Homo sapiens
  misc_feature (1679)..(1679): n is a, c, g, or t
cccattgtctctcgctgacgcgtcggagatccagctatcgtcttcactgctctgtgccgtcagctcctagaggcccagcctctgtggccctgtgacctgcaggtattaggagggtcacagctaggacgccgggaccccctggaagcctagaaatgggaccattgcaatttagagatgtggccatagaattctctctggaggagtggcattgcctggacgctgcacagcggaatctatatagggatgtgatgttagagaactacagaaacctgatcttccttggtattgttgtctctaaaccaaacctgatcacctgtctggagcaaggaaaaaaacctttaactatgaagaggcatgagatgattgccaaacccccagttatgtattctcattttgcccaagacctttggtcagagcagagcataaaagattctttccaaaaagtgatactaagaagatatgaaaaatgtagacatgacaatttacagttaaaaaaaggctgtgaaagtgtagatgagtgtccagtgcacaaaagaggttataatggacttaaacaatgtttggcaactacccagagaaaaatatttcaatgtgatgaatatgtgaaattcttgcataaattttcaaattcaaacaaacataagataagagatactggaaaaaaatcttttaaatgtatagaatatgggaaaacttttaaccagtcttcaacccgtactacatataagaaaattgatgctggagagaaacgctataaatgtgaagaatgtggtaaagcctataagcagtcctcacaccttactacacataagaaaattcatactggagagaaaccctacaaatgtgaagaatgtggcaaagcctataagcagtcctgtaaccttactacacataagataattcatactggagagaaaccctacagatgtagagaatgtggcaaagcttttaaccaccctgcaacccttttttcacataagaaaattcatactggagagaaaccatacaagtgtgataaatgtggcaaagcctttatttcatcctcaacccttactaaacatgagataattcatactggagagaaaccctacaaatgtgaggaatgtggcaaagcttttaaccgttcctcaaaccttactaaacataagagaattcatactggagatgtaccctacaaatgtgacgaatgtggcaaaacctttacctggtactcaagcctctctaaacataagagagctcatactggagagaaaccctacaagtgtgaagaatgtggcaaagcctttactgcattctcaactctaactgaacataagataattcatactggagagaaaccgtacaaatgtgaagaatgtggcaaagcttttaactggtcctcagcccttaataaacataagaaaattcatattagacagaaaccctgcatagtgaagaatgtggaaaatcttttaaatgttcctcaacccttaataagcataagataattcatactggagagaaaccgtatgaatgtgatgaatgtgggaaagcctttaactagccctggactctgactaaatatgagaatttatatggaacataaaccctacaaatataaagaatgtgacaaagctttttaaggaagttctcaacccttattacacataatttatactggacagaaaccctacaagtgngaagaatatggcaaagcctataacaacctgtcaactctttttgttttttgagatggagtttcactcttgtcacccaggctggagtgcaatggcacgatctcagctcactgcaacttctgcctcctggtatcaagccattctcctgcctcagcctcccgagtagctgggattactggtgcccaccaccatgcccagctaatttttgtatttttagtagagatggggtttcatcatgtttgccagactggtctccaactcctgacctcagatggtccacccacctcggcatcctaaagtgctgagatgacaggcatgagccacgacgcccagccacaagttctcaattcttaagagacatggcgataattcatgctgaagaggaactctacaaacctgaaagatgcaacagtgcttttaccaccacctccaacttttgtatacataaaaataaattatactaatgtgaaaccctggaaatgtatgaaatgagacaaagcgtttatatggttgccacacttgattgtaggtaagagaattaatgctgccaaaactcctacaagtgtgaagaatgtggcaaaacttttgagtgcttacaccttatttcacaggaaagcttttatccttgagaaaaatcgtacagatataaagaatatggaaacgccattaacgcccactcacatctcaacagaaggttcatagttaataaaagcaataaaagtgcaattactgtcaaaaaatctttcagaaaatataagcctttaaagaagaatatttattctgaaatcagctattacaaatataagggggggttgtagtacctttacttgtatcacagatcttgttgcacacattgtgtactagaggaaaacctgaagcagttgctccagctttattcaacaacatggaatttatattggagaagagtcctgcaaatataatgaatttggaaagactttttttttcaaaatctatagcttagaaaacatcagagagtttatactaaagtatatttttgcagatgtaaatatgaaaaaaatatttaattcaaaattgattttacgtaaatatgagaatttacactagaataaggcactgacacttcagacattacactaaatcagagtattgagtataaaaatgaatccacaactaaagctgtttttgtatataactttaaaagggagattttctgaagcattgtaatttcattgaaagtgtacttgtttcttgaaaaaaatttttgaacagtgaataatgatgtaatacaactttcaaatttctttacgctgttattttattcctattgtggtcacatgtgaaagcatgtgatcaattgttgctgcatcagggatattacagattcttttttattgggtattatgaccttttctataaaagaataaggacattaaaatgtaagatgcatgataaaaatgtaagtggagaggctctttgtagttaacttatattaagtaatgtataaggtgggggttctcatttgtataatcctagcctatgacttaatgttgatgttttgctttgtcttttggatggcctaacctacattaacatgttggcagaccattttaaaacttttttttttcaaaaattataatgaattactttattaataaagatttttaaaaagtgggggttcagagtaatagttttctacattatagtgagaaaaattacagttaaaagtattaaatgagaatattattttactaattgtacttttatgtaatcgaatgcagtatatttaaaaattgttagatgatgtgtgaacttaatttcattttttataccatgttaagactattctgcgtttaatgaagcattattatgccactaactttttttctttttttttgactgagatcacgccactgcattccagtctgggcaacagagcaagactctatttcaaaaaaaaacaaagaaatagaaatagaatccatgtatttctgaatcctgaaaaattattagtaaatgtttattatatagttttctttgaacatctggtctgtctgcaaacatatagaccttttttttttttttttttgagatggagtcttgctctgtccccaggctggagtgcagtggcgtgatctcagctcccgggatcgagtggttctcctacctcagcctcccgaatagctgggactacaggcatgtgccaccatgcttagctaatttttgtatttttagtagggatgggctgtcaccatgttggcaaggatggtctcgatctcttgacct

SEQ ID NO: 361331 - DNA, 3318 bp, Homo sapiens
  misc_feature (1679)..(1679): n is a, c, g, or t
cccattgtctctcgctgacgcgtcggagatccagctatcgtcttcactgctctgtgccgtcagctcctagaggcccagcctctgtggccctgtgacctgcaggtattaggagggtcacagctaggacgccgggaccccctggaagcctagaaatgggaccattgcaatttagagatgtggccatagaattctctctggaggagtggcattgcctggacgctgcacagcggaatctatatagggatgtgatgttagagaactacagaaacctgatcttccttggtattgttgtctctaaaccaaacctgatcacctgtctggagcaaggaaaaaaacctttaactatgaagaggcatgagatgattgccaaacccccagttatgtattctcattttgcccaagacctttggtcagagcagagcataaaagattctttccaaaaagtgatactaagaagatatgaaaaatgtagacatgacaatttacagttaaaaaaaggctgtgaaagtgtagatgagtgtccagtgcacaaaagaggttataatggacttaaacaatgtttggcaactacccagagaaaaatatttcaatgtgatgaatatgtgaaattcttgcataaattttcaaattcaaacaaacataagataagagatactggaaaaaaatcttttaaatgtatagaatatgggaaaacttttaaccagtcttcaacccgtactacatataagaaaattgatgctggagagaaacgctataaatgtgaagaatgtggtaaagcctataagcagtcctcacaccttactacacataagaaaattcatactggagagaaaccctacaaatgtgaagaatgtggcaaagcctataagcagtcctgtaaccttactacacataagataattcatactggagagaaaccctacagatgtagagaatgtggcaaagcttttaaccaccctgcaacccttttttcacataagaaaattcatactggagagaaaccatacaagtgtgataaatgtggcaaagcctttatttcatcctcaacccttactaaacatgagataattcatactggagagaaaccctacaaatgtgaggaatgtggcaaagcttttaaccgttcctcaaaccttactaaacataagagaattcatactggagatgtaccctacaaatgtgacgaatgtggcaaaacctttacctggtactcaagcctctctaaacataagagagctcatactggagagaaaccctacaagtgtgaagaatgtggcaaagcctttactgcattctcaactctaactgaacataagataattcatactggagagaaaccgtacaaatgtgaagaatgtggcaaagcttttaactggtcctcagcccttaataaacataagaaaattcatattagacagaaaccctgcatagtgaagaatgtggaaaatcttttaaatgttcctcaacccttaataagcataagataattcatactggagagaaaccgtatgaatgtgatgaatgtgggaaagcctttaactagccctggactctgactaaatatgagaatttatatggaacataaaccctacaaatataaagaatgtgacaaagctttttaaggaagttctcaacccttattacacataatttatactggacagaaaccctacaagtgngaagaatatggcaaagcctataacaacctgtcaactctttttgttttttgagatggagtttcactcttgtcacccaggctggagtgcaatggcacgatctcagctcactgcaacttctgcctcctggtatcaagccattctcctgcctcagcctcccgagtagctgggattactggtgcccaccaccatgcccagctaatttttgtatttttagtagagatggggtttcatcatgtttgccagactggtctccaactcctgacctcagatggtccacccacctcggcatcctaaagtgctgagatgacaggcatgagccacgacgcccagccacaagttctcaattcttaagagacatggcgataattcatgctgaagaggaactctacaaacctgaaagatgcaacagtgcttttaccaccacctccaacttttgtatacataaaaataaattatactaatgtgaaaccctggaaatgtatgaaatgagacaaagcgtttatatggttgccacacttgattgtaggtaagagaattaatgctgccaaaactcctacaagtgtgaagaatgtggcaaaacttttgagtgcttacaccttatttcacaggaaagcttttatccttgagaaaaatcgtacagatataaagaatatggaaacgccattaacgcccactcacatctcaacagaaggttcatagttaataaaagcaataaaagtgcaattactgtcaaaaaatctttcagaaaatataagcctttaaagaagaatatttattctgaaatcagctattacaaatataagggggggttgtagtacctttacttgtatcacagatcttgttgcacacattgtgtactagaggaaaacctgaagcagttgctccagctttattcaacaacatggaatttatattggagaagagtcctgcaaatataatgaatttggaaagactttttttttcaaaatctatagcttagaaaacatcagagagtttatactaaagtatatttttgcagatgtaaatatgaaaaaaatatttaattcaaaattgattttacgtaaatatgagaatttacactagaataaggcactgacacttcagacattacactaaatcagagtattgagtataaaaatgaatccacaactaaagctgtttttgtatataactttaaaagggagattttctgaagcattgtaatttcattgaaagtgtacttgtttcttgaaaaaaatttttgaacagtgaataatgatgtaatacaactttcaaatttctttacgctgttattttattcctattgtggtcacatgtgaaagcatgtgatcaattgttgctgcatcagggatattacagattcttttttattgggtattatgaccttttctataaaagaataaggacattaaaatgtaagatgcatgataaaaatgtaagtggagaggctctttgtagttaacttatattaagtaatgtataaggtgggggttctcatttgtataatcctagcctatgacttaatgttgatgttttgctttgtcttttggatggcctaacctacattaacatgttggcagaccatccaaaagacaaagcaaaacatcagatataagtcgctgacttgaagcaacatatt

SEQ ID NO: 361332 - DNA, 1649 bp, Homo sapiens
gtattttttagtagagacggggtttctccatgttggtcagcctggtctcgacctcctgacctcaagtgatccacccgcctcggcctcccaaagtgctgggattacaggcatgagccaccatgcctggccaattctgcaggtttgaaaggggtccatggattggcttcattcacagctaatgctgaccctacttgccctagatcacttatagcagcactcaactagacaaagtgccacagcacacagttccttaaacctatactcttctcacaacataaatgctttcagtccaaaataaaaaccaccaatcactatcctaaaacatggcacactctgctggtcctttaaactttacagaggctggagaaggcagctcatgtctgagtaagtctgcatttggaaaacaacatgcacacatgcgttaatgcaatgtttatggagcatgctctgtgtgctcagaagcacgctacggagctgggaagatgacatgaatttatccttataataccctgggaggtgggtactaactgtcccataattccctggatttatatgaaaagcccagcatttacatttcttcttgttctcactgattttttttaatttttttatttttttttaatgcatggaacaggccaggcacggtggctcatgcctataattccagcactttggagggccaaggcaggcggatcatctgaggtcaggagttcacgcaaatcagggggcccgtgaaaggcaactgagcagggatccatgggaaagacaccctcagaggcacaagattctctcgttacctttcagtttgctgatacttcagttaaagtctcctgggaaacgtctgcattaggttcttcctctgtagttcttcttaccttgcctgtaaaacaaaacctatctagtgtctgcataggtttccacttcttgtccccacctgaggaatggaaagcaacggcacagtccttgctcatgttttggagtgaaaggagcttgaaggtcatgtgagctttgccaaggcttctcctggcctcatgtcagatacagctcctaactcccaagcagcctaccatagtgtcctcctttttttgcgtgtgtgatggggtttcgcacttgttgcccaggctggagtgcaatggtacaatctcggctcactgcaacctccgcctcccaggttcaagtgattcttctgcctcagcctctcaagtaactgggattacaggcatgcgccactaagggaggagaccactcctcatattgtcttatgcccaatttctgcttccaaagaaagaagaagtaaaaactaaaaggcagaaatgaaatccacaggcagacagcccagcgccacaccatgggcctggtagttaaagatcgagccctgacctaatcggttatgttatctacagattacagacattgtatagaaaagcactttgaaaatccctgtcctgttctgttccattctaattactggtgcatgcagccttcagtcacttactccctgcttgctcaatcgatcacgaccctctcatgcaaacccccttagagttgtaagcccttaagagggataggaattgctcactcagggagctcagtttttgagacgtgagtcttgccaatgctcccggccgaataaagcccttccttcttta

SEQ ID NO: 361333 - DNA, 1787 bp, Homo sapiens
  misc_feature (558)..(558): n is a, c, g, or t
  misc_feature (564)..(564): n is a, c, g, or t
  misc_feature (589)..(589): n is a, c, g, or t
gcccacggtagattgcccacggtagattgcccacggtagattgcgtgaactcctgacctcagatgacccgcctgccttggccctccaaagtgctgggattacaggcgtgagccaccgcacctggccattatgccactaactttaacctatcccaccttaatcaagggtgtacttaaaagatggtaacaatatactgtttggtacgtagtggaataacatctctacttgtcactttgccagtggctttaaactgcaaatgagttgaattgttcccatagcttaaattttttttcttattgaaatctattactagtatttgtgggtatacagtatgtgtatatctttatgccttatatggcatattttgattcaggcctacaatatgtagtaattacattagggtaaagtatccatcacctctagcatttatcctttgaattacagtgtaattatacatttttaattattttaaaatgtacaattaaattgttactgactacaggtttatttttatggtcataataaaaattatacagaaaaataaataaaatatggccnggtgcngtggctcaggcctgtaatcccagcnctttccaaggcaggtggattgtctgaggtcaggagttcaagaccatcctggccaacatagtgaaaccccgtctgaggaagcgctcctttcgcgggggcactcgctgtggatgaataaagtacactgacacacattctgctctgccagtccagctgagggtccgagccgcttacaggctccaaggccaggcacggtggctcatgcctataattccagcactttggagggccaaggcaggcggatcatctgaggtcaggagttcacgcaaatcagggggcccgtgaaaggcaactgagcagggatccatgggaaagacaccctcagaggcacaagattctctcgttacctttcagtttgctgatacttcagttaaagtctcctgggaaacgtctgcattaggttcttcctctgtagttcttcttaccttgcctgtaaaacaaaacctatctagtgtctgcataggtttccacttcttgtccccacctgaggaatggaaagcaacggcacagtccttgctcatgttttggagtgaaaggagcttgaaggtcatgtgagctttgccaaggcttctcctggcctcatgtcagatacagctcctaactcccaagcagcctaccatagtgtcctcctttttttgcgtgtgtgatggggtttcgcacttgttgcccaggctggagtgcaatggtacaatctcggctcactgcaacctccgcctcccaggttcaagtgattcttctgcctcagcctctcaagtaactgggattacaggcatgcgccactaagggaggagaccactcctcatattgtcttatgcccaatttctgcttccaaagaaagaagaagtaaaaactaaaaggcagaaatgaaatccacaggcagacagcccagcgccacaccatgggcctggtagttaaagatcgagccctgacctaatcggttatgttatctacagattacagacattgtatagaaaagcactttgaaaatccctgtcctgttctgttccattctaattactggtgcatgcagccttcagtcacttactccctgcttgctcaatcgatcacgaccctctcatgcaaacccccttagagttgtaagcccttaagagggataggaattgctcactcagggagctcagtttttgagacgtgagtcttgccaatgctcccggccgaataaagcccttccttcttta

SEQ ID NO: 361334 - DNA, 1464 bp, Homo sapiens
cccattgtctctcgctgacgcgtcggagatccagctatcgtcttcactgctctgtgccgtcagctcctagaggcccagcctctgtggccctgtgacctgcaggtattaggagggtcacagctaggacgccgggaccccctggaagcctagaaatgggaccattgcaatttagagatgtggccatagaattctctctggaggagtggcattgcctggacgctgcacagcggaatctatatagggatgtgatgttagagaactacagaaacctgatcttccttggtattgttgtctctaaaccaaacctgatcacctgtctggagcaaggaaaaaaacctttaactatgaagaggcatgagatgattgccaaacccccagatggagtctcggtctttcacccaggctggagcgctgtggcacgatctcggctcactgcaacctccacctccgccaggcacggtggctcatgcctataattccagcactttggagggccaaggcaggcggatcatctgaggtcaggagttcacgcaaatcagggggcccgtgaaaggcaactgagcagggatccatgggaaagacaccctcagaggcacaagattctctcgttacctttcagtttgctgatacttcagttaaagtctcctgggaaacgtctgcattaggttcttcctctgtagttcttcttaccttgcctgtaaaacaaaacctatctagtgtctgcataggtttccacttcttgtccccacctgaggaatggaaagcaacggcacagtccttgctcatgttttggagtgaaaggagcttgaaggtcatgtgagctttgccaaggcttctcctggcctcatgtcagatacagctcctaactcccaagcagcctaccatagtgtcctcctttttttgcgtgtgtgatggggtttcgcacttgttgcccaggctggagtgcaatggtacaatctcggctcactgcaacctccgcctcccaggttcaagtgattcttctgcctcagcctctcaagtaactgggattacaggcatgcgccactaagggaggagaccactcctcatattgtcttatgcccaatttctgcttccaaagaaagaagaagtaaaaactaaaaggcagaaatgaaatccacaggcagacagcccagcgccacaccatgggcctggtagttaaagatcgagccctgacctaatcggttatgttatctacagattacagacattgtatagaaaagcactttgaaaatccctgtcctgttctgttccattctaattactggtgcatgcagccttcagtcacttactccctgcttgctcaatcgatcacgaccctctcatgcaaacccccttagagttgtaagcccttaagagggataggaattgctcactcagggagctcagtttttgagacgtgagtcttgccaatgctcccggccgaataaagcccttccttcttta

SEQ ID NO: 361335 - DNA, 1336 bp, Homo sapiens
cccattgtctctcgctgacgcgtcggagatccagctatcgtcttcactgctctgtgccgtcagctcctagaggcccagcctctgtggccctgtgacctgcaggtattaggagggtcacagctaggacgccgggaccccctggaagcctagaaatgggaccattgcaatttagagatgtggccatagaattctctctggaggagtggcattgcctggacgctgcacagcggaatctatatagggatgtgatgttagagaactacagaaacctgatcttccttggtattgttgtctctaaaccaaacctgatcacctgtctggagcaaggaaaaaaacctttaactataattccagcactttggagggccaaggcaggcggatcatctgaggtcaggagttcacgcaaatcagggggcccgtgaaaggcaactgagcagggatccatgggaaagacaccctcagaggcacaagattctctcgttacctttcagtttgctgatacttcagttaaagtctcctgggaaacgtctgcattaggttcttcctctgtagttcttcttaccttgcctgtaaaacaaaacctatctagtgtctgcataggtttccacttcttgtccccacctgaggaatggaaagcaacggcacagtccttgctcatgttttggagtgaaaggagcttgaaggtcatgtgagctttgccaaggcttctcctggcctcatgtcagatacagctcctaactcccaagcagcctaccatagtgtcctcctttttttgcgtgtgtgatggggtttcgcacttgttgcccaggctggagtgcaatggtacaatctcggctcactgcaacctccgcctcccaggttcaagtgattcttctgcctcagcctctcaagtaactgggattacaggcatgcgccactaagggaggagaccactcctcatattgtcttatgcccaatttctgcttccaaagaaagaagaagtaaaaactaaaaggcagaaatgaaatccacaggcagacagcccagcgccacaccatgggcctggtagttaaagatcgagccctgacctaatcggttatgttatctacagattacagacattgtatagaaaagcactttgaaaatccctgtcctgttctgttccattctaattactggtgcatgcagccttcagtcacttactccctgcttgctcaatcgatcacgaccctctcatgcaaacccccttagagttgtaagcccttaagagggataggaattgctcactcagggagctcagtttttgagacgtgagtcttgccaatgctcccggccgaataaagcccttccttcttta

SEQ ID NO: 361336 - DNA, 2316 bp, Homo sapiens
  misc_feature (565)..(565): n is a, c, g, or t
  misc_feature (603)..(603): n is a, c, g, or t
  misc_feature (1087)..(1087): n is a, c, g, or t
  misc_feature (1093)..(1093): n is a, c, g, or t
  misc_feature (1118)..(1118): n is a, c, g, or t
cccattgtctctcgctgacgcgtcggagatccagctatcgtcttcactgctctgtgccgtcagctcctagaggcccagcctctgtggccctgtgacctgcaggtattaggagggtcacagctaggacgccgggaccccctggaagcctagaaatgggaccattgcaatttagagatgtggccatagaattctctctggaggagtggcattgcctggacgctgcacagcggaatctatatagggatgtgatgttagagaactacagaaacctgatcttccttggtattgttgtctctaaaccaaacctgatcacctgtctggagcaaggaaaaaaacctttaactatgaagaggcatgagatgattgccaaacccccagatggagtctcggtctttcacccaggctggagcgctgtggcacgatctcggctcactgcaacctccacctcccaggttcacaccattctcctgcctcagcttcctgagtagctgggactgcaggcacccgccaccatgcccggctaatttttttgtatttttagtagagatggggtttcactgtgttngccgggatggtcaatctcctgaccttgtgatccgcccnccttggccctccaaagtgctgggattacaggcgtgagccaccgcacctggccattatgccactaactttaacctatcccaccttaatcaagggtgtacttaaaagatggtaacaatatactgtttggtacgtagtggaataacatctctacttgtcactttgccagtggctttaaactgcaaatgagttgaattgttcccatagcttaaattttttttcttattgaaatctattactagtatttgtgggtatacagtatgtgtatatctttatgccttatatggcatattttgattcaggcctacaatatgtagtaattacattagggtaaagtatccatcacctctagcatttatcctttgaattacagtgtaattatacatttttaattattttaaaatgtacaattaaattgttactgactacaggtttatttttatggtcataataaaaattatacagaaaaataaataaaatatggccnggtgcngtggctcaggcctgtaatcccagcnctttccaaggcaggtggattgtctgaggtcaggagttcaagaccatcctggccaacatagtgaaaccccgtctgaggaagcgctcctttcgcgggggcactcgctgtggatgaataaagtacactgacacacattctgctctgccagtccagctgagggtccgagccgcttacaggctccaaggccaggcacggtggctcatgcctataattccagcactttggagggccaaggcaggcggatcatctgaggtcaggagttcacgcaaatcagggggcccgtgaaaggcaactgagcagggatccatgggaaagacaccctcagaggcacaagattctctcgttacctttcagtttgctgatacttcagttaaagtctcctgggaaacgtctgcattaggttcttcctctgtagttcttcttaccttgcctgtaaaacaaaacctatctagtgtctgcataggtttccacttcttgtccccacctgaggaatggaaagcaacggcacagtccttgctcatgttttggagtgaaaggagcttgaaggtcatgtgagctttgccaaggcttctcctggcctcatgtcagatacagctcctaactcccaagcagcctaccatagtgtcctcctttttttgcgtgtgtgatggggtttcgcacttgttgcccaggctggagtgcaatggtacaatctcggctcactgcaacctccgcctcccaggttcaagtgattcttctgcctcagcctctcaagtaactgggattacaggcatgcgccactaagggaggagaccactcctcatattgtcttatgcccaatttctgcttccaaagaaagaagaagtaaaaactaaaaggcagaaatgaaatccacaggcagacagcccagcgccacaccatgggcctggtagttaaagatcgagccctgacctaatcggttatgttatctacagattacagacattgtatagaaaagcactttgaaaatccctgtcctgttctgttccattctaattactggtgcatgcagccttcagtcacttactccctgcttgctcaatcgatcacgaccctctcatgcaaacccccttagagttgtaagcccttaagagggataggaattgctcactcagggagctcagtttttgagacgtgagtcttgccaatgctcccggccgaataaagcccttccttcttta

SEQ ID NO: 361337 - DNA, 657 bp, Homo sapiens
cccattgtctctcgctgacgcgtcggagatccagctatcgtcttcactgctctgtgccgtcagctcctagaggcccagcctctgtggccctgtgacctgcaggtattaggagggtcacagctaggacgccgggaccccctggaagcctagaaatgggaccattgcaatttagagatgtggccatagaattctctctggaggagtggcattgcctggacgctgcacagcggaatctatatagggatgtgatgttagagaactacagaaacctgatcttccttgatggagtctcggtctttcacccaggctggagcgctgtggcacgatctcggctcactgcaacctccacctccgagaattgcttgaacctgggaggcggaggttgctgttagccgggaccgcgccgctgcactccagcttgggtgacagagtgagactccatctcaaacaaaacaaaacaaacacaaatgaaagggaaggaagtggattactgataataactaaggtatggaatcaacctgagtgttcatcagtaggtgaatggagaaagaaaatgtggtatatgtacacaatgaaatgccattcagcccttaaaaataaagtcttgttatttgcaacattcatgaatctgaaaggtatgctaagtaaacccagcac

SEQ ID NO: 361338 - DNA, 282 bp, Homo sapiens
tctgtgttgaaaatcattttattggataattttagtcctataagtcagaaccacttctctttactctctcatttcacctgaagtcaaattaaaaattccacccatggccacttggtaaaaataagtgtgtgtgtttttttcagggaccattgcaatttagagatgtggccatagaattctctctggaggagtggcattgcctggacgctgcacagcggaatctatatagggatgtgatgttagagaactacagaaacctgatcttccttggtgaggataact

SEQ ID NO: 361339 - DNA, 480 bp, Homo sapiens
ctgtgttgaaaatcattttattggataattttagtcctataagtcagaaccacttctctttactctctcatttcacctgaagtcaaattaaaaattccacccatggccacttggtaaaaataagtgtgtgtgtttttttcagggaccattgcaatttagagatgtggccatagaattctctctggaggagtggcattgcctggacgctgcacagcggaatctatatagggatgtgatgttagagaactacagaaacctgatcttccttggtgaggataacttgagtacataattcataatattactctaaaggttttatttctcttttttgtagaatgttttttagtaatttattctttgcatacaagagtttcagatctcctttttccagaaaaatcttcagaattttttcatttagaaaagaatttcttcatgatgtttcatcttaatccaaactttccacattcctgagttgagctg

SEQ ID NO: 361340 - DNA, 1293 bp, Homo sapiens
cccattgtctctcgctgacgcgtcggagatccagctatcgtcttcactgctctgtgccgtcagctcctagaggcccagcctctgtggccctgtgacctgcaggtattaggagggtcacagctaggacgccgggaccccctggaagcctagaaatgggaccattgcaatttagagatgtggccatagaattctctctggaggagtggcattgcctggacgctgcacagcggaatctatatagggatgtgatgttagagaactacagaaacctgatcttccttggtattgttgtctctaaaccaaacctgatcacctgtctggagcaaggaaaaaaacctttaactatgaagaggcatgagatgattgccaaacccccagatggagttaaattcacccgcctcggcctcccaaagtgctggggtaacaggcatgagccaccgcacccagccaagtttatttcaacaagtgcatgctcaagagtgtattgtatcatttctatatatttgaaaatttatcaattatttatattattgtcttatactctaattccatttttgtcatagaaagtaatctatgaaattttagtttaaaaaaatgtgttaagactttgtttttgacctaacaggtggtctatgaagaggaatgttttatgagctattgagaaggctatgtatcctgatgatgttgaggagtgttctctataccttcattagaaataattgttttttactgccttctagtcctctgttcccttactaatatactgtcttgttttattattattacagaaagtggggtattgaaatatcctactataattatattgctctattcaactttgttagtatttgctttatatatttgaaaccccaatttgagacacacacacgcacaaatacacacatggatcaacaaatttgtcataggtttccatgaattaatctatatattgtttaatgtccttcttttttgaagttttaacttaaagtacattttataaaatatgacagcttttgactttaacaatgtagcttgtgtaatattattttgacctcttctgctctcattttgttagtatttacatgaaatttctacttggtcttgccactttcagtcttttcttatcattagatctcagctgactcttgtaaaaaggcaagttgagtcttgatttttaaaattttttaatgagcctttttagaagtatgtctcttgattggaaagataattatatttaaatagttttctgaaagagaaaaacttactgttaataaaataattgttttgattctt

SEQ ID NO: 361341 - DNA, 5074 bp, Homo sapiens
  misc_feature (1679)..(1679): n is a, c, g, or t
  misc_feature (3741)..(3741): n is a, c, g, or t
  misc_feature (3779)..(3779): n is a, c, g, or t
  misc_feature (4263)..(4263): n is a, c, g, or t
  misc_feature (4269)..(4269): n is a, c, g, or t
  misc_feature (4294)..(4294): n is a, c, g, or t
cccattgtctctcgctgacgcgtcggagatccagctatcgtcttcactgctctgtgccgtcagctcctagaggcccagcctctgtggccctgtgacctgcaggtattaggagggtcacagctaggacgccgggaccccctggaagcctagaaatgggaccattgcaatttagagatgtggccatagaattctctctggaggagtggcattgcctggacgctgcacagcggaatctatatagggatgtgatgttagagaactacagaaacctgatcttccttggtattgttgtctctaaaccaaacctgatcacctgtctggagcaaggaaaaaaacctttaactatgaagaggcatgagatgattgccaaacccccagttatgtattctcattttgcccaagacctttggtcagagcagagcataaaagattctttccaaaaagtgatactaagaagatatgaaaaatgtagacatgacaatttacagttaaaaaaaggctgtgaaagtgtagatgagtgtccagtgcacaaaagaggttataatggacttaaacaatgtttggcaactacccagagaaaaatatttcaatgtgatgaatatgtgaaattcttgcataaattttcaaattcaaacaaacataagataagagatactggaaaaaaatcttttaaatgtatagaatatgggaaaacttttaaccagtcttcaacccgtactacatataagaaaattgatgctggagagaaacgctataaatgtgaagaatgtggtaaagcctataagcagtcctcacaccttactacacataagaaaattcatactggagagaaaccctacaaatgtgaagaatgtggcaaagcctataagcagtcctgtaaccttactacacataagataattcatactggagagaaaccctacagatgtagagaatgtggcaaagcttttaaccaccctgcaacccttttttcacataagaaaattcatactggagagaaaccatacaagtgtgataaatgtggcaaagcctttatttcatcctcaacccttactaaacatgagataattcatactggagagaaaccctacaaatgtgaggaatgtggcaaagcttttaaccgttcctcaaaccttactaaacataagagaattcatactggagatgtaccctacaaatgtgacgaatgtggcaaaacctttacctggtactcaagcctctctaaacataagagagctcatactggagagaaaccctacaagtgtgaagaatgtggcaaagcctttactgcattctcaactctaactgaacataagataattcatactggagagaaaccgtacaaatgtgaagaatgtggcaaagcttttaactggtcctcagcccttaataaacataagaaaattcatattagacagaaaccctgcatagtgaagaatgtggaaaatcttttaaatgttcctcaacccttaataagcataagataattcatactggagagaaaccgtatgaatgtgatgaatgtgggaaagcctttaactagccctggactctgactaaatatgagaatttatatggaacataaaccctacaaatataaagaatgtgacaaagctttttaaggaagttctcaacccttattacacataatttatactggacagaaaccctacaagtgngaagaatatggcaaagcctataacaacctgtcaactctttttgttttttgagatggagtttcactcttgtcacccaggctggagtgcaatggcacgatctcagctcactgcaacttctgcctcctggtatcaagccattctcctgcctcagcctcccgagtagctgggattactggtgcccaccaccatgcccagctaatttttgtatttttagtagagatggggtttcatcatgtttgccagactggtctccaactcctgacctcagatggtccacccacctcggcatcctaaagtgctgagatgacaggcatgagccacgacgcccagccacaagttctcaattcttaagagacatggcgataattcatgctgaagaggaactctacaaacctgaaagatgcaacagtgcttttaccaccacctccaacttttgtatacataaaaataaattatactaatgtgaaaccctggaaatgtatgaaatgagacaaagcgtttatatggttgccacacttgattgtaggtaagagaattaatgctgccaaaactcctacaagtgtgaagaatgtggcaaaacttttgagtgcttacaccttatttcacaggaaagcttttatccttgagaaaaatcgtacagatataaagaatatggaaacgccattaacgcccactcacatctcaacagaaggttcatagttaataaaagcaataaaagtgcaattactgtcaaaaaatctttcagaaaatataagcctttaaagaagaatatttattctgaaatcagctattacaaatataagggggggttgtagtacctttacttgtatcacagatcttgttgcacacattgtgtactagaggaaaacctgaagcagttgctccagctttattcaacaacatggaatttatattggagaagagtcctgcaaatataatgaatttggaaagactttttttttcaaaatctatagcttagaaaacatcagagagtttatactaaagtatatttttgcagatgtaaatatgaaaaaaatatttaattcaaaattgattttacgtaaatatgagaatttacactagaataaggcactgacacttcagacattacactaaatcagagtattgagtataaaaatgaatccacaactaaagctgtttttgtatataactttaaaagggagattttctgaagcattgtaatttcattgaaagtgtacttgtttcttgaaaaaaatttttgaacagtgaataatgatgtaatacaactttcaaatttctttacgctgttattttattcctattgtggtcacatgtgaaagcatgtgatcaattgttgctgcatcagggatattacagattcttttttattgggtattatgaccttttctataaaagaataaggacattaaaatgtaagatgcatgataaaaatgtaagtggagaggctctttgtagttaacttatattaagtaatgtataaggtgggggttctcatttgtataatcctagcctatgacttaatgttgatgttttgctttgtcttttggatggcctaacctacattaacatgttggcagaccattttaaaacttttttttttcaaaaattataatgaattactttattaataaagatttttaaaaagtgggggttcagagtaatagttttctacattatagtgagaaaaattacagttaaaagtattaaatgagaatattattttactaattgtacttttatgtaatcgaatgcagtatatttaaaaattgttagatgatgtgtgaacttaatttcattttttataccatgttaagactattctgcgtttaatgaagcattattatgccactaactttttttctttttttttgaatggagtctcggtctttcacccaggctggagcgctgtggcacgatctcggctcactgcaacctccacctcccaggttcacaccattctcctgcctcagcttcctgagtagctgggactgcaggcacccgccaccatgcccggctaatttttttgtatttttagtagagatggggtttcactgtgttngccgggatggtcaatctcctgaccttgtgatccgcccnccttggccctccaaagtgctgggattacaggcgtgagccaccgcacctggccattatgccactaactttaacctatcccaccttaatcaagggtgtacttaaaagatggtaacaatatactgtttggtacgtagtggaataacatctctacttgtcactttgccagtggctttaaactgcaaatgagttgaattgttcccatagcttaaattttttttcttattgaaatctattactagtatttgtgggtatacagtatgtgtatatctttatgccttatatggcatattttgattcaggcctacaatatgtagtaattacattagggtaaagtatccatcacctctagcatttatcctttgaattacagtgtaattatacatttttaattattttaaaatgtacaattaaattgttactgactacaggtttatttttatggtcataataaaaattatacagaaaaataaataaaatatggccnggtgcngtggctcaggcctgtaatcccagcnctttccaaggcaggtggattgtctgaggtcaggagttcaagaccatcctggccaacatagtgaaaccccgtctgaggaagcgctcctttcgcgggggcactcgctgtggatgaataaagtacactgacacacattctgctctgccagtccagctgagggtccgagccgcttacaggctccaaggccaggcacggtggctcatgcctataattccagcactttggagggccaaggcaggcggatcatctgaggtcaggagttcacgcaaatcagggggcccgtgaaaggcaactgagcagggatccatgggaaagacaccctcagaggcacaagattctctcgttacctttcagtttgctgatacttcagttaaagtctcctgggaaacgtctgcattaggttcttcctctgtagttcttcttaccttgcctgtaaaacaaaacctatctagtgtctgcataggtttccacttcttgtccccacctgaggaatggaaagcaacggcacagtccttgctcatgttttggagtgaaaggagcttgaaggtcatgtgagctttgccaaggcttctcctggcctcatgtcagatacagctcctaactcccaagcagcctaccatagtgtcctcctttttttgcgtgtgtgatggggtttcgcacttgttgcccaggctggacgctccaactcggcacaaggtcgcctcactcgtcgatggtacgcctcccagcgttaaagtgatgtaagatcacgtaatgaataaaaagaactgggattaaagca

SEQ ID NO: 361342 - DNA, 3209 bp, Homo sapiens
  misc_feature (1679)..(1679): n is a, c, g, or t
cccattgtctctcgctgacgcgtcggagatccagctatcgtcttcactgctctgtgccgtcagctcctagaggcccagcctctgtggccctgtgacctgcaggtattaggagggtcacagctaggacgccgggaccccctggaagcctagaaatgggaccattgcaatttagagatgtggccatagaattctctctggaggagtggcattgcctggacgctgcacagcggaatctatatagggatgtgatgttagagaactacagaaacctgatcttccttggtattgttgtctctaaaccaaacctgatcacctgtctggagcaaggaaaaaaacctttaactatgaagaggcatgagatgattgccaaacccccagttatgtattctcattttgcccaagacctttggtcagagcagagcataaaagattctttccaaaaagtgatactaagaagatatgaaaaatgtagacatgacaatttacagttaaaaaaaggctgtgaaagtgtagatgagtgtccagtgcacaaaagaggttataatggacttaaacaatgtttggcaactacccagagaaaaatatttcaatgtgatgaatatgtgaaattcttgcataaattttcaaattcaaacaaacataagataagagatactggaaaaaaatcttttaaatgtatagaatatgggaaaacttttaaccagtcttcaacccgtactacatataagaaaattgatgctggagagaaacgctataaatgtgaagaatgtggtaaagcctataagcagtcctcacaccttactacacataagaaaattcatactggagagaaaccctacaaatgtgaagaatgtggcaaagcctataagcagtcctgtaaccttactacacataagataattcatactggagagaaaccctacagatgtagagaatgtggcaaagcttttaaccaccctgcaacccttttttcacataagaaaattcatactggagagaaaccatacaagtgtgataaatgtggcaaagcctttatttcatcctcaacccttactaaacatgagataattcatactggagagaaaccctacaaatgtgaggaatgtggcaaagcttttaaccgttcctcaaaccttactaaacataagagaattcatactggagatgtaccctacaaatgtgacgaatgtggcaaaacctttacctggtactcaagcctctctaaacataagagagctcatactggagagaaaccctacaagtgtgaagaatgtggcaaagcctttactgcattctcaactctaactgaacataagataattcatactggagagaaaccgtacaaatgtgaagaatgtggcaaagcttttaactggtcctcagcccttaataaacataagaaaattcatattagacagaaaccctgcatagtgaagaatgtggaaaatcttttaaatgttcctcaacccttaataagcataagataattcatactggagagaaaccgtatgaatgtgatgaatgtgggaaagcctttaactagccctggactctgactaaatatgagaatttatatggaacataaaccctacaaatataaagaatgtgacaaagctttttaaggaagttctcaacccttattacacataatttatactggacagaaaccctacaagtgngaagaatatggcaaagcctataacaacctgtcaactctttttgttttttgagatggagtttcactcttgtcacccaggctggagtgcaatggcacgatctcagctcactgcaacttctgcctcctggtatcaagccattctcctgcctcagcctcccgagtagctgggattactggtgcccaccaccatgcccagctaatttttgtatttttagtagagatggggtttcatcatgtttgccagactggtctccaactcctgacctcagatggtccacccacctcggcatcctaaagtgctgagatgacaggcatgagccacgacgcccagccacaagttctcaattcttaagagacatggcgataattcatgctgaagaggaactctacaaacctgaaagatgcaacagtgcttttaccaccacctccaacttttgtatacataaaaataaattatactaatgtgaaaccctggaaatgtatgaaatgagacaaagcgtttatatggttgccacacttgattgtaggtaagagaattaatgctgccaaaactcctacaagtgtgaagaatgtggcaaaacttttgagtgcttacaccttatttcacaggaaagcttttatccttgagaaaaatcgtacagatataaagaatatggaaacgccattaacgcccactcacatctcaacagaaggttcatagttaataaaagcaataaaagtgcaattactgtcaaaaaatctttcagaaaatataagcctttaaagaagaatatttattctgaaatcagctattacaaatataagggggggttgtagtacctttacttgtatcacagatcttgttgcacacattgtgtactagaggaaaacctgaagcagttgctccagctttattcaacaacatggaatttatattggagaagagtcctgcaaatataatgaatttggaaagactttttttttcaaaatctatagcttagaaaacatcagagagtttatactaaagtatatttttgcagatgtaaatatgaaaaaaatatttaattcaaaattgattttacgtaaatatgagaatttacactagaataaggcactgacacttcagacattacactaaatcagagtattgagtataaaaatgaatccacaactaaagctgtttttgtatataactttaaaagggagattttctgaagcattgtaatttcattgaaagtgtacttgtttcttgaaaaaaatttttgaacagtgaataatgatgtaatacaactttcaaatttctttacgctgttattttattcctattgtggtcacatgtgaaagcatgtgatcaattgttttaacttatattaagtaatgtataaggtgggggttctcatttgtataatcctagcctatgacttaatgttgatgttttgctttgtcttttggatggcctaacctacattaacatgttggcagaccattttaaaacttttttttttcaaaaattataatgaattactttattaataaagatttttaaaaagtg

SEQ ID NO: 361343 - DNA, 3987 bp, Homo sapiens
  misc_feature (1679)..(1679): n is a, c, g, or t
cccattgtctctcgctgacgcgtcggagatccagctatcgtcttcactgctctgtgccgtcagctcctagaggcccagcctctgtggccctgtgacctgcaggtattaggagggtcacagctaggacgccgggaccccctggaagcctagaaatgggaccattgcaatttagagatgtggccatagaattctctctggaggagtggcattgcctggacgctgcacagcggaatctatatagggatgtgatgttagagaactacagaaacctgatcttccttggtattgttgtctctaaaccaaacctgatcacctgtctggagcaaggaaaaaaacctttaactatgaagaggcatgagatgattgccaaacccccagttatgtattctcattttgcccaagacctttggtcagagcagagcataaaagattctttccaaaaagtgatactaagaagatatgaaaaatgtagacatgacaatttacagttaaaaaaaggctgtgaaagtgtagatgagtgtccagtgcacaaaagaggttataatggacttaaacaatgtttggcaactacccagagaaaaatatttcaatgtgatgaatatgtgaaattcttgcataaattttcaaattcaaacaaacataagataagagatactggaaaaaaatcttttaaatgtatagaatatgggaaaacttttaaccagtcttcaacccgtactacatataagaaaattgatgctggagagaaacgctataaatgtgaagaatgtggtaaagcctataagcagtcctcacaccttactacacataagaaaattcatactggagagaaaccctacaaatgtgaagaatgtggcaaagcctataagcagtcctgtaaccttactacacataagataattcatactggagagaaaccctacagatgtagagaatgtggcaaagcttttaaccaccctgcaacccttttttcacataagaaaattcatactggagagaaaccatacaagtgtgataaatgtggcaaagcctttatttcatcctcaacccttactaaacatgagataattcatactggagagaaaccctacaaatgtgaggaatgtggcaaagcttttaaccgttcctcaaaccttactaaacataagagaattcatactggagatgtaccctacaaatgtgacgaatgtggcaaaacctttacctggtactcaagcctctctaaacataagagagctcatactggagagaaaccctacaagtgtgaagaatgtggcaaagcctttactgcattctcaactctaactgaacataagataattcatactggagagaaaccgtacaaatgtgaagaatgtggcaaagcttttaactggtcctcagcccttaataaacataagaaaattcatattagacagaaaccctgcatagtgaagaatgtggaaaatcttttaaatgttcctcaacccttaataagcataagataattcatactggagagaaaccgtatgaatgtgatgaatgtgggaaagcctttaactagccctggactctgactaaatatgagaatttatatggaacataaaccctacaaatataaagaatgtgacaaagctttttaaggaagttctcaacccttattacacataatttatactggacagaaaccctacaagtgngaagaatatggcaaagcctataacaacctgtcaactctttttgttttttgagatggagtttcactcttgtcacccaggctggagtgcaatggcacgatctcagctcactgcaacttctgcctcctggtatcaagccattctcctgcctcagcctcccgagtagctgggattactggtgcccaccaccatgcccagctaatttttgtatttttagtagagatggggtttcatcatgtttgccagactggtctccaactcctgacctcagatggtccacccacctcggcatcctaaagtgctgagatgacaggcatgagccacgacgcccagccacaagttctcaattcttaagagacatggcgataattcatgctgaagaggaactctacaaacctgaaagatgcaacagtgcttttaccaccacctccaacttttgtatacataaaaataaattatactaatgtgaaaccctggaaatgtatgaaatgagacaaagcgtttatatggttgccacacttgattgtaggtaagagaattaatgctgccaaaactcctacaagtgtgaagaatgtggcaaaacttttgagtgcttacaccttatttcacaggaaagcttttatccttgagaaaaatcgtacagatataaagaatatggaaacgccattaacgcccactcacatctcaacagaaggttcatagttaataaaagcaataaaagtgcaattactgtcaaaaaatctttcagaaaatataagcctttaaagaagaatatttattctgaaatcagctattacaaatataagggggggttgtagtacctttacttgtatcacagatcttgttgcacacattgtgtactagaggaaaacctgaagcagttgctccagctttattcaacaacatggaatttatattggagaagagtcctgcaaatataatgaatttggaaagactttttttttcaaaatctatagcttagaaaacatcagagagtttatactaaagtatatttttgcagatgtaaatatgaaaaaaatatttaattcaaaattgattttacgtaaatatgagaatttacactagaataaggcactgacacttcagacattacactaaatcagagtattgagtataaaaatgaatccacaactaaagctgtttttgtatataactttaaaagggagattttctgaagcattgtaatttcattgaaagtgtacttgtttcttgaaaaaaatttttgaacagtgaataatgatgtaatacaactttcaaatttctttacgctgttattttattcctattgtggtcacatgtgaaagcatgtgatcaattgttgctgcatcagggatattacagattcttttttattgggtattatgaccttttctataaaagaataaggacattaaaatgtaagatgcatgataaaaatgtaagtggagaggctctttgtagttaacttatattaagtaatgtataaggtgggggttctcatttgtataatcctagcctatgacttaatgttgatgttttgctttgtcttttggatggcctaacctacattaacatgttggcagaccattttaaaacttttttttttcaaaaattataatgaattactttattaataaagatttttaaaaagtgggggttcagagtaatagttttctacattatagtgagaaaaattacagttaaaagtattaaatgagaatattattttactaattgtacttttatgtaatcgaatgcagtatatttaaaaattgttagatgatgtgtgaacttaatttcattttttataccatgttaagactattctgcgtttaatgaagcattattatgccactaactttttttctttttttttgaatggagtctcggtctttcacccaggctggagcgctgtggcacgatctcggctcactgcaacctccacctcctctgggcaacagagcaagactctatttcaaaaaaaaacaaagaaatagaaatagaatccatgtatttctgaatcctgaaaaattattagtaaatgtttattatatagttttctttgaacatctggtctgtctgcaaacatatagaccttttttttttttttttttgagatggagtcttgctctgtccccaggctggagtgcagtggcgtgatctcagctcccgggatcgagtggttctcctacctcagcctcccgaatagctgggactacaggcatgtgccaccatgcttagctaatttttgtatttttagtagggatgggctgtcaccatgttggcaaggatggtctcgatctcttgacct

SEQ ID NO: 361344 - DNA, 742 bp, Homo sapiens
ggtttcaccacgttggccaggctggtctcgaactcctgacctcaggtgatccacctgtcttggcctcctaaagtgttgggattacaggcatgagccaccacgctcggcccagtccagactttttaactacctggccccactgcagacacagttccctctagtccttcccagagttacaagaagagaactccagtagccttattctgtcagggacgaattgtttaccccatgataatgtaggatatcataaattcttcttcaaaggttttagcctgtaatttgttaagtacattgagttctgagatcctctccaaagaaccaatgtatcagtatgttcagctcacctgttctttgttcttcattttaacttttaatttcctcattctttatgtctccttgcccctagtttcagtaaacaatcccctcctagcctctgtcacctgctctgacctgagtcacctttagtcacctggtccgtaaccatctttcctgtctaaacttctcaccccaccactctggcttatacccctgctctctttaaaatagccagtcagaattagcttagattgtgcggtccaaccctagcccataggggaacaacacagcagtagggggtacctgcatcagggataagaacccattcccctcccttgttccggtgtgctctcgccattgcaccatccatgagacgcactcttgtatagaagtaaaattgccttgctgagaaaatgtaaaaaaaaaa

SEQ ID NO: 361345 - DNA, 3825 bp, Homo sapiens
agaccacgggttgcagccggagcggctgggaggatgggcctctccgctgcggccccgttgtggggtcccccggggctgctcctggccatcgccctgcacccagcgctgtcggtgcccccgcgccgggactactgcgtgctgggcgctgggcccgcgggcctgcagatggcctacttcctgcagcgcgctggacgcgactacgcagtgttcgagcgggccccgcggcccggcagcttcttcacacgctacccgcggcaccgcaagctcatcagcatcaacaagcggtacacgggcaaggctaacgccgagttcaacctccgccacgactggaactctctgctcagccacgacccccggctgctcttcagacactactcgcgtgcctacttccccgacgcccgcgacatggtgcgctacctgggtgacttcgcggacacgctggggctccgtgtccagtacaacaccaccatcgcccacgtcactctggacaaggaccgacaggcctggaatggccactacttcatcctaactgaccagaagggccaggtgcatcagtgcagcgtcctccttgtagccactggtttatcagtccccaaccaggttgacttccctggctccgaatatgcagagggttacgagtccgtgtccgtggaccctgaggactttgtaggccagaatgtgctgatcctgggtcgtgggaactcggcctttgagacagcagagaacatcttgggtgtcacaaactttatccatatgctcagccgctcccgggtccgtctgtcctgggccacccactacgttggagacctcagagccatcaacaatggcctgctggatacctaccagctcaagtccctggacgggctgctcgagtctgacctgacggatctggccatcctgaaggacagcaaaggcaagttccatgtcaccccgaaattcttcctggaagaagccagcaccaaccagagtgccgactccatcaccctcccccaggacgacaatgacaactttgccatgcgcgtgccctatgaccgggtaatccgctgcctgggctggaactttgacttctccattttcaataagtccctcagacttaactcgggaaatgcattcggcaagaagtacccgctgattcgagctagctacgaatccaaaggaagccggggtctgtttatcctgggtactgccagccactcggtggactaccggaaatctgctgggggcttcatccacggattccgatacacagtgcgtgctgttcaccggctcctggagcaccgccaccacagcgtcacctggcccgccactgagctccccatcacacagctgaccagctccatcgtgcggcgcgtgaatgaggcttctgggctctaccagatgttcggtgtgctggccgatgtcatcctgttgaaggagaattccacggcctttgagtacctggaggagttccccatacagatgctggcccagctggagacactcacagggaggaaggcaaagcacgggctcttcgtcatcaacatggaatatggcagaaatttctctggccccgacaaggacgtcttctttgatgaccggtctgtggggcacacagaagatgcctggcagtctaactttcttcatcctgtcatctactactatagatacctccccaccgaacaggaggtgaggttccgccctgcacactggcccctgcctcggcccacggccatccatcacatcgtggaagacttcttaacagactggactgccccgatcgggcacatcctacctctgaggcgcttcctggagaactgtttggacaccgatttgcgaagcttctatgcagagtcctgcttcctgttcgccctcacgcgccagaagttgccacccttttgccagcaggggtacctgaggatgcagggactcgtgagtaccgagagcctttggcagcacagagtggagagcaggctcctgcgggactatgcccccacaggcaggcgcctggaggacagcagccagcagcttggcgaccaagagccactaggttcccccctggctccagggcctctggctcagtccgtcgatagcaacaaagaggagctctgactgtcccttcctaagctgtgggcacagtggccaggcctccccacctaggcccatggtcagtccctctttccccgcaacctcacactcccgccaatgcgtgattgccaaagaccactcagatcatggcagtgtctgcagcaaagccaccagatggcacgtgagggctgaaagtcggggatgcggtggtctcctccctcctgtcagggggcagaagggcatcctctgccaggtgggagctgccttccccagcccagtttgtctgcaatggagctgtcgctgagccccaggccagcccagttctgccccgtctcaagtgctcctcttccttccaagcccctcctcagatgggcctgcatcccgcctgtggagtgcttcacaggggaaacccatccgcatcttaagagtttgtggcaagcgctttaaaacaaaagctctgatatcctcaacaaccacaacgggcaggtgggattgttgccccagatgactgctgaagacaccagctgtgggatgtcaagtaattccagggacccccagctgggagtccccgtctgtgtcacttgccacacactgcctcaacctccccgccccattttcagcagggtttgggcttagctacagagcccaagagggtcagccctgcttatcatcataggcccagcaggctgatctcgagcagcgataggacagctccctgcaaagccatcttagcaactttctcactgagaagcaggattcagagctgctctccccagttgcaccccctgactcatcttccagctggctcttctctcccatcctactcccttctgtctccctgccctctgccatcctgaaccatgccttgcttctaacctgcctggtcaagttttgtgaaacttatcctgctgtctcgggctggcacccatatgtgctcaccatgtgtaaggtgacatttccaaatgcctttgtgtgataatgatgatgaatttggttcctagtctcttcttcattgcccttcctcaccagcaatctgcactttcccatcaggcgtcttagtctcatttgtaagtgcataagataatcacagtgatttttcaaagcccaggatcataagtgattgctttttcactggttcttactaactcttcatgtatccactcagaattccaaggacaatcccggcactctgggaggcccaggcaggtggatcgcctgaggtcaggagtttgagaccagcctgaccaacgtggagaaaccctatctctgctgaaggtacaaaactagccaggcgtggtagcacatgtctataatcccagctactggagaggctgaggcaggagaatcacttaaacccgggaggcagaggttgcagtgagccgagattgcgccattgcactccagcctaggtaacaagagggaaactccatctcaaaaaataagttaattaaattaaattaaaataaaacatgcgctgggtacagttgcttacacctgtaatcccagcactttgggaggccaaagtgggccgatcacctgagctcaggaattcgagaccagcctggccaacatagcaaaaccttgtctctactaacggtaaaaaaaattagctgggcatggtggagcatgcctgtcatcccagctacttgggaagctgaggcaggagaattgcttgaacctgggaggtggaggttgcagtgagcagagaccgagccactgtactccagcctaggtgacaaagcaagacccacagtaaagccc

SEQ ID NO: 361346 - DNA, 667 bp, Homo sapiens
gcatgggaaaatccttgcaccaaggctgagctccgtgtggacttgacaagcacagactatgacactgcagacacagttccctctagtccttcccagagttacaagaagagaactccagtagccttattctgtcagggacgaattgtttaccccatgataatgtaggatatcataaattcttcttcaaaggttttagcctgtaatttgttaagtacattgagttctgagatcctctccaaagaaccaatgtatcagtatgttcagctcacctgttctttgttcttcattttaacttttaatttcctcattctttatgtctccttgcccctagtttcagtaaacaatcccctcctagcctctgtcacctgctctgacctgagtcacctttagtcacctggtccgtaaccatctttcctgtctaaacttctcaccccaccactctggcttatacccctgctctctttaaaatagccagtcagaattagcttagattgtgcggtccaaccctagcccataggggaacaacacagcagtagggggtacctgcatcagggataagaacccattcccctcccttgttccggtgtgctctcgccattgcaccatccatgagacgcactcttgtatagaagtaaaattgccttgctgagaaaatgtaaaaaaaaaa

SEQ ID NO: 361347 - DNA, 3926 bp, Homo sapiens
agaccacgggttgcagccggagcggctgggaggatgggcctctccgctgcggccccgttgtggggtcccccggggctgctcctggccatcgccctgcacccagcgctgtcggtgcccccgcgccgggactactgcgtgctgggcgctgggcccgcgggcctgcagatggcctacttcctgcagcgcgctggacgcgactacgcagtgttcgagcgggccccgcggcccggcagcttcttcacacgctacccgcggcaccgcaagctcatcagcatcaacaagcggtacacgggcaaggctaacgccgagttcaacctccgccacgactggaactctctgctcagccacgacccccggctgctcttcagacactactcgcgtgcctacttccccgacgcccgcgacatggtgcgctacctgggtgacttcgcggacacgctggggctccgtgtccagtacaacaccaccatcgcccacgtcactctggacaaggaccgacaggcctggaatggccactacttcatcctaactgaccagaagggccaggtgcatcagtgcagcgtcctccttgtagccactggtttatcagtccccaaccaggttgacttccctggctccgaatatgcagagggttacgagtccgtgtccgtggaccctgaggactttgtaggccagaatgtgctgatcctgggtcgtgggaactcggcctttgagacagcagagaacatcttgggtgtcacaaactttatccatatgctcagccgctcccgggtccgtctgtcctgggccacccactacgttggagacctcagagccatcaacaatggcctgctggatacctaccagctcaagtccctggacgggctgctcgagtctgacctgacggatctggccatcctgaaggacagcaaaggcaagttccatgtcaccccgaaattcttcctggaagaagccagcaccaaccagagtgccgactccatcaccctcccccaggacgacaatgacaactttgccatgcgcgtgccctatgaccgggtaatccgctgcctgggctggaactttgacttctccattttcaataagtccctcagacttaactcgggaaatgcattcggcaagaagtacccgctgattcgagctagctacgaatccaaaggaagccggggtctgtttatcctgggtactgccagccactcggtggactaccggaaatctgctgggggcttcatccacggattccgatacacagtgcgtgctgttcaccggctcctggagcaccgccaccacagcgtcacctggcccgccactgagctccccatcacacagctgaccagctccatcgtgcggcgcgtgaatgaggcttctgggctctaccagatgttcggtgtgctggccgatgtcatcctgttgaaggagaattccacggcctttgagtacctggaggagttccccatacagatgctggcccagctggagacactcacagggaggaaggcaaagcacgggctcttcgtcatcaacatggaatatggcagaaatttctctggccccgacaaggacgtcttctttgatgaccggtctgtggggcacacagaagatgcctggcagtctaactttcttcatcctgtcatctactactatagatacctccccaccgaacaggaggtgaggttccgccctgcacactggcccctgcctcggcccacggccatccatcacatcgtggaagacttcttaacagactggactgccccgatcgggcacatcctacctctgaggcgcttcctggagaactgtttggacaccgatttgcgaagcttctatgcagagtcctgcttcctgttcgccctcacgcgccagaagttgccacccttttgccagcaggggtacctgaggatgcagggactcgtgagtaccgagagcctttggcagcacagagtggagagcaggctcctgcgggactatgcccccacaggcaggcgcctggaggacagcagccagcagcttggcgaccaagagccactaggttcccccctggctccagggcctctggctcagtccgtcgatagcaacaaagaggagctctgactgtcccttcctaagctgtgggcacagtggccaggcctccccacctaggcccatggtcagtccctctttccccgcaacctcacactcccgccaatgcgtgattgccaaagaccactcagatcatggcagtgtctgcagcaaagccaccagatggcacgtgagggctgaaagtcggggatgcggtggtctcctccctcctgtcagggggcagaagggcatcctctgccaggtgggagctgccttccccagcccagtttgtctgcaatggagctgtcgctgagccccaggccagcccagttctgccccgtctcaagtgctcctcttccttccaagcccctcctcagatgggcctgcatcccgcctgtggagtgcttcacaggggaaacccatccgcatcttaagagtttgtggcaagcgctttaaaacaaaagctctgatatcctcaacaaccacaacgggcaggtgggattgttgccccagatgactgctgaagacaccagctgtgggatgtcaagtaattccagggacccccagctgggagtccccgtctgtgtcacttgccacacactgcctcaacctccccgccccattttcagcagggtttgggcttagctacagagcccaagagggtcagccctgcttatcatcataggcccagcaggctgatctcgagcagcgataggacagctccctgcaaagccatcttagcaactttctcactgagaagcaggattcagagctgctctccccagttgcaccccctgactcatcttccagctggctcttctctcccatcctactcccttctgtctccctgccctctgccatcctgaaccatgccttgcttctaacctgcctggtcaagttttgtgaaacttatcctgctgtctcgggctggcacccatatgtgctcaccatgtgtaaggtgacatttccaaatgcctttgtgtgataatgatgatgaatttggttcctagtctcttcttcattgcccttcctcaccagcaatctgcactttcccatcaggcgtcttagtctcatttgtaagtgcataagataatcacagtgatttttcaaagcccaggatcataagtgattgctttttcactggttcttactaactcttcatgtatccactcaggtgatccacctgtcttggcctcctaaagtgttgggattacaggcatgagccaccacgctcggcccagtccagactttttaactacctggccccactgcagacacagttccctctagtccttcccagagttacaagaagagaactccagtagccttattctgtcagggacgaattgtttaccccatgataatgtaggatatcataaattcttcttcaaaggttttagcctgtaatttgttaagtacattgagttctgagatcctctccaaagaaccaatgtatcagtatgttcagctcacctgttctttgttcttcattttaacttttaatttcctcattctttatgtctccttgcccctagtttcagtaaacaatcccctcctagcctctgtcacctgctctgacctgagtcacctttagtcacctggtccgtaaccatctttcctgtctaaacttctcaccccaccactctggcttatacccctgctctctttaaaatagccagtcagaattagcttagattgtgcggtccaaccctagcccataggggaacaacacagcagtagggggtacctgcatcagggataagaacccattcccctcccttgttccggtgtgctctcgccattgcaccatccatgagacgcactcttgtatagaagtaaaattgccttgctgagaaaatgtaaaaaaaaaa

SEQ ID NO: 361348 - DNA, 2470 bp, Homo sapiens
gtgcagcgtgccgttcctccctctggctgttccagtgcgtgctgttcaccggctcctggagcaccgccaccacagcgtcacctggcccgccactgagctccccatcacacagctgaccagctccatcgtgcggcgcgtgaatgaggcttctgggctctaccagatgttcggtgtgctggccgatgtcatcctgttgaaggaaacaggaggtgaggttccgccctgcacactggcccctgcctcggcccacggccatccatcacatcgtggaagacttcttaacagactggactgccccgatcgggcacatcctacctctgaggcgcttcctggagaactgtttggacaccgatttgcgaagcttctatgcagagtcctgcttcctgttcgccctcacgcgccagaagttgccacccttttgccagcaggggtacctgaggatgcagggactcgtgagtaccgagagcctttggcagcacagagtggagagcaggctcctgcgggactatgcccccacaggcaggcgcctggaggacagcagccagcagcttggcgaccaagagccactaggttcccccctggctccagggcctctggctcagtccgtcgatagcaacaaagaggagctctgactgtcccttcctaagctgtgggcacagtggccaggcctccccacctaggcccatggtcagtccctctttccccgcaacctcacactcccgccaatgcgtgattgccaaagaccactcagatcatggcagtgtctgcagcaaagccaccagatggcacgtgagggctgaaagtcggggatgcggtggtctcctccctcctgtcagggggcagaagggcatcctctgccaggtgggagctgccttccccagcccagtttgtctgcaatggagctgtcgctgagccccaggccagcccagttctgccccgtctcaagtgctcctcttccttccaagcccctcctcagatgggcctgcatcccgcctgtggagtgcttcacaggggaaacccatccgcatcttaagagtttgtggcaagcgctttaaaacaaaagctctgatatcctcaacaaccacaacgggcaggtgggattgttgccccagatgactgctgaagacaccagctgtgggatgtcaagtaattccagggacccccagctgggagtccccgtctgtgtcacttgccacacactgcctcaacctccccgccccattttcagcagggtttgggcttagctacagagcccaagagggtcagccctgcttatcatcataggcccagcaggctgatctcgagcagcgataggacagctccctgcaaagccatcttagcaactttctcactgagaagcaggattcagagctgctctccccagttgcaccccctgactcatcttccagctggctcttctctcccatcctactcccttctgtctccctgccctctgccatcctgaaccatgccttgcttctaacctgcctggtcaagttttgtgaaacttatcctgctgtctcgggctggcacccatatgtgctcaccatgtgtaaggtgacatttccaaatgcctttgtgtgataatgatgatgaatttggttcctagtctcttcttcattgcccttcctcaccagcaatctgcactttcccatcaggcgtcttagtctcatttgtaagtgcataagataatcacagtgatttttcaaagcccaggatcataagtgattgctttttcactggttcttactaactcttcatgtatccactcaggtgatccacctgtcttggcctcctaaagtgttgggattacaggcatgagccaccacgctcggcccagtccagactttttaactacctggccccactgcagacacagttccctctagtccttcccagagttacaagaagagaactccagtagccttattctgtcagggacgaattgtttaccccatgataatgtaggatatcataaattcttcttcaaaggttttagcctgtaatttgttaagtacattgagttctgagatcctctccaaagaaccaatgtatcagtatgttcagctcacctgttctttgttcttcattttaacttttaatttcctcattctttatgtctccttgcccctagtttcagtaaacaatcccctcctagcctctgtcacctgctctgacctgagtcacctttagtcacctggtccgtaaccatctttcctgtctaaacttctcaccccaccactctggcttatacccctgctctctttaaaatagccagtcagaattagcttagattgtgcggtccaaccctagcccataggggaacaacacagcagtagggggtacctgcatcagggataagaacccattcccctcccttgttccggtgtgctctcgccattgcaccatccatgagacgcactcttgtatagaagtaaaattgccttgctgagaaaatgtaaaaaaaaaa

SEQ ID NO: 361349 - DNA, 2000 bp, Homo sapiens
agaccacgggttgcagccggagcggctgggaggatgggcctctccgctgcggccccgttgtggggtcccccggggctgctcctggccatcgccctgcacccagcgctgtcggtgcccccgcgccgggactactgcgtgctgggcgctgggcccgcgggcctgcagatggcctacttcctgcagcgcgctggacgcgactacgcagtgttcgagcgggccccgcggcccggcagcttcttcacacgctacccgcggcaccgcaagctcatcagcatcaacaagcggtacacgggcaaggctaacgccgagttcaacctccgccacgactggaactctctgctcagccacgacccccggctgctcttcagacactactcgcgtgcctacttccccgacgcccgcgacatggtgcgctacctgggtgacttcgcggacacgctggggctccgtgtccagtacaacaccaccatcgcccacgtcactctggacaaggaccgacaggcctggaatggccactacttcatcctaactgaccagaagggccaggtgcatcagtgcagcgtcctccttgtagccactggtttatcagtccccaaccaggttgacttccctggctccgaatatgcagagggttacgagtccgtgtccgtggaccctgaggactttgtaggccagaatgtgctgatcctgggtcgtgggaactcggcctttgagacagcagagaacatcttgggtgtcacaaactttatccatatgctcagccgctcccgggtccgtctgtcctgggccacccactacgttggagacctcagagccatcaacaatggcctgctggatacctaccagctcaagtccctggacgggctgctcgagtctgacctgacggatctggccatcctgaaggacagcaaaggcaagttccatgtcaccccgaaattcttcctggaagaagccagcaccaaccagagtgccgactccatcaccctcccccaggacgacaatgacaactttgccatgcgcgtgccctatgaccgggtaatccgctgcctgggctggaactttgacttctccattttcaataagtccctcagacttaactcgggaaatgcattcggcaagaagtacccgctgattcgagctagctacgaatccaaaggaagccggggtctgtttatcctgggtactgccagccactcggtggactaccggaaatctgctgggggcttcatccacggattccgatacacagtgcgtgctgttcaccggctcctggagcaccgccaccacagcgtcacctggcccgccactgagctccccatcacacagctgaccagctccatcgtgcggcgcgtgaatgaggcttctgggctctaccagatgttcggtgtgctggccgatgtcatcctgttgaaggagaattccacggcctttgagtacctggaggagttccccatacagatgctggcccagctggagacactcacagggaggaaggcaaagcacgggctcttcgtcatcaacatggaatatggcagaaatttctctggccccgacaaggacgtcttctttgatgaccggtctgtggggcacacagaagatgcctggcagtctaactttcttcatcctgtcatctactactatagatacctccccaccgaacaggaggtgaggttccgccctgcacactggcccctgcctcggcccacggccatccatcacatcgtggaagacttcttaacagactggactgccccgatcgggcacatcctacctctgaggcgcttcctggagaactgtttggacaccgatttgcgaagcttctatgcagagtcctgcttcctgttcgccctcacgcgccagaagttgccacccttttgccagcaggggtacctgaggatgcagggactcatggctcagcgacttcttctgaggaggttcctggcctctgtcatctccaggaagccctctcagggtcagtggccacccctcacttccagagc

SEQ ID NO: 361350 - DNA, 1378 bp, Homo sapiens
actgtgtttatgtttttattttgattcatacttggcttgctgaaaaatacgctgtaaatataaaatactgcagtaatgccgacaatcaacatggtgaaaggtgacagtctttttgatttctgctcaactcattattttatacaataagctcagacgaataatacccaatttggataatgttacgcttgacaaaacactttacttcatttagtcctcacaacaaccctgtgaggtaggcacattctcggaggtaaaatgacgtgggcaaagttccctggctcgtttggggaaaggctcagcagccgggccaagaaaggtctttgggggcgcaagtctttggagggcaggtctttggggagcgctttgagtaatattagagctttcactaaaccctggcctattacgtcccctcccctgagatttacctttatatactcaagttctttcatgccaggaaggtaggctgaaggcttcgaaaacctgcagctcatacccaaagctagcactgtctatccctggagacccagcgcccaaaagctccactgggcgcatagcgcacggcacgcctcctcccccgagccgcagactgagtaactggccccggactaacctgaccaggtcggtcatgcaggagcccaccactaccaccgccgccacctcctcttgccactgcctctggggttccccagacgccgccatcgctcaaaggtgctgctgtccaacctggacggtgacctctgccctttgcccgaccccgtaaccagagacgccactcctgccctccctaacgacgcgggcctttcagacgcctacgcgggtcgcccacctgactgcccgaaatcaccccgcccaccaagtgtcccctcttcttcctggaatagtctcggtgcacagcctcacgtaacagggccctcctgatatggcgagactccgcgctcctcgtcactcacggggcaggcgctgaggaaggaactgtcaggcaccgcggggacgcctttccgagcgcccggctcggcgcggcgcgggggcgcgcacgccgcccagcttcggggccgcagagggggcgcgctcgggtacctgtaccccacgtagtcgccggttaccgatcggactaagttccaggtacctggactggggctggtgcggggaggttggatcccgagtcgcacaggtggcgtggagaactgtggtttaaatatggccaggggactcgcctcctcttcctatggagaaggcccccgttccaaagatgcccttctcatccccatcacgctgattccctcaagaacgagcccccaaggccagaggcgtctctttctccatatctggcccatcccctggttcctgtaaaccccgagtattagttccttgttgcctg

SEQ ID NO: 361351 - DNA, 470 bp, Homo sapiens
  misc_feature (1)..(3): n is a, c, g, or t
  misc_feature (38)..(38): n is a, c, g, or t
nnnggccagctaggcaatcgacaatttttgggacaatngtcctgagttccaggaggcagcatttgccaatggaaagctctaggaaacaccagtcttgagaggtggccagccagactgcctgtccacatgcgtgtcagcacatacagccgcttcctggaagccgcctggaatgtcttcacggcagcgttttgctcacacagcagcttttgcacgccccaggcagccccgactgctgaaatccaacttgagctggctggtggtccctggatcctagagcccttcacttcgggttactccctctttcttgcctctatttcttagttggaagaaataaactcacaaattatggtgcagtaattttccggggaaagtaaagcctcaggaatgcccacgcctttcttccaaagcctttgtctctgagacctcttaagttctaagattaaatgcccctcgctgttcttcctctgaaa

SEQ ID NO: 361352 - DNA, 1452 bp, Homo sapiens
actgtgtttatgtttttattttgattcatacttggcttgctgaaaaatacgctgtaaatataaaatactgcagtaatgccgacaatcaacatggtgaaaggtgacagtctttttgatttctgctcaactcattattttatacaataagctcagacgaataatacccaatttggataatgttacgcttgacaaaacactttacttcatttagtcctcacaacaaccctgtgaggtaggcacattctcggaggtaaaatgacgtgggcaaagttccctggctcgtttggggaaaggctcagcagccgggccaagaaaggtctttgggggcgcaagtctttggagggcaggtctttggggagcgctttgagtaatattagagctttcactaaaccctggcctattacgtcccctcccctgagatttacctttatatactcaagttctttcatgccaggaaggtaggctgaaggcttcgaaaacctgcagctcatacccaaagctagcactgtctatccctggagacccagcgcccaaaagctccactgggcgcatagcgcacggcacgcctcctcccccgagccgcagactgagtaactggccccggactaacctgaccaggtcggtcatgcaggagcccaccactaccaccgccgccacctcctcttgccactgcctctggggttccccagacgccgccatcgctcaaaggtgctgctgtccaacctggacggtgacctctgccctttgcccgaccccgtaaccagagacgccactcctgccctccctaacgacgcgggcctttcagacgcctacgcgggtcgcccacctgactgcccgaaatcaccccgcccaccaagtgtcccctcttcttcctggaatagtctcggtgcacagcctcacgtaacagggccctcctgatatggcgagactccgcgctcctcgtcactcacggggcaggcgctgaggaaggaactgtcaggcaccgcggggacgcctttccgagcgcccggctcggcgcggcgcgggggcgcgcacgccgcccagcttcggggccgcagagggggcggggcgggacgtccggggagtgcgcacgcatcctgcccgcggcgcgcgcgcaggtcggtgcgtctgtcgggggcgcgctcgggtacctgtaccccacgtagtcgccggttaccgatcggactaagttccaggtacctggactggggctggtgcggggaggttggatcccgagtcgcacaggtggcgtggagaactgtggtttaaatatggccaggggactcgcctcctcttcctatggagaaggcccccgttccaaagatgcccttctcatccccatcacgctgattccctcaagaacgagcccccaaggccagaggcgtctctttctccatatctggcccatcccctggttcctgtaaaccccgagtattagttccttgttgcctg

SEQ ID NO: 361353 - DNA, 223 bp, Homo sapiens
gatcatcaagactttatccaaggaggaagagaccaagaaataaaacctccctctttcttgcctctatttcttagttggaagaaataaactcacaaattatggtgcagtaattttccggggaaagtaaagcctcaggaatgcccacgcctttcttccaaagcctttgtctctgagacctcttaagttctaagattaaatgcccctcgctgttcttcctctgaaa

SEQ ID NO: 361354 - DNA, 2760 bp, Homo sapiens
actgtgtttatgtttttattttgattcatacttggcttgctgaaaaatacgctgtaaatataaaatactgcagtaatgccgacaatcaacatggtgaaaggtgacagtctttttgatttctgctcaactcattattttatacaataagctcagacgaataatacccaatttggataatgttacgcttgacaaaacactttacttcatttagtcctcacaacaaccctgtgaggtaggcacattctcggaggtaaaatgacgtgggcaaagttccctggctcgtttggggaaaggctcagcagccgggccaagaaaggtctttgggggcgcaagtctttggagggcaggtctttggggagcgctttgagtaatattagagctttcactaaaccctggcctattacgtcccctcccctgagatttacctttatatactcaagttctttcatgccaggaaggtaggctgaaggcttcgaaaacctgcagctcatacccaaagctagcactgtctatccctggagacccagcgcccaaaagctccactgggcgcatagcgcacggcacgcctcctcccccgagccgcagactgagtaactggccccggactaacctgaccaggtcggtcatgcaggagcccaccactaccaccgccgccacctcctcttgccactgcctctggggttccccagacgccgccatcgctcaaaggtgctgctgtccaacctggacggtgacctctgccctttgcccgaccccgtaaccagagacgccactcctgccctccctaacgacgcgggcctttcagacgcctacgcgggtcgcccacctgactgcccgaaatcaccccgcccaccaagtgtcccctcttcttcctggaatagtctcggtgcacagcctcacgtaacagggccctcctgatatggcgagactccgcgctcctcgtcactcacggggcaggcgctgaggaaggaactgtcaggcaccgcggggacgcctttccgagcgcccggctcggcgcggcgcgggggcgcgcacgccgcccagcttcggggccgcagagggggcggggcgggacgtccggggagtgcgcacgcatcctgcccgcggcgcgcgcgcaggtcggtgcgtctgtcgggggcgcgctcgggtacctgtaccccacgtagtcgccggttaccgatcggactaagttccagtggtgatttacaagtcaagttaaaatgtccccagaagtggccttgaaccgaatatctccaatgctctcccctttcatatctagcgtggtccggaatggaaaagtgggactggatgctacaaactgtttgaggataactgacttaaaatctggctgcacatcattgactcctgggcccaactgtgaccgatttaaactgcacataccatatgctggagagacattaaagtgggatatcattttcaatgcccaatacccagaactgcctcccgattttatctttggagaagatgctgaattcctgccagacccctcagctttgcagaatcttgcctcctggaatccttcaaatcctgaatgtctcttacttgtggtgaaggaacttgtgcaacaatatcaccaattccaatgtagccgcctccgggagagctcccgcctcatgtttgaataccagacattactggaggagccacagtatggagagaacatggaaatttatgctgggaaaaaaaacaactggactggtgaattttcagctcgtttccttttgaagctgcccgtagatttcagcaatatccccacataccttctcaaggatgtaaatgaagaccctggagaagatgtggccctcctctctgttagttttgaggacactgaagccacccaggtgtaccccaagctgtacttgtcacctcgaattgagcatgcacttggaggctcctcagctcttcatatcccagcttttccaggaggaggatgtctcattgattacgttcctcaagtatgccacctgctcaccaacaaggtgcagtacgtgattcaagggtatcacaaaagaagagagtatattgctgcttttctcagtcactttggcacaggtgtcgtggaatatgatgcagaaggctttacaaaactcactctgctgctgatgtggaaagatttttgttttcttgtacacattgacctgcctctgtttttccctcgagaccagccaactctcacatttcagtccgtttatcactttaccaacagtggacagctttactcccaggcccaaaaaaattatccgtacagccccagatgggatggaaatgaaatggccaaaagagcaaaggcttatttcaaaacctttgtccctcagttccaggaggcagcatttgccaatggaaagctctaggaaacaccagtcttgagaggtggccagccagactgcctgtccacatgcgtgtcagcacatacagccgcttcctggaagccgcctggaatgtcttcacggcagcgttttgctcacacagcagcttttgcacgccccaggcagccccgactgctgaaatccaacttgagctggctggtggtccctggatcctagagcccttcacttcgggttactccctctttcttgcctctatttcttagttggaagaaataaactcacaaattatggtgcagtaattttccggggaaagtaaagcctcaggaatgcccacgcctttcttccaaagcctttgtctctgagacctcttaagttctaagattaaatgcccctcgctgttcttcctctgaaa

SEQ ID NO: 361355 - DNA, 2778 bp, Homo sapiens
  misc_feature (594)..(594): n is a, c, g, or t
cccccttaggtattgattaccccctggcgcccctttccaaggccctgaaccagcttccccagcatctcagcctgcccacccttgaggccaagttaaatctcagcctcacctttcattggcaccagaacacatctgagagggtgtaggaaactggggatccaggtcaagcaattggcaggggcctggattgaacaaggttttcactcccactcctgcgggccaattgttagggcttccaaagaagttgctggagttatttcgagctggcagaccatgactttggctctgctaatgacattggctgctgccctcagatcctccgtattcaaaagtaaatttgctccagccactatgacaatgatattctggccttcattattgacaattatagaagcagttcctgtagcagcatctttagtctgatatgtaaattctgtagaaatatcattctgttttaagttttctatataatcattgccaaaagaatctttgccaaccttacacaccatggacgtcattgctccaagccgagcagcttggacacactggttggcacctttccctccaaagccaataaaaaacttatgtccatgnatggtttctccagtttttggcaaacgagaagtaagagaccaggtcggtcatgcaggagcccaccactaccaccgccgccacctcctcttgccactgcctctggggttccccagacgccgccatcgctcaaaggtgctgctgtccaacctggacggtgacctctgccctttgcccgaccccgtaaccagagacgccactcctgccctccctaacgacgcgggcctttcagacgcctacgcgggtcgcccacctgactgcccgaaatcaccccgcccaccaagtgtcccctcttcttcctggaatagtctcggtgcacagcctcacgtaacagggccctcctgatatggcgagactccgcgctcctcgtcactcacggggcaggcgctgaggaaggaactgtcaggcaccgcggggacgcctttccgagcgcccggctcggcgcggcgcgggggcgcgcacgccgcccagcttcggggccgcagagggggcggggcgggacgtccggggagtgcgcacgcatcctgcccgcggcgcgcgcgcaggtcggtgcgtctgtcgggggcgcgctcgggtacctgtaccccacgtagtcgccggttaccgatcggactaagttccagtggtgatttacaagtcaagttaaaatgtccccagaagtggccttgaaccgaatatctccaatgctctcccctttcatatctagcgtggtccggaatggaaaagtgggactggatgctacaaactgtttgaggataactgacttaaaatctggctgcacatcattgactcctgggcccaactgtgaccgatttaaactgcacataccatatgctggagagacattaaagtgggatatcattttcaatgcccaatacccagaactgcctcccgattttatctttggagaagatgctgaattcctgccagacccctcagctttgcagaatcttgcctcctggaatccttcaaatcctgaatgtctcttacttgtggtgaaggaacttgtgcaacaatatcaccaattccaatgtagccgcctccgggagagctcccgcctcatgtttgaataccagacattactggaggagccacagtatggagagaacatggaaatttatgctgggaaaaaaaacaactggactggtgaattttcagctcgtttccttttgaagctgcccgtagatttcagcaatatccccacataccttctcaaggatgtaaatgaagaccctggagaagatgtggccctcctctctgttagttttgaggacactgaagccacccaggtgtaccccaagctgtacttgtcacctcgaattgagcatgcacttggaggctcctcagctcttcatatcccagcttttccaggaggaggatgtctcattgattacgttcctcaagtatgccacctgctcaccaacaaggtgcagtacgtgattcaagggtatcacaaaagaagagagtatattgctgcttttctcagtcactttggcacaggtgtcgtggaatatgatgcagaaggctttacaaaactcactctgctgctgatgtggaaagatttttgttttcttgtacacattgacctgcctctgtttttccctcgagaccagccaactctcacatttcagtccgtttatcactttaccaacagtggacagctttactcccaggcccaaaaaaattatccgtacagccccagatgggatggaaatgaaatggccaaaagagcaaaggcttatttcaaaacctttgtccctcagttccaggaggcagcatttgccaatggaaagctctaggaaacaccagtcttgagaggtggccagccagactgcctgtccacatgcgtgtcagcacatacagccgcttcctggaagccgcctggaatgtcttcacggcagcgttttgctcacacagcagcttttgcacgccccaggcagccccgactgctgaaatccaacttgagctggctggtggtccctggatcctagagcccttcacttcgggttactccctctttcttgcctctatttcttagttggaagaaataaactcacaaattatggtgcagtaattttccggggaaagtaaagcctcaggaatgcccacgcctttcttccaaagcctttgtctctgagacctcttaagttctaagattaaatgcccctcgctgttcttcctctgaaa

SEQ ID NO: 361356 - DNA, 2724 bp, Homo sapiens
  misc_feature (540)..(540): n is a, c, g, or t
cccccttaggtattgattaccccctggcgcccctttccaaggccctgaaccagcttccccagcatctcagcctgcccacccttgaggccaagttaaatctcagcctcacctttcattggcaccagaacacatctgagagggtgtaggaaactggggatccaggtcaagcaattggcaggggcctggattgaacaaggttttcactcccactcctgcgggccaattgttagggcttccaaagaagttgctggagttatttcgagctggcagaccatgactttggctctgctaatgacattggctgctgccctcagatcctccgtattcaaaagtaaatttgctccagccactatgacaatgatattctggccttcattattgacaattatagaagcagttcctaagttttctatataatcattgccaaaagaatctttgccaaccttacacaccatggacgtcattgctccaagccgagcagcttggacacactggttggcacctttccctccaaagccaataaaaaacttatgtccatgnatggtttctccagtttttggcaaacgagaagtaagagaccaggtcggtcatgcaggagcccaccactaccaccgccgccacctcctcttgccactgcctctggggttccccagacgccgccatcgctcaaaggtgctgctgtccaacctggacggtgacctctgccctttgcccgaccccgtaaccagagacgccactcctgccctccctaacgacgcgggcctttcagacgcctacgcgggtcgcccacctgactgcccgaaatcaccccgcccaccaagtgtcccctcttcttcctggaatagtctcggtgcacagcctcacgtaacagggccctcctgatatggcgagactccgcgctcctcgtcactcacggggcaggcgctgaggaaggaactgtcaggcaccgcggggacgcctttccgagcgcccggctcggcgcggcgcgggggcgcgcacgccgcccagcttcggggccgcagagggggcggggcgggacgtccggggagtgcgcacgcatcctgcccgcggcgcgcgcgcaggtcggtgcgtctgtcgggggcgcgctcgggtacctgtaccccacgtagtcgccggttaccgatcggactaagttccagtggtgatttacaagtcaagttaaaatgtccccagaagtggccttgaaccgaatatctccaatgctctcccctttcatatctagcgtggtccggaatggaaaagtgggactggatgctacaaactgtttgaggataactgacttaaaatctggctgcacatcattgactcctgggcccaactgtgaccgatttaaactgcacataccatatgctggagagacattaaagtgggatatcattttcaatgcccaatacccagaactgcctcccgattttatctttggagaagatgctgaattcctgccagacccctcagctttgcagaatcttgcctcctggaatccttcaaatcctgaatgtctcttacttgtggtgaaggaacttgtgcaacaatatcaccaattccaatgtagccgcctccgggagagctcccgcctcatgtttgaataccagacattactggaggagccacagtatggagagaacatggaaatttatgctgggaaaaaaaacaactggactggtgaattttcagctcgtttccttttgaagctgcccgtagatttcagcaatatccccacataccttctcaaggatgtaaatgaagaccctggagaagatgtggccctcctctctgttagttttgaggacactgaagccacccaggtgtaccccaagctgtacttgtcacctcgaattgagcatgcacttggaggctcctcagctcttcatatcccagcttttccaggaggaggatgtctcattgattacgttcctcaagtatgccacctgctcaccaacaaggtgcagtacgtgattcaagggtatcacaaaagaagagagtatattgctgcttttctcagtcactttggcacaggtgtcgtggaatatgatgcagaaggctttacaaaactcactctgctgctgatgtggaaagatttttgttttcttgtacacattgacctgcctctgtttttccctcgagaccagccaactctcacatttcagtccgtttatcactttaccaacagtggacagctttactcccaggcccaaaaaaattatccgtacagccccagatgggatggaaatgaaatggccaaaagagcaaaggcttatttcaaaacctttgtccctcagttccaggaggcagcatttgccaatggaaagctctaggaaacaccagtcttgagaggtggccagccagactgcctgtccacatgcgtgtcagcacatacagccgcttcctggaagccgcctggaatgtcttcacggcagcgttttgctcacacagcagcttttgcacgccccaggcagccccgactgctgaaatccaacttgagctggctggtggtccctggatcctagagcccttcacttcgggttactccctctttcttgcctctatttcttagttggaagaaataaactcacaaattatggtgcagtaattttccggggaaagtaaagcctcaggaatgcccacgcctttcttccaaagcctttgtctctgagacctcttaagttctaagattaaatgcccctcgctgttcttcctctgaaa

SEQ ID NO: 361357 - DNA, 2242 bp, Homo sapiens
actgtgtttatgtttttattttgattcatacttggcttgctgaaaaatacgctgtaaatataaaatactgcagtaatgccgacaatcaacatggtgaaaggtgacagtctttttgatttctgctcaactcattattttatacaataagctcagacgaataatacccaatttggataatgttacgcttgacaaaacactttacttcatttagtcctcacaacaaccctgtgaggtaggcacattctcggaggtaaaatgacgtgggcaaagttccctggctcgtttggggaaaggctcagcagccgggccaagaaaggtctttgggggcgcaagtctttggagggcaggtctttggggagcgctttgagtaatattagagctttcactaaaccctggcctattacgtcccctcccctgagatttacctttatatactcaagttctttcatgccaggaaggtaggctgaaggcttcgaaaacctgcagctcatacccaaagctagcactgtctatccctggagacccagcgcccaaaagctccactgggcgcatagcgcacggcacgcctcctcccccgagccgcagactgagtaactggccccggactaacctaagcaagagataaagtaataatgggtactgtggggaaaaacacagaagaacaattcggtaatatagtggtgatttacaagtcaagttaaaatgtccccagaagtggccttgaaccgaatatctccaatgctctcccctttcatatctagcgtggtccggaatggaaaagtgggactggatgctacaaactgtttgaggataactgacttaaaatctggctgcacatcattgactcctgggcccaactgtgaccgatttaaactgcacataccatatgctggagagacattaaagtgggatatcattttcaatgcccaatacccagaactgcctcccgattttatctttggagaagatgctgaattcctgccagacccctcagctttgcagaatcttgcctcctggaatccttcaaatcctgaatgtctcttacttgtggtgaaggaacttgtgcaacaatatcaccaattccaatgtagccgcctccgggagagctcccgcctcatgtttgaataccagacattactggaggagccacagtatggagagaacatggaaatttatgctgggaaaaaaaacaactggactggtgaattttcagctcgtttccttttgaagctgcccgtagatttcagcaatatccccacataccttctcaaggatgtaaatgaagaccctggagaagatgtggccctcctctctgttagttttgaggacactgaagccacccaggtgtaccccaagctgtacttgtcacctcgaattgagcatgcacttggaggctcctcagctcttcatatcccagcttttccaggaggaggatgtctcattgattacgttcctcaagtatgccacctgctcaccaacaaggtgcagtacgtgattcaagggtatcacaaaagaagagagtatattgctgcttttctcagtcactttggcacaggtgtcgtggaatatgatgcagaaggctttacaaaactcactctgctgctgatgtggaaagatttttgttttcttgtacacattgacctgcctctgtttttccctcgagaccagccaactctcacatttcagtccgtttatcactttaccaacagtggacagctttactcccaggcccaaaaaaattatccgtacagccccagatgggatggaaatgaaatggccaaaagagcaaaggcttatttcaaaacctttgtccctcagttccaggaggcagcatttgccaatggaaagctctaggaaacaccagtcttgagaggtggccagccagactgcctgtccacatgcgtgtcagcacatacagccgcttcctggaagccgcctggaatgtcttcacggcagcgttttgctcacacagcagcttttgcacgccccaggcagccccgactgctgaaatccaacttgagctggctggtggtccctggatcctagagcccttcacttcgggttactccctctttcttgcctctatttcttagttggaagaaataaactcacaaattatggtgcagtaattttccggggaaagtaaagcctcaggaatgcccacgcctttcttccaaagcctttgtctctgagacctcttaagttctaagattaaatgcccctcgctgttcttcctctgaaa

SEQ ID NO: 361358 - DNA, 1636 bp, Homo sapiens
cggtgacggagactgcccaggtgtggtcaccatgttcctctccgcggtcttctttgccaagagcaagtcaaatggtgatttacaagtcaagttaaaatgtccccagaagtggccttgaaccgaatatctccaatgctctcccctttcatatctagcgtggtccggaatggaaaagtgggactggatgctacaaactgtttgaggataactgacttaaaatctggctgcacatcattgactcctgggcccaactgtgaccgatttaaactgcacataccatatgctggagagacattaaagtgggatatcattttcaatgcccaatacccagaactgcctcccgattttatctttggagaagatgctgaattcctgccagacccctcagctttgcagaatcttgcctcctggaatccttcaaatcctgaatgtctcttacttgtggtgaaggaacttgtgcaacaatatcaccaattccaatgtagccgcctccgggagagctcccgcctcatgtttgaataccagacattactggaggagccacagtatggagagaacatggaaatttatgctgggaaaaaaaacaactggactggtgaattttcagctcgtttccttttgaagctgcccgtagatttcagcaatatccccacataccttctcaaggatgtaaatgaagaccctggagaagatgtggccctcctctctgttagttttgaggacactgaagccacccaggtgtaccccaagctgtacttgtcacctcgaattgagcatgcacttggaggctcctcagctcttcatatcccagcttttccaggaggaggatgtctcattgattacgttcctcaagtatgccacctgctcaccaacaaggtgcagtacgtgattcaagggtatcacaaaagaagagagtatattgctgcttttctcagtcactttggcacaggtgtcgtggaatatgatgcagaaggctttacaaaactcactctgctgctgatgtggaaagatttttgttttcttgtacacattgacctgcctctgtttttccctcgagaccagccaactctcacatttcagtccgtttatcactttaccaacagtggacagctttactcccaggcccaaaaaaattatccgtacagccccagatgggatggaaatgaaatggccaaaagagcaaaggcttatttcaaaacctttgtccctcagttccaggaggcagcatttgccaatggaaagctctaggaaacaccagtcttgagaggtggccagccagactgcctgtccacatgcgtgtcagcacatacagccgcttcctggaagccgcctggaatgtcttcacggcagcgttttgctcacacagcagcttttgcacgccccaggcagccccgactgctgaaatccaacttgagctggctggtggtccctggatcctagagcccttcacttcgggttactccctctttcttgcctctatttcttagttggaagaaataaactcacaaattatggtgcagtaattttccggggaaagtaaagcctcaggaatgcccacgcctttcttccaaagcctttgtctctgagacctcttaagttctaagattaaatgcccctcgctgttcttcctctgaaa

SEQ ID NO: 361359 - DNA, 3045 bp, Homo sapiens
actgtgtttatgtttttattttgattcatacttggcttgctgaaaaatacgctgtaaatataaaatactgcagtaatgccgacaatcaacatggtgaaaggtgacagtctttttgatttctgctcaactcattattttatacaataagctcagacgaataatacccaatttggataatgttacgcttgacaaaacactttacttcatttagtcctcacaacaaccctgtgaggtaggcacattctcggaggtaaaatgacgtgggcaaagttccctggctcgtttggggaaaggctcagcagccgggccaagaaaggtctttgggggcgcaagtctttggagggcaggtctttggggagcgctttgagtaatattagagctttcactaaaccctggcctattacgtcccctcccctgagatttacctttatatactcaagttctttcatgccaggaaggtaggctgaaggcttcgaaaacctgcagctcatacccaaagctagcactgtctatccctggagacccagcgcccaaaagctccactgggcgcatagcgcacggcacgcctcctcccccgagccgcagactgagtaactggccccggactaacctgaccaggtcggtcatgcaggagcccaccactaccaccgccgccacctcctcttgccactgcctctggggttccccagacgccgccatcgctcaaaggtgctgctgtccaacctggacggtgacctctgccctttgcccgaccccgtaaccagagacgccactcctgccctccctaacgacgcgggcctttcagacgcctacgcgggtcgcccacctgactgcccgaaatcaccccgcccaccaagtgtcccctcttcttcctggaatagtctcggtgcacagcctcacgtaacagggccctcctgatatggcgagactccgcgctcctcgtcactcacggggcaggcgctgaggaaggaactgtcaggcaccgcggggacgcctttccgagcgcccggctcggcgcggcgcgggggcgcgcacgccgcccagcttcggggccgcagagggggcggggcgggacgtccggggagtgcgcacgcatcctgcccgcggcgcgcgcgcaggtcggtgcgtctgtcgggggcgcgctcgggtacctgtaccccacgtagtcgccggttaccgatcggactaagttccagtggtgatttacaagtcaagttaaaatgtccccagaagtggccttgaaccgaatatctccaatgctctcccctttcatatctagcgtggtccggaatggaaaagtgggactggatgctacaaactgtttgaggataactgacttaaaatctggctgcacatcattgactcctgggcccaactgtgaccgatttaaactgcacataccatatgctggagagacattaaagtgggatatcattttcaatgcccaatacccagaactgcctcccgattttatctttggagaagatgctgaattcctgccagacccctcagctttgcagaatcttgcctcctggaatccttcaaatcctgaatgtctcttacttgtggtgaaggaacttgtgcaacaatatcaccaattccaatgtagccgcctccgggagagctcccgcctcatgtttgaataccagacattactggaggagccacagtatggagagaacatggaaatttatgctgggaaaaaaaacaactggactggtgaattttcagctcgtttccttttgaagctgcccgtagatttcagcaatatccccacataccttctcaaggatgtaaatgaagaccctggagaagatgtggccctcctctctgttagttttgaggacactgaagccacccaggtgtaccccaagctgtacttgtcacctcgaattgagcatgcacttggaggctcctcagctcttcatatcccagcttttccaggaggaggatgtctcattgattacgttcctcaagtatgccacctgctcaccaacaaggtgcagtacgtgattcaagggtatcacaaaagaagagagtatattgctgcttttctcagtcactttggcacaggtgtcgtggaatatgatgcagaaggctttacaaaactcactctgctgctgatgtggaaagatttttgttttcttgtacacattgacctgcctctgtttttccctcgagaccagccaactctcacatttcagtccgtttatcactttaccaacagtggacagctttactcccaggcccaaaaaaattatccgtacagccccagatgggatggaaatgaaatggccaaaagagcaaaggcttatttcaaaacctttgtccctcagttccaggaggcagcatttgccaatggaaagctctaggaaacaccagtcttgagaggtggccagccagactgcctgtccacatgcgtgtcagcacatacagccgcttcctggaagccgcctggaatgtcttcacggcagcgttttgctcacacagcagcttttgcacgccccaggcagccccgactgctgaaatccaacttgagctggctggtggtccctggatcctagagcccttcacttcgggttactccctctttcttgcctctatttcttagttggaagaaataaactcacaaattatggtgcagtaattttccggggaaagtaaagcctcaggaatgcccacgcctttcttccaaagcctttgtctctgagacctcttaagttctaagattaaatgcccctcgctgttcttcctctgaaactagtgtcttccctctgtgcgtgcatgtgtgtgtttcatacccaagcatttcctatctggggcagtccttcacggcgagaaggagttacctgagtcaatgtgaccaacctgctgggtttcagccactcatccagcctgacctaaggctgttgctcaataacaaatggcctctagcacacacagccccacccgctgccatccatacccctccagccccctgtgtggacaccttgttcccaggccagccccacacagtaggcagtcattaaagtttggtgagtgcac

SEQ ID NO: 361360 - DNA, 3137 bp, Homo sapiens
actgtgtttatgtttttattttgattcatacttggcttgctgaaaaatacgctgtaaatataaaatactgcagtaatgccgacaatcaacatggtgaaaggtgacagtctttttgatttctgctcaactcattattttatacaataagctcagacgaataatacccaatttggataatgttacgcttgacaaaacactttacttcatttagtcctcacaacaaccctgtgaggtaggcacattctcggaggtaaaatgacgtgggcaaagttccctggctcgtttggggaaaggctcagcagccgggccaagaaaggtctttgggggcgcaagtctttggagggcaggtctttggggagcgctttgagtaatattagagctttcactaaaccctggcctattacgtcccctcccctgagatttacctttatatactcaagttctttcatgccaggaaggtaggctgaaggcttcgaaaacctgcagctcatacccaaagctagcactgtctatccctggagacccagcgcccaaaagctccactgggcgcatagcgcacggcacgcctcctcccccgagccgcagactgagtaactggccccggactaacctgaccaggtcggtcatgcaggagcccaccactaccaccgccgccacctcctcttgccactgcctctggggttccccagacgccgccatcgctcaaaggtgctgctgtccaacctggacggtgacctctgccctttgcccgaccccgtaaccagagacgccactcctgccctccctaacgacgcgggcctttcagacgcctacgcgggtcgcccacctgactgcccgaaatcaccccgcccaccaagtgtcccctcttcttcctggaatagtctcggtgcacagcctcacgtaacagggccctcctgatatggcgagactccgcgctcctcgtcactcacggggcaggcgctgaggaaggaactgtcaggcaccgcggggacgcctttccgagcgcccggctcggcgcggcgcgggggcgcgcacgccgcccagcttcggggccgcagagggggcggggcgggacgtccggggagtgcgcacgcatcctgcccgcggcgcgcgcgcaggtcggtgcgtctgtcgggggcgcgctcgggtacctgtaccccacgtagtcgccggttaccgatcggactaagttccagtggtgatttacaagtcaagttaaaatgtccccagaagtggccttgaaccgaatatctccaatgctctcccctttcatatctagcgtggtccggaatggaaaagtgggactggatgctacaaactgtttgaggataactgacttaaaatctggctgcacatcattgactcctgggcccaactgtgaccgatttaaactgcacataccatatgctggagagacattaaagtgggatatcattttcaatgcccaatacccagaactgcctcccgattttatctttggagaagatgctgaattcctgccagacccctcagctttgcagaatcttgcctcctggaatccttcaaatcctgaatgtctcttacttgtggtgaaggaacttgtgcaacaatatcaccaattccaatgtagccgcctccgggagagctcccgcctcatgtttgaataccagacattactggaggagccacagtatggagagaacatggaaatttatgctgggaaaaaaaacaactggactggtgaattttcagctcgtttccttttgaagctgcccgtagatttcagcaatatccccacataccttctcaaggatgtaaatgaagaccctggagaagatgtggccctcctctctgttagttttgaggacactgaagccacccaggtgtaccccaagctgtacttgtcacctcgaattgagcatgcacttggaggctcctcagctcttcatatcccagcttttccaggaggaggatgtctcattgattacgttcctcaagtatgccacctgctcaccaacaaggtgcagtacgtgattcaagggtatcacaaaagaagagagtatattgctgcttttctcagtcactttggcacaggtgtcgtggaatatgatgcagaaggctttacaaaactcactctgctgctgatgtggaaagatttttgttttcttgtacacattgacctgcctctgtttttccctcgagaccagccaactctcacatttcagtccgtttatcactttaccaacagtggacagctttactcccaggcccaaaaaaattatccgtacagccccagatgggatggaaatgaaatggccaaaagagcaaaggcttatttcaaaacctttgtccctcagttccaggaggcagcatttgccaatggaaagctctaggaaacaccagtcttgagaggtggccagccagactgcctgtccacatgcgtgtcagcacatacagccgcttcctggaagccgcctggaatgtcttcacggcagcgttttgctcacacagcagcttttgcacgccccaggcagccccgactgctgaaatccaacttgagctggctggtggtccctggatcctagagcccttcacttcgggttactccctctttcttgcctctatttcttagttggaagaaataaactcacaaattatggtgcagtaattttccggggaaagtaaagcctcaggaatgcccacgcctttcttccaaagcctttgtctctgagacctcttaagttctaagattaaatgcccctcgctgttcttcctctgaaaaaaaaataaaaacggcctcccggccctaatgctgagcttcgggcccgttcacttatgaggcgcctcatgacctcctcgatgactctcgcctcgtccgccgctgctacagcgccctacccctcaagctggccaccgccccacacccccggtctctcccgctccacccccctcgccgtcccttaggcctcgcccaagagacacggccaccccccccgcacccgactcccatccccccacaatccgccccccccctttttcccacgcccccgccccccctcctctcccagagtatctcctctacctccccccccccccccacgcctcccctacctactaacaacgcacgcccgcgcatccgccaccgagccggccacccc

SEQ ID NO: 361361 - DNA, 2857 bp, Homo sapiens
  misc_feature (2241)..(2241): n is a, c, g, or t
actgtgtttatgtttttattttgattcatacttggcttgctgaaaaatacgctgtaaatataaaatactgcagtaatgccgacaatcaacatggtgaaaggtgacagtctttttgatttctgctcaactcattattttatacaataagctcagacgaataatacccaatttggataatgttacgcttgacaaaacactttacttcatttagtcctcacaacaaccctgtgaggtaggcacattctcggaggtaaaatgacgtgggcaaagttccctggctcgtttggggaaaggctcagcagccgggccaagaaaggtctttgggggcgcaagtctttggagggcaggtctttggggagcgctttgagtaatattagagctttcactaaaccctggcctattacgtcccctcccctgagatttacctttatatactcaagttctttcatgccaggaaggtaggctgaaggcttcgaaaacctgcagctcatacccaaagctagcactgtctatccctggagacccagcgcccaaaagctccactgggcgcatagcgcacggcacgcctcctcccccgagccgcagactgagtaactggccccggactaacctgaccaggtcggtcatgcaggagcccaccactaccaccgccgccacctcctcttgccactgcctctggggttccccagacgccgccatcgctcaaaggtgctgctgtccaacctggacggtgacctctgccctttgcccgaccccgtaaccagagacgccactcctgccctccctaacgacgcgggcctttcagacgcctacgcgggtcgcccacctgactgcccgaaatcaccccgcccaccaagtgtcccctcttcttcctggaatagtctcggtgcacagcctcacgtaacagggccctcctgatatggcgagactccgcgctcctcgtcactcacggggcaggcgctgaggaaggaactgtcaggcaccgcggggacgcctttccgagcgcccggctcggcgcggcgcgggggcgcgcacgccgcccagcttcggggccgcagagggggcggggcgggacgtccggggagtgcgcacgcatcctgcccgcggcgcgcgcgcaggtcggtgcgtctgtcgggggcgcgctcgggtacctgtaccccacgtagtcgccggttaccgatcggactaagttccagtggtgatttacaagtcaagttaaaatgtccccagaagtggccttgaaccgaatatctccaatgctctcccctttcatatctagcgtggtccggaatggaaaagtgggactggatgctacaaactgtttgaggataactgacttaaaatctgggggatatcattttcaatgcccaatacccagaactgcctcccgattttatctttggagaagatgctgaattcctgccagacccctcagctttgcagaatcttgcctcctggaatccttcaaatcctgaatgtctcttacttgtggtgaaggaacttgtgcaacaatatcaccaattccaatgtagccgcctccgggagagctcccgcctcatgtttgaataccagacattactggaggagccacagtatggagagaacatggaaatttatgctgggaaaaaaaacaactggactggtgaattttcagctcgtttccttttgaagctgcccgtagatttcagcaatatccccacataccttctcaaggatgtaaatgaagaccctggagaagatgtggccctcctctctgttagttttgaggacactgaagccacccaggtgtaccccaagctgtacttgtcacctcgaattgagcatgcacttggaggctcctcagctcttcatatcccagcttttccaggaggaggatgtctcattgattacgttcctcaagtatgccacctgctcaccaacaaggtgcagtacgtgattcaagggtatcacaaaagaagagagtatattgctgcttttctcagtcactttggcacaggtgtcgtggaatatgatgcagaaggctttacaaaactcactctgctgctgatgtggaaagatttttgttttcttgtacacattgacctgcctctgtttttccctcgagaccagccaactctcacatttcagtccgtttatcactttaccaacagtggacagctttactcccaggcccaaaaaaattatccgtacagccccagatgggatggaaatgaaatggccaaaagagcaaagggatgccangggagcagagatgcctgcagcccgtgggagcaagtcctggcctttgcagttgcaaaaactggctgcaagctgctccagccccagaggaactggccaagctccagagggcctccttggagggcctcagagggagagagaactgctcagtaattttgatcactttgggcttatttcaaaacctttgtccctcagttccaggaggcagcatttgccaatggaaagctctaggaaacaccagtcttgagaggtggccagccagactgcctgtccacatgcgtgtcagcacatacagccgcttcctggaagccgcctggaatgtcttcacggcagcgttttgctcacacagcagcttttgcacgccccaggcagccccgactgctgaaatccaacttgagctggctggtggtccctggatcctagagcccttcacttcgggttactccctctttcttgcctctatttcttagttggaagaaataaactcacaaattatggtgcagtaattttccggggaaagtaaagcctcaggaatgcccacgcctttcttccaaagcctttgtctctgagacctcttaagttctaagattaaatgcccctcgctgttcttcctctgaaa

SEQ ID NO: 361362 - DNA, 1607 bp, Homo sapiens
  misc_feature (991)..(991): n is a, c, g, or t
agctctctcttttcctgctgctatccattgtaagatgtgacttgctccgccttgccttctgccacgattgtgtgaggcttccccagccacatgtcactgggatatcattttcaatgcccaatacccagaactgcctcccgattttatctttggagaagatgctgaattcctgccagacccctcagctttgcagaatcttgcctcctggaatccttcaaatcctgaatgtctcttacttgtggtgaaggaacttgtgcaacaatatcaccaattccaatgtagccgcctccgggagagctcccgcctcatgtttgaataccagacattactggaggagccacagtatggagagaacatggaaatttatgctgggaaaaaaaacaactggactggtgaattttcagctcgtttccttttgaagctgcccgtagatttcagcaatatccccacataccttctcaaggatgtaaatgaagaccctggagaagatgtggccctcctctctgttagttttgaggacactgaagccacccaggtgtaccccaagctgtacttgtcacctcgaattgagcatgcacttggaggctcctcagctcttcatatcccagcttttccaggaggaggatgtctcattgattacgttcctcaagtatgccacctgctcaccaacaaggtgcagtacgtgattcaagggtatcacaaaagaagagagtatattgctgcttttctcagtcactttggcacaggtgtcgtggaatatgatgcagaaggctttacaaaactcactctgctgctgatgtggaaagatttttgttttcttgtacacattgacctgcctctgtttttccctcgagaccagccaactctcacatttcagtccgtttatcactttaccaacagtggacagctttactcccaggcccaaaaaaattatccgtacagccccagatgggatggaaatgaaatggccaaaagagcaaagggatgccangggagcagagatgcctgcagcccgtgggagcaagtcctggcctttgcagttgcaaaaactggctgcaagctgctccagccccagaggaactggccaagctccagagggcctccttggagggcctcagagggagagagaactgctcagtaattttgatcactttgggcttatttcaaaacctttgtccctcagttccaggaggcagcatttgccaatggaaagctctaggaaacaccagtcttgagaggtggccagccagactgcctgtccacatgcgtgtcagcacatacagccgcttcctggaagccgcctggaatgtcttcacggcagcgttttgctcacacagcagcttttgcacgccccaggcagccccgactgctgaaatccaacttgagctggctggtggtccctggatcctagagcccttcacttcgggttactccctctttcttgcctctatttcttagttggaagaaataaactcacaaattatggtgcagtaattttccggggaaagtaaagcctcaggaatgcccacgcctttcttccaaagcctttgtctctgagacctcttaagttctaagattaaatgcccctcgctgttcttcctctgaaa

SEQ ID NO: 361363 - DNA, 2717 bp, Homo sapiens
actgtgtttatgtttttattttgattcatacttggcttgctgaaaaatacgctgtaaatataaaatactgcagtaatgccgacaatcaacatggtgaaaggtgacagtctttttgatttctgctcaactcattattttatacaataagctcagacgaataatacccaatttggataatgttacgcttgacaaaacactttacttcatttagtcctcacaacaaccctgtgaggtaggcacattctcggaggtaaaatgacgtgggcaaagttccctggctcgtttggggaaaggctcagcagccgggccaagaaaggtctttgggggcgcaagtctttggagggcaggtctttggggagcgctttgagtaatattagagctttcactaaaccctggcctattacgtcccctcccctgagatttacctttatatactcaagttctttcatgccaggaaggtaggctgaaggcttcgaaaacctgcagctcatacccaaagctagcactgtctatccctggagacccagcgcccaaaagctccactgggcgcatagcgcacggcacgcctcctcccccgagccgcagactgagtaactggccccggactaacctgaccaggtcggtcatgcaggagcccaccactaccaccgccgccacctcctcttgccactgcctctggggttccccagacgccgccatcgctcaaaggtgctgctgtccaacctggacggtgacctctgccctttgcccgaccccgtaaccagagacgccactcctgccctccctaacgacgcgggcctttcagacgcctacgcgggtcgcccacctgactgcccgaaatcaccccgcccaccaagtgtcccctcttcttcctggaatagtctcggtgcacagcctcacgtaacagggccctcctgatatggcgagactccgcgctcctcgtcactcacggggcaggcgctgaggaaggaactgtcaggcaccgcggggacgcctttccgagcgcccggctcggcgcggcgcgggggcgcgcacgccgcccagcttcggggccgcagagggggcggggcgggacgtccggggagtgcgcacgcatcctgcccgcggcgcgcgcgcaggtcggtgcgtctgtcgggggcgcgctcgggtacctgtaccccacgtagtcgccggttaccgatcggactaagttccagtggtgatttacaagtcaagttaaaatgtccccagaagtggccttgaaccgaatatctccaatgctctcccctttcatatctagcgtggtccggaatggaaaagtgggactggatgctacaaactgtttgaggataactgacttaaaatctggctgcacatcattgactcctgggcccaactgtgaccgatttaaactgcacataccatatgctggagagacattaaagtgggatatcattttcaatgcccaatacccagaactgcctcccgattttatctttggagaagatgctgaattcctgccagacccctcagctttgcagaatcttgcctcctggaatccttcaaatcctgaatgtctcttacttgtggtgaaggaacttgtgcaacaatatcaccaattccaatgtagccgcctccgggagagctcccgcctcatgtttgaataccagacattactggaggagccacagtatggagagaacatggaaatttatgctgggaaaaaaaacaactggatttcagcaatatccccacataccttctcaaggatgtaaatgaagaccctggagaagatgtggccctcctctctgttagttttgaggacactgaagccacccaggtgtaccccaagctgtacttgtcacctcgaattgagcatgcacttggaggctcctcagctcttcatatcccagcttttccaggaggaggatgtctcattgattacgttcctcaagtatgccacctgctcaccaacaaggtgcagtacgtgattcaagggtatcacaaaagaagagagtatattgctgcttttctcagtcactttggcacaggtgtcgtggaatatgatgcagaaggctttacaaaactcactctgctgctgatgtggaaagatttttgttttcttgtacacattgacctgcctctgtttttccctcgagaccagccaactctcacatttcagtccgtttatcactttaccaacagtggacagctttactcccaggcccaaaaaaattatccgtacagccccagatgggatggaaatgaaatggccaaaagagcaaaggcttatttcaaaacctttgtccctcagttccaggaggcagcatttgccaatggaaagctctaggaaacaccagtcttgagaggtggccagccagactgcctgtccacatgcgtgtcagcacatacagccgcttcctggaagccgcctggaatgtcttcacggcagcgttttgctcacacagcagcttttgcacgccccaggcagccccgactgctgaaatccaacttgagctggctggtggtccctggatcctagagcccttcacttcgggttactccctctttcttgcctctatttcttagttggaagaaataaactcacaaattatggtgcagtaattttccggggaaagtaaagcctcaggaatgcccacgcctttcttccaaagcctttgtctctgagacctcttaagttctaagattaaatgcccctcgctgttcttcctctgaaa

SEQ ID NO: 361364 - DNA, 2565 bp, Homo sapiens
actgtgtttatgtttttattttgattcatacttggcttgctgaaaaatacgctgtaaatataaaatactgcagtaatgccgacaatcaacatggtgaaaggtgacagtctttttgatttctgctcaactcattattttatacaataagctcagacgaataatacccaatttggataatgttacgcttgacaaaacactttacttcatttagtcctcacaacaaccctgtgaggtaggcacattctcggaggtaaaatgacgtgggcaaagttccctggctcgtttggggaaaggctcagcagccgggccaagaaaggtctttgggggcgcaagtctttggagggcaggtctttggggagcgctttgagtaatattagagctttcactaaaccctggcctattacgtcccctcccctgagatttacctttatatactcaagttctttcatgccaggaaggtaggctgaaggcttcgaaaacctgcagctcatacccaaagctagcactgtctatccctggagacccagcgcccaaaagctccactgggcgcatagcgcacggcacgcctcctcccccgagccgcagactgagtaactggccccggactaacctgaccaggtcggtcatgcaggagcccaccactaccaccgccgccacctcctcttgccactgcctctggggttccccagacgccgccatcgctcaaaggtgctgctgtccaacctggacggtgacctctgccctttgcccgaccccgtaaccagagacgccactcctgccctccctaacgacgcgggcctttcagacgcctacgcgggtcgcccacctgactgcccgaaatcaccccgcccaccaagtgtcccctcttcttcctggaatagtctcggtgcacagcctcacgtaacagggccctcctgatatggcgagactccgcgctcctcgtcactcacggggcaggcgctgaggaaggaactgtcaggcaccgcggggacgcctttccgagcgcccggctcggcgcggcgcgggggcgcgcacgccgcccagcttcggggccgcagagggggcggggcgggacgtccggggagtgcgcacgcatcctgcccgcggcgcgcgcgcaggtcggtgcgtctgtcgggggcgcgctcgggtacctgtaccccacgtagtcgccggttaccgatcggactaagttccagtggtgatttacaagtcaagttaaaatgtccccagaagtggccttgaaccgaatatctccaatgctctcccctttcatatctagcgtggtccggaatggaaaagtgggactggatgctacaaactgtttgaggataactgacttaaaatctggctgcacatcattgactcctgggcccaactgtgaccgatttaaactgcacataccatatgctggagagacattaaagtgggatatcattttcaatgcccaatacccagaactgcctcccgattttatctttggagaagatgctgaattcctgccagacccctcagctttgcagactggtgaattttcagctcgtttccttttgaagctgcccgtagatttcagcaatatccccacataccttctcaaggatgtaaatgaagaccctggagaagatgtggccctcctctctgttagttttgaggacactgaagccacccaggtgtaccccaagctgtacttgtcacctcgaattgagcatgcacttggaggctcctcagctcttcatatcccagcttttccaggaggaggatgtctcattgattacgttcctcaagtatgccacctgctcaccaacaaggtgcagtacgtgattcaagggtatcacaaaagaagagagtatattgctgcttttctcagtcactttggcacaggtgtcgtggaatatgatgcagaaggctttacaaaactcactctgctgctgatgtggaaagatttttgttttcttgtacacattgacctgcctctgtttttccctcgagaccagccaactctcacatttcagtccgtttatcactttaccaacagtggacagctttactcccaggcccaaaaaaattatccgtacagccccagatgggatggaaatgaaatggccaaaagagcaaaggcttatttcaaaacctttgtccctcagttccaggaggcagcatttgccaatggaaagctctaggaaacaccagtcttgagaggtggccagccagactgcctgtccacatgcgtgtcagcacatacagccgcttcctggaagccgcctggaatgtcttcacggcagcgttttgctcacacagcagcttttgcacgccccaggcagccccgactgctgaaatccaacttgagctggctggtggtccctggatcctagagcccttcacttcgggttactccctctttcttgcctctatttcttagttggaagaaataaactcacaaattatggtgcagtaattttccggggaaagtaaagcctcaggaatgcccacgcctttcttccaaagcctttgtctctgagacctcttaagttctaagattaaatgcccctcgctgttcttcctctgaaa

SEQ ID NO: 361365 - DNA, 1497 bp, Homo sapiens
  misc_feature (17)..(17): n is a, c, g, or t
  misc_feature (61)..(61): n is a, c, g, or t
  misc_feature (70)..(70): n is a, c, g, or t
  misc_feature (144)..(144): n is a, c, g, or t
  misc_feature (150)..(150): n is a, c, g, or t
  misc_feature (157)..(157): n is a, c, g, or t
  misc_feature (177)..(177): n is a, c, g, or t
  misc_feature (208)..(208): n is a, c, g, or t
  misc_feature (238)..(238): n is a, c, g, or t
  misc_feature (246)..(246): n is a, c, g, or t
  misc_feature (251)..(251): n is a, c, g, or t
  misc_feature (254)..(254): n is a, c, g, or t
  misc_feature (257)..(264): n is a, c, g, or t
  misc_feature (266)..(267): n is a, c, g, or t
  misc_feature (270)..(276): n is a, c, g, or t
  misc_feature (278)..(278): n is a, c, g, or t
  misc_feature (284)..(284): n is a, c, g, or t
  misc_feature (288)..(289): n is a, c, g, or t
  misc_feature (291)..(292): n is a, c, g, or t
  misc_feature (297)..(297): n is a, c, g, or t
  misc_feature (301)..(301): n is a, c, g, or t
  misc_feature (305)..(305): n is a, c, g, or t
  misc_feature (332)..(332): n is a, c, g, or t
  misc_feature (350)..(351): n is a, c, g, or t
  misc_feature (353)..(353): n is a, c, g, or t
  misc_feature (358)..(359): n is a, c, g, or t
  misc_feature (367)..(367): n is a, c, g, or t
  misc_feature (372)..(372): n is a, c, g, or t
  misc_feature (376)..(376): n is a, c, g, or t
  misc_feature (380)..(380): n is a, c, g, or t
taacccgaagtgaaggntctagatccagggaccaccagccagctcaagtggatttcagcantcggggctncctggggcgtgcaaaagctgctgtgtgagcaaaaacgctgccgtgaagacattccaggcggcttccaggaagcngctgtntgtgctnacacgcatgtgcacaggcantctggctggccacctctcaagactggtgttncctagagcttaccattggcaaaagctgcancctggaantaagnaanaannnnnnnnanntannnnnnngntctttnggcnntnncattnccancccntctggggctgtacggataatttttttnggcctgggagtaaagctnncnactgnnggtaaagngatanacgnactnaaatgtgagagttggctgttctcgagggaaaaacagaggcaggtcaatgtgtacaagaaaacaactagtacaactggtgaattttcagctcgtttccttttgaagctgcccgtagatttcagcaatatccccacataccttctcaaggatgtaaatgaagaccctggagaagatgtggccctcctctctgttagttttgaggacactgaagccacccaggtgtaccccaagctgtacttgtcacctcgaattgagcatgcacttggaggctcctcagctcttcatatcccagcttttccaggaggaggatgtctcattgattacgttcctcaagtatgccacctgctcaccaacaaggtgcagtacgtgattcaagggtatcacaaaagaagagagtatattgctgcttttctcagtcactttggcacaggtgtcgtggaatatgatgcagaaggctttacaaaactcactctgctgctgatgtggaaagatttttgttttcttgtacacattgacctgcctctgtttttccctcgagaccagccaactctcacatttcagtccgtttatcactttaccaacagtggacagctttactcccaggcccaaaaaaattatccgtacagccccagatgggatggaaatgaaatggccaaaagagcaaaggcttatttcaaaacctttgtccctcagttccaggaggcagcatttgccaatggaaagctctaggaaacaccagtcttgagaggtggccagccagactgcctgtccacatgcgtgtcagcacatacagccgcttcctggaagccgcctggaatgtcttcacggcagcgttttgctcacacagcagcttttgcacgccccaggcagccccgactgctgaaatccaacttgagctggctggtggtccctggatcctagagcccttcacttcgggttactccctctttcttgcctctatttcttagttggaagaaataaactcacaaattatggtgcagtaattttccggggaaagtaaagcctcaggaatgcccacgcctttcttccaaagcctttgtctctgagacctcttaagttctaagattaaatgcccctcgctgttcttcctctgaaa

SEQ ID NO: 361366 - DNA, 513 bp, Homo sapiens
  misc_feature (17)..(17): n is a, c, g, or t
aaaagaaaaaaaggganggaggggaggggggaaaggggagtggcacgagacgagggcctagggcttatttcaaaacctttgtccctcagttccaggaggcagcatttgccaatggaaagctctaggaaacaccagtcttgagaggtggccagccagactgcctgtccacatgcgtgtcagcacatacagccgcttcctggaagccgcctggaatgtcttcacggcagcgttttgctcacacagcagcttttgcacgccccaggcagccccgactgctgaaatccaacttgagctggctggtggtccctggatcctagagcccttcacttcgggttactccctctttcttgcctctatttcttagttggaagaaataaactcacaaattatggtgcagtaattttccggggaaagtaaagcctcaggaatgcccacgcctttcttccaaagcctttgtctctgagacctcttaagttctaagattaaatgcccctcgctgttcttcctctgaaa

SEQ ID NO: 361367 - DNA, 494 bp, Homo sapiens
gcttcatccggcccacacacgccccccgcccgccggcttaagggcttatttcaaaacctttgtccctcagttccaggaggcagcatttgccaatggaaagctctaggaaacaccagtcttgagaggtggccagccagactgcctgtccacatgcgtgtcagcacatacagccgcttcctggaagccgcctggaatgtcttcacggcagcgttttgctcacacagcagcttttgcacgccccaggcagccccgactgctgaaatccaacttgagctggctggtggtccctggatcctagagcccttcacttcgggttactccctctttcttgcctctatttcttagttggaagaaataaactcacaaattatggtgcagtaattttccggggaaagtaaagcctcaggaatgcccacgcctttcttccaaagcctttgtctctgagacctcttaagttctaagattaaatgcccctcgctgttcttcctctgaaa

SEQ ID NO: 361368 - DNA, 1860 bp, Homo sapiens
actgtgtttatgtttttattttgattcatacttggcttgctgaaaaatacgctgtaaatataaaatactgcagtaatgccgacaatcaacatggtgaaaggtgacagtctttttgatttctgctcaactcattattttatacaataagctcagacgaataatacccaatttggataatgttacgcttgacaaaacactttacttcatttagtcctcacaacaaccctgtgaggtaggcacattctcggaggtaaaatgacgtgggcaaagttccctggctcgtttggggaaaggctcagcagccgggccaagaaaggtctttgggggcgcaagtctttggagggcaggtctttggggagcgctttgagtaatattagagctttcactaaaccctggcctattacgtcccctcccctgagatttacctttatatactcaagttctttcatgccaggaaggtaggctgaaggcttcgaaaacctgcagctcatacccaaagctagcactgtctatccctggagacccagcgcccaaaagctccactgggcgcatagcgcacggcacgcctcctcccccgagccgcagactgagtaactggccccggactaacctgaccaggtcggtcatgcaggagcccaccactaccaccgccgccacctcctcttgccactgcctctggggttccccagacgccgccatcgctcaaaggtgctgctgtccaacctggacggtgacctctgccctttgcccgaccccgtaaccagagacgccactcctgccctccctaacgacgcgggcctttcagacgcctacgcgggtcgcccacctgactgcccgaaatcaccccgcccaccaagtgtcccctcttcttcctggaatagtctcggtgcacagcctcacgtaacagggccctcctgatatggcgagactccgcgctcctcgtcactcacggggcaggcgctgaggaaggaactgtcaggcaccgcggggacgcctttccgagcgcccggctcggcgcggcgcgggggcgcgcacgccgcccagcttcggggccgcagagggggcggggcgggacgtccggggagtgcgcacgcatcctgcccgcggcgcgcgcgcaggtcggtgcgtctgtcgggggcgcgctcgggtacctgtaccccacgtagtcgccggttaccgatcggactaagttccagtggtgatttacaagtcaagttaaaatgtccccagaagtggccttgaaccgaatatctccaatgctctcccctttcatatctagcgtggtccggaatggaaaagtgggactggatgctacaaactgtttgaggataactgacttaaaatctggctgcacatcattgactcctgggcccaactgtgaccgatttaaactgcacataccatatgctggagagacattaaagtgggatatcattttcaatgcccaatacccagaactgcctcccgattttatctttggagaagatgctgaattcctgccagacccctcagctttgcagaatcttgcctcctggaatccttcaaatcctgaatgtctcttacttgtggtgaaggaacttgtgcaacaatatcaccaattccaatgtagccgcctccgggagagctcccgcctcatgtttgaataccagacattactggaggagccacagtatggagagaacatggaaatttatgctgggaaaaaaaacaactgggggtaaggatttttgagaatggaaaaaaagatgacttcatccataataaaataatcaattcataacaaaaaaaattaacgctaataatattaacataaaaatagaacaacggaggaaaaaaataaatatggccttattggcctca

SEQ ID NO: 361369 - DNA, 360 bp, Homo sapiens
gaggacactgaagccacccaggtgtaccccaagctgtacttgtcacctcgaattgagcagtaagtgtcattaacatgaggtagcctggtgctacttcttgctaaccaatatgtctcattctttcttttgccactcttgaactcttacatttatttctcttcattgacttttgttttcttaaaaaattcatcatattaagagtttccattgcagagtaaatgcagttagtacttgccactacacccttttggcaagtgttattgtgcatttagtgacatgaatactgtacctttgtagagagaaaagaataggcagactgagtccaaaattgagactccttccagatgttccctggagttc

SEQ ID NO: 361370 - DNA, 488 bp, Homo sapiens
cgcacactgcgcttgtcgaaccacacagaggcttcaggcttatttcaaaacctttgtccctcagttccaggaggcagcatttgccaatggaaagctctaggaaacaccagtcttgagaggtggccagccagactgcctgtccacatgcgtgtcagcacatacagccgcttcctggaagccgcctggaatgtcttcacggcagcgttttgctcacacagcagcttttgcacgccccaggcagccccgactgctgaaatccaacttgagctggctggtggtccctggatcctagagcccttcacttcgggttactccctctttcttgcctctatttcttagttggaagaaataaactcacaaattatggtgcagtaattttccggggaaagtaaagcctcaggaatgcccacgcctttcttccaaagcctttgtctctgagacctcttaagttctaagattaaatgcccctcgctgttcttcctctgaaa

SEQ ID NO: 361371 - DNA, 2934 bp, Homo sapiens
  misc_feature (2318)..(2318): n is a, c, g, or t
actgtgtttatgtttttattttgattcatacttggcttgctgaaaaatacgctgtaaatataaaatactgcagtaatgccgacaatcaacatggtgaaaggtgacagtctttttgatttctgctcaactcattattttatacaataagctcagacgaataatacccaatttggataatgttacgcttgacaaaacactttacttcatttagtcctcacaacaaccctgtgaggtaggcacattctcggaggtaaaatgacgtgggcaaagttccctggctcgtttggggaaaggctcagcagccgggccaagaaaggtctttgggggcgcaagtctttggagggcaggtctttggggagcgctttgagtaatattagagctttcactaaaccctggcctattacgtcccctcccctgagatttacctttatatactcaagttctttcatgccaggaaggtaggctgaaggcttcgaaaacctgcagctcatacccaaagctagcactgtctatccctggagacccagcgcccaaaagctccactgggcgcatagcgcacggcacgcctcctcccccgagccgcagactgagtaactggccccggactaacctgaccaggtcggtcatgcaggagcccaccactaccaccgccgccacctcctcttgccactgcctctggggttccccagacgccgccatcgctcaaaggtgctgctgtccaacctggacggtgacctctgccctttgcccgaccccgtaaccagagacgccactcctgccctccctaacgacgcgggcctttcagacgcctacgcgggtcgcccacctgactgcccgaaatcaccccgcccaccaagtgtcccctcttcttcctggaatagtctcggtgcacagcctcacgtaacagggccctcctgatatggcgagactccgcgctcctcgtcactcacggggcaggcgctgaggaaggaactgtcaggcaccgcggggacgcctttccgagcgcccggctcggcgcggcgcgggggcgcgcacgccgcccagcttcggggccgcagagggggcggggcgggacgtccggggagtgcgcacgcatcctgcccgcggcgcgcgcgcaggtcggtgcgtctgtcgggggcgcgctcgggtacctgtaccccacgtagtcgccggttaccgatcggactaagttccagtggtgatttacaagtcaagttaaaatgtccccagaagtggccttgaaccgaatatctccaatgctctcccctttcatatctagcgtggtccggaatggaaaagtgggactggatgctacaaactgtttgaggataactgacttaaaatctggctgcacatcattgactcctgggcccaactgtgaccgatttaaactgcacataccatatgctggagagacattaaagtgggatatcattttcaatgcccaatacccagaactgcctcccgattttatctttggagaagatgctgaattcctgccagacccctcagctttgcagaatcttgcctcctggaatccttcaaatcctgaatgtctcttacttgtggtgaaggaacttgtgcaacaatatcaccaattccaatgtagccgcctccgggagagctcccgcctcatgtttgaataccagacattactggaggagccacagtatggagagaacatggaaatttatgctgggaaaaaaaacaactggactggtgaattttcagctcgtttccttttgaagctgcccgtagatttcagcaatatccccacataccttctcaaggatgtaaatgaagaccctggagaagatgtggccctcctctctgttagttttgaggacactgaagccacccaggtgtaccccaagctgtacttgtcacctcgaattgagcatgcacttggaggctcctcagctcttcatatcccagcttttccaggaggaggatgtctcattgattacgttcctcaagtatgccacctgctcaccaacaaggtgcagtacgtgattcaagggtatcacaaaagaagagagtatattgctgcttttctcagtcactttggcacaggtgtcgtggaatatgatgcagaaggctttacaaaactcactctgctgctgatgtggaaagatttttgttttcttgtacacattgacctgcctctgtttttccctcgagaccagccaactctcacatttcagtccgtttatcactttaccaacagtggacagctttactcccaggcccaaaaaaattatccgtacagccccagatgggatggaaatgaaatggccaaaagagcaaagggatgccangggagcagagatgcctgcagcccgtgggagcaagtcctggcctttgcagttgcaaaaactggctgcaagctgctccagccccagaggaactggccaagctccagagggcctccttggagggcctcagagggagagagaactgctcagtaattttgatcactttgggcttatttcaaaacctttgtccctcagttccaggaggcagcatttgccaatggaaagctctaggaaacaccagtcttgagaggtggccagccagactgcctgtccacatgcgtgtcagcacatacagccgcttcctggaagccgcctggaatgtcttcacggcagcgttttgctcacacagcagcttttgcacgccccaggcagccccgactgctgaaatccaacttgagctggctggtggtccctggatcctagagcccttcacttcgggttactccctctttcttgcctctatttcttagttggaagaaataaactcacaaattatggtgcagtaattttccggggaaagtaaagcctcaggaatgcccacgcctttcttccaaagcctttgtctctgagacctcttaagttctaagattaaatgcccctcgctgttcttcctctgaaa

SEQ ID NO: 361372 - DNA, 2826 bp, Homo sapiens
actgtgtttatgtttttattttgattcatacttggcttgctgaaaaatacgctgtaaatataaaatactgcagtaatgccgacaatcaacatggtgaaaggtgacagtctttttgatttctgctcaactcattattttatacaataagctcagacgaataatacccaatttggataatgttacgcttgacaaaacactttacttcatttagtcctcacaacaaccctgtgaggtaggcacattctcggaggtaaaatgacgtgggcaaagttccctggctcgtttggggaaaggctcagcagccgggccaagaaaggtctttgggggcgcaagtctttggagggcaggtctttggggagcgctttgagtaatattagagctttcactaaaccctggcctattacgtcccctcccctgagatttacctttatatactcaagttctttcatgccaggaaggtaggctgaaggcttcgaaaacctgcagctcatacccaaagctagcactgtctatccctggagacccagcgcccaaaagctccactgggcgcatagcgcacggcacgcctcctcccccgagccgcagactgagtaactggccccggactaacctgaccaggtcggtcatgcaggagcccaccactaccaccgccgccacctcctcttgccactgcctctggggttccccagacgccgccatcgctcaaaggtgctgctgtccaacctggacggtgacctctgccctttgcccgaccccgtaaccagagacgccactcctgccctccctaacgacgcgggcctttcagacgcctacgcgggtcgcccacctgactgcccgaaatcaccccgcccaccaagtgtcccctcttcttcctggaatagtctcggtgcacagcctcacgtaacagggccctcctgatatggcgagactccgcgctcctcgtcactcacggggcaggcgctgaggaaggaactgtcaggcaccgcggggacgcctttccgagcgcccggctcggcgcggcgcgggggcgcgcacgccgcccagcttcggggccgcagagggggcggggcgggacgtccggggagtgcgcacgcatcctgcccgcggcgcgcgcgcaggtcggtgcgtctgtcgggggcgcgctcgggtacctgtaccccacgtagtcgccggttaccgatcggactaagttccagaagcaagagataaagtaataatgggtactgtggggaaaaacacagaagaacaattcggtaatatagtggtgatttacaagtcaagttaaaatgtccccagaagtggccttgaaccgaatatctccaatgctctcccctttcatatctagcgtggtccggaatggaaaagtgggactggatgctacaaactgtttgaggataactgacttaaaatctggctgcacatcattgactcctgggcccaactgtgaccgatttaaactgcacataccatatgctggagagacattaaagtgggatatcattttcaatgcccaatacccagaactgcctcccgattttatctttggagaagatgctgaattcctgccagacccctcagctttgcagaatcttgcctcctggaatccttcaaatcctgaatgtctcttacttgtggtgaaggaacttgtgcaacaatatcaccaattccaatgtagccgcctccgggagagctcccgcctcatgtttgaataccagacattactggaggagccacagtatggagagaacatggaaatttatgctgggaaaaaaaacaactggactggtgaattttcagctcgtttccttttgaagctgcccgtagatttcagcaatatccccacataccttctcaaggatgtaaatgaagaccctggagaagatgtggccctcctctctgttagttttgaggacactgaagccacccaggtgtaccccaagctgtacttgtcacctcgaattgagcatgcacttggaggctcctcagctcttcatatcccagcttttccaggaggaggatgtctcattgattacgttcctcaagtatgccacctgctcaccaacaaggtgcagtacgtgattcaagggtatcacaaaagaagagagtatattgctgcttttctcagtcactttggcacaggtgtcgtggaatatgatgcagaaggctttacaaaactcactctgctgctgatgtggaaagatttttgttttcttgtacacattgacctgcctctgtttttccctcgagaccagccaactctcacatttcagtccgtttatcactttaccaacagtggacagctttactcccaggcccaaaaaaattatccgtacagccccagatgggatggaaatgaaatggccaaaagagcaaaggcttatttcaaaacctttgtccctcagttccaggaggcagcatttgccaatggaaagctctaggaaacaccagtcttgagaggtggccagccagactgcctgtccacatgcgtgtcagcacatacagccgcttcctggaagccgcctggaatgtcttcacggcagcgttttgctcacacagcagcttttgcacgccccaggcagccccgactgctgaaatccaacttgagctggctggtggtccctggatcctagagcccttcacttcgggttactccctctttcttgcctctatttcttagttggaagaaataaactcacaaattatggtgcagtaattttccggggaaagtaaagcctcaggaatgcccacgcctttcttccaaagcctttgtctctgagacctcttaagttctaagattaaatgcccctcgctgttcttcctctgaaa

SEQ ID NO: 361373 - DNA, 2964 bp, Homo sapiens
  misc_feature (2318)..(2318): n is a, c, g, or t
actgtgtttatgtttttattttgattcatacttggcttgctgaaaaatacgctgtaaatataaaatactgcagtaatgccgacaatcaacatggtgaaaggtgacagtctttttgatttctgctcaactcattattttatacaataagctcagacgaataatacccaatttggataatgttacgcttgacaaaacactttacttcatttagtcctcacaacaaccctgtgaggtaggcacattctcggaggtaaaatgacgtgggcaaagttccctggctcgtttggggaaaggctcagcagccgggccaagaaaggtctttgggggcgcaagtctttggagggcaggtctttggggagcgctttgagtaatattagagctttcactaaaccctggcctattacgtcccctcccctgagatttacctttatatactcaagttctttcatgccaggaaggtaggctgaaggcttcgaaaacctgcagctcatacccaaagctagcactgtctatccctggagacccagcgcccaaaagctccactgggcgcatagcgcacggcacgcctcctcccccgagccgcagactgagtaactggccccggactaacctgaccaggtcggtcatgcaggagcccaccactaccaccgccgccacctcctcttgccactgcctctggggttccccagacgccgccatcgctcaaaggtgctgctgtccaacctggacggtgacctctgccctttgcccgaccccgtaaccagagacgccactcctgccctccctaacgacgcgggcctttcagacgcctacgcgggtcgcccacctgactgcccgaaatcaccccgcccaccaagtgtcccctcttcttcctggaatagtctcggtgcacagcctcacgtaacagggccctcctgatatggcgagactccgcgctcctcgtcactcacggggcaggcgctgaggaaggaactgtcaggcaccgcggggacgcctttccgagcgcccggctcggcgcggcgcgggggcgcgcacgccgcccagcttcggggccgcagagggggcggggcgggacgtccggggagtgcgcacgcatcctgcccgcggcgcgcgcgcaggtcggtgcgtctgtcgggggcgcgctcgggtacctgtaccccacgtagtcgccggttaccgatcggactaagttccagtggtgatttacaagtcaagttaaaatgtccccagaagtggccttgaaccgaatatctccaatgctctcccctttcatatctagcgtggtccggaatggaaaagtgggactggatgctacaaactgtttgaggataactgacttaaaatctggctgcacatcattgactcctgggcccaactgtgaccgatttaaactgcacataccatatgctggagagacattaaagtgggatatcattttcaatgcccaatacccagaactgcctcccgattttatctttggagaagatgctgaattcctgccagacccctcagctttgcagaatcttgcctcctggaatccttcaaatcctgaatgtctcttacttgtggtgaaggaacttgtgcaacaatatcaccaattccaatgtagccgcctccgggagagctcccgcctcatgtttgaataccagacattactggaggagccacagtatggagagaacatggaaatttatgctgggaaaaaaaacaactggactggtgaattttcagctcgtttccttttgaagctgcccgtagatttcagcaatatccccacataccttctcaaggatgtaaatgaagaccctggagaagatgtggccctcctctctgttagttttgaggacactgaagccacccaggtgtaccccaagctgtacttgtcacctcgaattgagcatgcacttggaggctcctcagctcttcatatcccagcttttccaggaggaggatgtctcattgattacgttcctcaagtatgccacctgctcaccaacaaggtgcagtacgtgattcaagggtatcacaaaagaagagagtatattgctgcttttctcagtcactttggcacaggtgtcgtggaatatgatgcagaaggctttacaaaactcactctgctgctgatgtggaaagatttttgttttcttgtacacattgacctgcctctgtttttccctcgagaccagccaactctcacatttcagtccgtttatcactttaccaacagtggacagctttactcccaggcccaaaaaaattatccgtacagccccagatgggatggaaatgaaatggccaaaagagcaaagggatgccangggagcagagatgcctgcagcccgtgggagcaagtcctggcctttgcagttgcaaaaactggctgcaagctgctccagccccagaggaactggccaagctccagagggcctccttggagggcctcagagggagagagaactgctcagtaattttgatcactttgggcttatttcaaaacctttgtccctcagttccaggaggcagcatttgccaatggaaagctctaggaaacaccagtcttgagaggtggccagccagactgcctgtccacatgcgtgtcagcacatacagccgcttcctggaagccgcctggaatgtcttcacggcagcgttttgctcacacagcagcttttgcacgccccaggcagccccgactgctgaaatccaacttgagctggctggtggtccctggatcctagagcccttcacttcgggttactccctctttcttgcctctatttcttagttggaagaaataaactcacaaattatggtgcagtaattttccggggaaagtaaagcctcaggaatgcccacgcctttcttccaaagcctttgtctctgagacctcttaagttctaagattaaatgcccctcgctgttcttcctctgaaaaaaaaaaaacaaatgggctaactggactca

SEQ ID NO: 361374 - DNA, 2786 bp, Homo sapiens
actgtgtttatgtttttattttgattcatacttggcttgctgaaaaatacgctgtaaatataaaatactgcagtaatgccgacaatcaacatggtgaaaggtgacagtctttttgatttctgctcaactcattattttatacaataagctcagacgaataatacccaatttggataatgttacgcttgacaaaacactttacttcatttagtcctcacaacaaccctgtgaggtaggcacattctcggaggtaaaatgacgtgggcaaagttccctggctcgtttggggaaaggctcagcagccgggccaagaaaggtctttgggggcgcaagtctttggagggcaggtctttggggagcgctttgagtaatattagagctttcactaaaccctggcctattacgtcccctcccctgagatttacctttatatactcaagttctttcatgccaggaaggtaggctgaaggcttcgaaaacctgcagctcatacccaaagctagcactgtctatccctggagacccagcgcccaaaagctccactgggcgcatagcgcacggcacgcctcctcccccgagccgcagactgagtaactggccccggactaacctgaccaggtcggtcatgcaggagcccaccactaccaccgccgccacctcctcttgccactgcctctggggttccccagacgccgccatcgctcaaaggtgctgctgtccaacctggacggtgacctctgccctttgcccgaccccgtaaccagagacgccactcctgccctccctaacgacgcgggcctttcagacgcctacgcgggtcgcccacctgactgcccgaaatcaccccgcccaccaagtgtcccctcttcttcctggaatagtctcggtgcacagcctcacgtaacagggccctcctgatatggcgagactccgcgctcctcgtcactcacggggcaggcgctgaggaaggaactgtcaggcaccgcggggacgcctttccgagcgcccggctcggcgcggcgcgggggcgcgcacgccgcccagcttcggggccgcagagggggcggggcgggacgtccggggagtgcgcacgcatcctgcccgcggcgcgcgcgcaggtcggtgcgtctgtcgggggcgcgctcgggtacctgtaccccacgtagtcgccggttaccgatcggactaagttccagtggtgatttacaagtcaagttaaaatgtccccagaagtggccttgaaccgaatatctccaatgctctcccctttcatatctagcgtggtccggaatggaaaagtgggactggatgctacaaactgtttgaggataactgacttaaaatctggctgcacatcattgactcctgggcccaactgtgaccgatttaaactgcacataccatatgctggagagacattaaagtgggatatcattttcaatgcccaatacccagaactgcctcccgattttatctttggagaagatgctgaattcctgccagacccctcagctttgcagaatcttgcctcctggaatccttcaaatcctgaatgtctcttacttgtggtgaaggaacttgtgcaacaatatcaccaattccaatgtagccgcctccgggagagctcccgcctcatgtttgaataccagacattactggaggagccacagtatggagagaacatggaaatttatgctgggaaaaaaaacaactggactggtgaattttcagctcgtttccttttgaagctgcccgtagatttcagcaatatccccacataccttctcaaggatgtaaatgaagaccctggagaagatgtggccctcctctctgttagttttgaggacactgaagccacccaggtgtaccccaagctgtacttgtcacctcgaattgagcatgcacttggaggctcctcagctcttcatatcccagcttttccaggaggaggatgtctcattgattacgttcctcaagtatgccacctgctcaccaacaaggtgcagtacgtgattcaagggtatcacaaaagaagagagtatattgctgcttttctcagtcactttggcacaggtgtcgtggaatatgatgcagaaggctttacaaaactcactctgctgctgatgtggaaagatttttgttttcttgtacacattgacctgcctctgtttttccctcgagaccagccaactctcacatttcagtccgtttatcactttaccaacagtggacagctttactcccaggcccaaaaaaattatccgtacagccccagatgggatggaaatgaaatggccaaaagagcaaaggcttatttcaaaacctttgtccctcagttccaggaggcagcatttgccaatggaaagctctaggaaacaccagtcttgagaggtggccagccagactgcctgtccacatgcgtgtcagcacatacagccgcttcctggaagccgcctggaatgtcttcacggcagcgttttgctcacacagcagcttttgcacgccccaggcagccccgactgctgaaatccaacttgagctggctggtggtccctggatcctagagcccttcacttcgggttactccctctttcttgcctctatttcttagttggaagaaataaactcacaaattatggtgcagtaattttccggggaaagtaaagcctcaggaatgcccacgcctttcttccaaagcctttgtctctgagacctcttaagttctaagattaaatgcccctcgctgttcttcctctgaaaaaaaaaaatcgggctcgttgggctca

SEQ ID NO: 361375 - DNA, 3163 bp, Homo sapiens
actgtgtttatgtttttattttgattcatacttggcttgctgaaaaatacgctgtaaatataaaatactgcagtaatgccgacaatcaacatggtgaaaggtgacagtctttttgatttctgctcaactcattattttatacaataagctcagacgaataatacccaatttggataatgttacgcttgacaaaacactttacttcatttagtcctcacaacaaccctgtgaggtaggcacattctcggaggtaaaatgacgtgggcaaagttccctggctcgtttggggaaaggctcagcagccgggccaagaaaggtctttgggggcgcaagtctttggagggcaggtctttggggagcgctttgagtaatattagagctttcactaaaccctggcctattacgtcccctcccctgagatttacctttatatactcaagttctttcatgccaggaaggtaggctgaaggcttcgaaaacctgcagctcatacccaaagctagcactgtctatccctggagacccagcgcccaaaagctccactgggcgcatagcgcacggcacgcctcctcccccgagccgcagactgagtaactggccccggactaacctgaccaggtcggtcatgcaggagcccaccactaccaccgccgccacctcctcttgccactgcctctggggttccccagacgccgccatcgctcaaaggtgctgctgtccaacctggacggtgacctctgccctttgcccgaccccgtaaccagagacgccactcctgccctccctaacgacgcgggcctttcagacgcctacgcgggtcgcccacctgactgcccgaaatcaccccgcccaccaagtgtcccctcttcttcctggaatagtctcggtgcacagcctcacgtaacagggccctcctgatatggcgagactccgcgctcctcgtcactcacggggcaggcgctgaggaaggaactgtcaggcaccgcggggacgcctttccgagcgcccggctcggcgcggcgcgggggcgcgcacgccgcccagcttcggggccgcagagggggcggggcgggacgtccggggagtgcgcacgcatcctgcccgcggcgcgcgcgcaggtcggtgcgtctgtcgggggcgcgctcgggtacctgtaccccacgtagtcgccggttaccgatcggactaagttccagtggtgatttacaagtcaagttaaaatgtccccagaagtggccttgaaccgaatatctccaatgctctcccctttcatatctagcgtggtccggaatggaaaagtgggactggatgctacaaactgtttgaggataactgacttaaaatctggctgcacatcattgactcctgggcccaactgtgaccgatttaaactgcacataccatatgctggagagacattaaagtgggatatcattttcaatgcccaatacccagaactgcctcccgattttatctttggagaagatgctgaattcctgccagacccctcagctttgcagaatcttgcctcctggaatccttcaaatcctgaatgtctcttacttgtggtgaaggaacttgtgcaacaatatcaccaattccaatgtagccgcctccgggagagctcccgcctcatgtttgaataccagacattactggaggagccacagtatggagagaacatggaaatttatgctgggaaaaaaaacaactggactggtgaattttcagctcgtttccttttgaagctgcccgtagatttcagcaatatccccacataccttctcaaggatgtaaatgaagaccctggagaagatgtggccctcctctctgttagttttgaggacactgaagccacccaggtgtaccccaagctgtacttgtcacctcgaattgagcatgcacttggaggctcctcagctcttcatatcccagcttttccaggaggaggatgtctcattgattacgttcctcaagtatgccacctgctcaccaacaaggtgcagtacgtgattcaagggtatcacaaaagaagagagtatattgctgcttttctcagtcactttggcacaggtgtcgtggaatatgatgcagaaggctttacaaaactcactctgctgctgatgtggaaagatttttgttttcttgtacacattgacctgcctctgtttttccctcgagaccagccaactctcacatttcagtccgtttatcactttaccaacagtggacagctttactcccaggcccaaaaaaattatccgtacagccccagatgggatggaaatgaaatggccaaaagagcaaagtaagtgaatctgtcgttatttccaaggcttatttcaaaacctttgtccctcagttccaggaggcagcatttgccaatggaaagctctaggaaacaccagtcttgagaggtggccagccagactgcctgtccacatgcgtgtcagcacatacagccgcttcctggaagccgcctggaatgtcttcacggcagcgttttgctcacacagcagcttttgcacgccccaggcagccccgactgctgaaatccaacttgagctggctggtggtccctggatcctagagcccttcacttcgggttactccctctttcttgcctctatttcttagttggaagaaataaactcacaaattatggtgcagtaattttccggggaaagtaaagcctcaggaatgcccacgcctttcttccaaagcctttgtctctgagacctcttaagttctaagattaaatgcccctcgctgttcttcctctgaaaaaaaaataaaaacggcctcccggccctaatgctgagcttcgggcccgttcacttatgaggcgcctcatgacctcctcgatgactctcgcctcgtccgccgctgctacagcgccctacccctcaagctggccaccgccccacacccccggtctctcccgctccacccccctcgccgtcccttaggcctcgcccaagagacacggccaccccccccgcacccgactcccatccccccacaatccgccccccccctttttcccacgcccccgccccccctcctctcccagagtatctcctctacctccccccccccccccacgcctcccctacctactaacaacgcacgcccgcgcatccgccaccgagccggccacccc

SEQ ID NO: 361376 - DNA, 1556 bp, Homo sapiens
  misc_feature (940)..(940): n is a, c, g, or t
ccagaagcagatgctggcaccatgcttcctgtacagcctgcagaactgggatatcattttcaatgcccaatacccagaactgcctcccgattttatctttggagaagatgctgaattcctgccagacccctcagctttgcagaatcttgcctcctggaatccttcaaatcctgaatgtctcttacttgtggtgaaggaacttgtgcaacaatatcaccaattccaatgtagccgcctccgggagagctcccgcctcatgtttgaataccagacattactggaggagccacagtatggagagaacatggaaatttatgctgggaaaaaaaacaactggactggtgaattttcagctcgtttccttttgaagctgcccgtagatttcagcaatatccccacataccttctcaaggatgtaaatgaagaccctggagaagatgtggccctcctctctgttagttttgaggacactgaagccacccaggtgtaccccaagctgtacttgtcacctcgaattgagcatgcacttggaggctcctcagctcttcatatcccagcttttccaggaggaggatgtctcattgattacgttcctcaagtatgccacctgctcaccaacaaggtgcagtacgtgattcaagggtatcacaaaagaagagagtatattgctgcttttctcagtcactttggcacaggtgtcgtggaatatgatgcagaaggctttacaaaactcactctgctgctgatgtggaaagatttttgttttcttgtacacattgacctgcctctgtttttccctcgagaccagccaactctcacatttcagtccgtttatcactttaccaacagtggacagctttactcccaggcccaaaaaaattatccgtacagccccagatgggatggaaatgaaatggccaaaagagcaaagggatgccangggagcagagatgcctgcagcccgtgggagcaagtcctggcctttgcagttgcaaaaactggctgcaagctgctccagccccagaggaactggccaagctccagagggcctccttggagggcctcagagggagagagaactgctcagtaattttgatcactttgggcttatttcaaaacctttgtccctcagttccaggaggcagcatttgccaatggaaagctctaggaaacaccagtcttgagaggtggccagccagactgcctgtccacatgcgtgtcagcacatacagccgcttcctggaagccgcctggaatgtcttcacggcagcgttttgctcacacagcagcttttgcacgccccaggcagccccgactgctgaaatccaacttgagctggctggtggtccctggatcctagagcccttcacttcgggttactccctctttcttgcctctatttcttagttggaagaaataaactcacaaattatggtgcagtaattttccggggaaagtaaagcctcaggaatgcccacgcctttcttccaaagcctttgtctctgagacctcttaagttctaagattaaatgcccctcgctgttcttcctctgaaa

SEQ ID NO: 361377 - DNA, 2685 bp, Homo sapiens
actgtgtttatgtttttattttgattcatacttggcttgctgaaaaatacgctgtaaatataaaatactgcagtaatgccgacaatcaacatggtgaaaggtgacagtctttttgatttctgctcaactcattattttatacaataagctcagacgaataatacccaatttggataatgttacgcttgacaaaacactttacttcatttagtcctcacaacaaccctgtgaggtaggcacattctcggaggtaaaatgacgtgggcaaagttccctggctcgtttggggaaaggctcagcagccgggccaagaaaggtctttgggggcgcaagtctttggagggcaggtctttggggagcgctttgagtaatattagagctttcactaaaccctggcctattacgtcccctcccctgagatttacctttatatactcaagttctttcatgccaggaaggtaggctgaaggcttcgaaaacctgcagctcatacccaaagctagcactgtctatccctggagacccagcgcccaaaagctccactgggcgcatagcgcacggcacgcctcctcccccgagccgcagactgagtaactggccccggactaacctgaccaggtcggtcatgcaggagcccaccactaccaccgccgccacctcctcttgccactgcctctggggttccccagacgccgccatcgctcaaaggtgctgctgtccaacctggacggtgacctctgccctttgcccgaccccgtaaccagagacgccactcctgccctccctaacgacgcgggcctttcagacgcctacgcgggtcgcccacctgactgcccgaaatcaccccgcccaccaagtgtcccctcttcttcctggaatagtctcggtgcacagcctcacgtaacagggccctcctgatatggcgagactccgcgctcctcgtcactcacggggcaggcgctgaggaaggaactgtcaggcaccgcggggacgcctttccgagcgcccggctcggcgcggcgcgggggcgcgcacgccgcccagcttcggggccgcagagggggcggggcgggacgtccggggagtgcgcacgcatcctgcccgcggcgcgcgcgcaggtcggtgcgtctgtcgggggcgcgctcgggtacctgtaccccacgtagtcgccggttaccgatcggactaagttccagtggtgatttacaagtcaagttaaaatgtccccagaagtggccttgaaccgaatatctccaatgctctcccctttcatatctagcgtggtccggaatggaaaagtgggactggatgctacaaactgtttgaggataactgacttaaaatctggctgcacatcattgactcctgggcccaactgtgaccgatttaaactgcacataccatatgctggagagacattaaagtgggatatcattttcaatgcccaatacccagaactgcctcccgattttatctttggagaagatgctgaattcctgccagacccctcagctttgcagaatcttgcctcctggaatccttcaaatcctgaatgtctcttacttgtggtgaaggaacttgtgcaacaatatcaccaattccaatgtagccgcctccgggagagctcccgcctcatgtttgaataccagacattactggaggagccacagtatggagagaacatggaaatttatgctgggaaaaaaaacaactgggatgtaaatgaagaccctggagaagatgtggccctcctctctgttagttttgaggacactgaagccacccaggtgtaccccaagctgtacttgtcacctcgaattgagcatgcacttggaggctcctcagctcttcatatcccagcttttccaggaggaggatgtctcattgattacgttcctcaagtatgccacctgctcaccaacaaggtgcagtacgtgattcaagggtatcacaaaagaagagagtatattgctgcttttctcagtcactttggcacaggtgtcgtggaatatgatgcagaaggctttacaaaactcactctgctgctgatgtggaaagatttttgttttcttgtacacattgacctgcctctgtttttccctcgagaccagccaactctcacatttcagtccgtttatcactttaccaacagtggacagctttactcccaggcccaaaaaaattatccgtacagccccagatgggatggaaatgaaatggccaaaagagcaaaggcttatttcaaaacctttgtccctcagttccaggaggcagcatttgccaatggaaagctctaggaaacaccagtcttgagaggtggccagccagactgcctgtccacatgcgtgtcagcacatacagccgcttcctggaagccgcctggaatgtcttcacggcagcgttttgctcacacagcagcttttgcacgccccaggcagccccgactgctgaaatccaacttgagctggctggtggtccctggatcctagagcccttcacttcgggttactccctctttcttgcctctatttcttagttggaagaaataaactcacaaattatggtgcagtaattttccggggaaagtaaagcctcaggaatgcccacgcctttcttccaaagcctttgtctctgagacctcttaagttctaagattaaatgcccctcgctgttcttcctctgaaa

SEQ ID NO: 361378 - DNA, 2286 bp, Homo sapiens
actgtgtttatgtttttattttgattcatacttggcttgctgaaaaatacgctgtaaatataaaatactgcagtaatgccgacaatcaacatggtgaaaggtgacagtctttttgatttctgctcaactcattattttatacaataagctcagacgaataatacccaatttggataatgttacgcttgacaaaacactttacttcatttagtcctcacaacaaccctgtgaggtaggcacattctcggaggtaaaatgacgtgggcaaagttccctggctcgtttggggaaaggctcagcagccgggccaagaaaggtctttgggggcgcaagtctttggagggcaggtctttggggagcgctttgagtaatattagagctttcactaaaccctggcctattacgtcccctcccctgagatttacctttatatactcaagttctttcatgccaggaaggtaggctgaaggcttcgaaaacctgcagctcatacccaaagctagcactgtctatccctggagacccagcgcccaaaagctccactgggcgcatagcgcacggcacgcctcctcccccgagccgcagactgagtaactggccccggactaacctgaccaggtcggtcatgcaggagcccaccactaccaccgccgccacctcctcttgccactgcctctggggttccccagacgccgccatcgctcaaaggtgctgctgtccaacctggacggtgacctctgccctttgcccgaccccgtaaccagagacgccactcctgccctccctaacgacgcgggcctttcagacgcctacgcgggtcgcccacctgactgcccgaaatcaccccgcccaccaagtgtcccctcttcttcctggaatagtctcggtgcacagcctcacgtaacagggccctcctgatatggcgagactccgcgctcctcgtcactcacggggcaggcgctgaggaaggaactgtcaggcaccgcggggacgcctttccgagcgcccggctcggcgcggcgcgggggcgcgcacgccgcccagcttcggggccgcagagggggcggggcgggacgtccggggagtgcgcacgcatcctgcccgcggcgcgcgcgcaggtcggtgcgtctgtcgggggcgcgctcgggtacctgtaccccacgtagtcgccggttaccgatcggactaagttccagtggtgatttacaagtcaagttaaaatgtccccagaagtggccttgaaccgaatatctccaatgctctcccctttcatatctagcgtggtccggaatggaaaagtgggactggatgctacaaactgtttgaggataactgacttaaaatctggctgcacatcattgactcctgggcccaactgtgaccgatttaaactgcacataccatatgctggagagacattaaagtgggatatcattttcaatgcccaatacccagaactgcctcccgattttatctttggagaagatgctgaattcctgccagacccctcagctttgcagaatcttgcctcctggaatccttcaaatcctgaatgtctcttacttgtggtgaaggaacttgtgcaacaatatcaccaattccaatgtagccgcctccgggagagctcccgcctcatgtttgaataccagacattactggaggagccacagtatggagagaacatggaaatttatgctgggaaaaaaaacaactggactggtgaattttcagctcgtttccttttgaagctgcccgtagatttcagcaatatccccacataccttctcaaggatgtaaatgaagaccctggagaagatgtggccctcctctctgttagttttgaggacactgaagccacccaggtgtaccccaagctgtacttgtcacctcgaattgagcaagatgggatctcgctatgtgtgtatgcccaggctggtctcaaactcctgagctcacataatcaccaacctacacctcctgaagtgctggggattgcagggccgaggccacacacttgtccagacctggctctttaaagttaggcggagaattttccattcctcctggaaccacatccgttgcccttggaggtctcccggttttctatccccgctttcccgggaggggggctccattgatcgttccccagtttccccgtccccacagggcgtcgcgctccggttcccccgagcggtttggcgttcccccttggccgggttggttttgacgttacacccctggtggggttgtttacgcctctccccaccactgcttctcgggtcccgc

SEQ ID NO: 361379 - DNA, 1779 bp, Homo sapiens
actgtgtttatgtttttattttgattcatacttggcttgctgaaaaatacgctgtaaatataaaatactgcagtaatgccgacaatcaacatggtgaaaggtgacagtctttttgatttctgctcaactcattattttatacaataagctcagacgaataatacccaatttggataatgttacgcttgacaaaacactttacttcatttagtcctcacaacaaccctgtgaggtaggcacattctcggaggtaaaatgacgtgggcaaagttccctggctcgtttggggaaaggctcagcagccgggccaagaaaggtctttgggggcgcaagtctttggagggcaggtctttggggagcgctttgagtaatattagagctttcactaaaccctggcctattacgtcccctcccctgagatttacctttatatactcaagttctttcatgccaggaaggtaggctgaaggcttcgaaaacctgcagctcatacccaaagctagcactgtctatccctggagacccagcgcccaaaagctccactgggcgcatagcgcacggcacgcctcctcccccgagccgcagactgagtaactggccccggactaacctgaccaggtcggtcatgcaggagcccaccactaccaccgccgccacctcctcttgccactgcctctggggttccccagacgccgccatcgctcaaaggtgctgctgtccaacctggacggtgacctctgccctttgcccgaccccgtaaccagagacgccactcctgccctccctaacgacgcgggcctttcagacgcctacgcgggtcgcccacctgactgcccgaaatcaccccgcccaccaagtgtcccctcttcttcctggaatagtctcggtgcacagcctcacgtaacagggccctcctgatatggcgagactccgcgctcctcgtcactcacggggcaggcgctgaggaaggaactgtcaggcaccgcggggacgcctttccgagcgcccggctcggcgcggcgcgggggcgcgcacgccgcccagcttcggggccgcagagggggcggggcgggacgtccggggagtgcgcacgcatcctgcccgcggcgcgcgcgcaggtcggtgcgtctgtcgggggcgcgctcgggtacctgtaccccacgtagtcgccggttaccgatcggactaagttccagtggtgatttacaagtcaagttaaaatgtccccagaagtggccttgaaccgaatatctccaatgctctcccctttcatatctagcgtggtccggaatggaaaagtgggactggatgctacaaactgtttgaggataactgacttaaaatctggctgcacatcattgactcctgggcccaactgtgaccgatttaaactgcacataccatatgctggagagacattaaagtgggatatcattttcaatgcccaatacccagaactgcctcccgattttatctttggagaagatgctgaattcctgccagacccctcagctttgcagaatcttgcctcctggaatccttcaaatcctgaatgtctcttacttgtggtgaaggaacttgtgcaacaatatcaccaattccaatgtagccgcctccgggagagctcccgcctcatgtttgaataccagacattactggaggagccacagtatggagagaacatggaaatttatgctgggaaaaaaaacaactgggggtaaggatttttgagaatggaaaaaaagatgacttcatccataataaaataatcaattcata

SEQ ID NO: 361380 - DNA, 2016 bp, Homo sapiens
actgtgtttatgtttttattttgattcatacttggcttgctgaaaaatacgctgtaaatataaaatactgcagtaatgccgacaatcaacatggtgaaaggtgacagtctttttgatttctgctcaactcattattttatacaataagctcagacgaataatacccaatttggataatgttacgcttgacaaaacactttacttcatttagtcctcacaacaaccctgtgaggtaggcacattctcggaggtaaaatgacgtgggcaaagttccctggctcgtttggggaaaggctcagcagccgggccaagaaaggtctttgggggcgcaagtctttggagggcaggtctttggggagcgctttgagtaatattagagctttcactaaaccctggcctattacgtcccctcccctgagatttacctttatatactcaagttctttcatgccaggaaggtaggctgaaggcttcgaaaacctgcagctcatacccaaagctagcactgtctatccctggagacccagcgcccaaaagctccactgggcgcatagcgcacggcacgcctcctcccccgagccgcagactgagtaactggccccggactaacctgaccaggtcggtcatgcaggagcccaccactaccaccgccgccacctcctcttgccactgcctctggggttccccagacgccgccatcgctcaaaggtgctgctgtccaacctggacggtgacctctgccctttgcccgaccccgtaaccagagacgccactcctgccctccctaacgacgcgggcctttcagacgcctacgcgggtcgcccacctgactgcccgaaatcaccccgcccaccaagtgtcccctcttcttcctggaatagtctcggtgcacagcctcacgtaacagggccctcctgatatggcgagactccgcgctcctcgtcactcacggggcaggcgctgaggaaggaactgtcaggcaccgcggggacgcctttccgagcgcccggctcggcgcggcgcgggggcgcgcacgccgcccagcttcggggccgcagagggggcggggcgggacgtccggggagtgcgcacgcatcctgcccgcggcgcgcgcgcaggtcggtgcgtctgtcgggggcgcgctcgggtacctgtaccccacgtagtcgccggttaccgatcggactaagttccagaagcaagagataaagtaataatgggtactgtggggaaaaacacagaagaacaattcggtaatatagtggtgatttacaagtcaagttaaaatgtccccagaagtggccttgaaccgaatatctccaatgctctcccctttcatatctagcgtggtccggaatggaaaagtgggactggatgctacaaactgtttgaggataactgacttaaaatctggctgcacatcattgactcctgggcccaactgtgaccgatttaaactgcacataccatatgctggagagacattaaagtgggatatcattttcaatgcccaatacccagaactgcctcccgattttatctttggagaagatgctgaattcctgccagacccctcagctttgcagatggagtcttgctctgttgcccaggctagagtggagtggctcaatctcggctcactgcaagctccgcctcccgggttcacgccattctcctgcctcagcctcccgagtagctgggactacaggcgcccgccaccacacctggctagtttttttatatttttagtagagatggggtttcaccatgttagccaggatggtctccatctcctgacctcatgatctgcccacctcggcctcccaaagtgctgggattacaggcgtgagccactgcacctggcccctcatgagttcttaattttagagaatatgttcttcagttttacaattctatttgattattttctgtaaattccaattatctggttaacttatcttttcatctatatctaaatggctttctccactttcttgcttgtgttaattgtatttg

SEQ ID NO: 361381 - DNA, 1708 bp, Homo sapiens
gggagtcttacaggggcggagcttaaggtgccggaggtctcaggggaggggcctgggggcagcggcttccgtcctggctgtgagcctggaactgaaaaatgcccgaaagtggggcggggcttgagagtctaggtggggcccaggccgggtcgcggccctttcaccactcccacccgtcacctcgccgtgtctgctgacccccaggaggccaactactacggctcgctgactcaggcgggcaccgtgagcctgggcctggacgccgagggccaggaggtgttcgtacccttcagcgcggtgctgcccatggtggcgcccaacgacctcgtgttcgatggctgggacatctcgtcgctgaacctggccgaggcgatgcggcgcgcgaaggtgctggactgggggctgcaggagcaactgtggccgcacatggaggccctgcggccccggccttctgtttacatccccgaattcatcgcggccaaccagagcgcgcgcgcggacaacctcatcccaggctcgcgtgcgcagcagctggagcagatccgcagggacatccgagacttccggtctagcgcggggctggacaaagtcatagtgctgtggacggcgaacacggagcgcttctgtgaggtgattccaggcctcaacgacacagccgagaacctgctgcgcaccattgagctcggtctggaggtgtcgccctccacgctcttcgccgtggccagcatcctggagggctgtgccttcctcaatgggtctccgcagaacaccctggtgcccggagctcttgagctcgcgtggcagcaccgggtttttgtgggcggagatgacttcaagtcaggccagaccaaagtcaagtccgtgcttgtggacttcctcattggctccggcctcaagaccatgtccatcgtgagttacaaccacctgggcaacaacgatggggagaacctatcggcgccattgcagttccgctctaaggaggtgtccaagagcaacgtggtggacgacatggtgcagagcaacccagtgctctatacgcccggcgaagagcctgaccactgcgtggtcatcaagtatgtgccgtacgtgggtgacagcaagcgcgcgctggatgagtatacctcggagctgatgctgggcggaaccaacacactggtgctgcacaacacgtgtgaggactcgctgctggccgcacccatcatgctggacctagcgctgctgaccgagctgtgccagcgcgtgagcttctgcactgacatggaccccgagccgcagaccttccaccccgtgctgtccctgctcagcttcctcttcaaggcgccactagtgccgcccggcagcccggtggtcaatgcgcttttccgccagcgcagctgcatcgagaacatcctcagggcctgcgtggggctcccgccacagaaccacatgctcctggaacacaaaatggagcgcccagggcccagcctcaagcgagttggacccgtggctgccacctaccctatgttgaacaagaaaggaccggtacccgctgccaccaatggctgcaccggtgatgccaatgggcatctgcaagaggagcccccaatgcccaccacctgaggccccggtcacacagtttctcggctcttcctccccgctgccccccacgaccctaccttgaaggcccccacaaataaaggcgctgccactcagccctccttccacctgg

SEQ ID NO: 361382 - DNA, 309 bp, Homo sapiens
tcaagcttctaacgatgtacggggacatgctcctggaacacaaaatggagcgcccagggcccagcctcaagcgagttggacccgtggctgccacctaccctatgttgaacaagaaaggaccggtacccgctgccaccaatggctgcaccggtgatgccaatgggcatctgcaagaggagcccccaatgcccaccacctgaggccccggtcacacagtttctcggctcttcctccccgctgccccccacgaccctaccttgaaggcccccacaaataaaggcgctgccactcagccctccttccacctgg

SEQ ID NO: 361383 - DNA, 328 bp, Homo sapiens
cagctggtaccggcatgtgctgtaggccagcgcagctgcatcgagaacatcctcagggcctgcgtggggctcccgccacagaaccacatgctcctggaacacaaaatggagcgcccagggcccagcctcaagcgagttggacccgtggctgccacctaccctatgttgaacaagaaaggaccggtacccgctgccaccaatggctgcaccggtgatgccaatgggcatctgcaagaggagcccccaatgcccaccacctgaggccccggtcacacagtttctcggctcttcctccccgctggcctacagcacatgccggtaccggctg

SEQ ID NO: 361384 - DNA, 1883 bp, Homo sapiens
aacggctagtagagctgggtgttaatcggccgagggcgcccgagagcccgcgctgtccgccgccgctgcctgagtcgactctgcgccgcccgccgcgatggaggccgccgcccagttcttcgtcgagagcccggacgtggtctacggccccgaggccatcgaggcgcaatacgagtaccggacgacgcgcgtcagccgcgagggtggcgttctcaaggtgcaccccacgtccacgcgcttcaccttccggaccgcccggcaggtgccccggctcggggtcatgcttgtcggctggggcgggaacaacggctccacactcaccgccgcggtgctggccaatcgactgcgtttgtcctggcccacgcgcagcggccgcaaggaggccaactactacggctcgctgactcaggcgggcaccgtgagcctgggcctggacgccgagggccaggaggtgttcgtacccttcagcgcggtgctgcccatggtggcgcccaacgacctcgtgttcgatggctgggacatctcgtcgctgaacctggccgaggcgatgcggcgcgcgaaggtgctggactgggggctgcaggagcaactgtggccgcacatggaggccctgcggccccggccttctgtttacatccccgaattcatcgcggccaaccagagcgcgcgcgcggacaacctcatcccaggctcgcgtgcgcagcagctggagcagatccgcagggacatccgagacttccggtctagcgcggggctggacaaagtcatagtgctgtggacggcgaacacggagcgcttctgtgaggtgattccaggcctcaacgacacagccgagaacctgctgcgcaccattgagctcggtctggaggtgtcgccctccacgctcttcgccgtggccagcatcctggagggctgtgccttcctcaatgggtctccgcagaacaccctggtgcccggagctcttgagctcgcgtggcagcaccgggtttttgtgggcggagatgacttcaagtcaggccagaccaaagtcaagtccgtgcttgtggacttcctcattggctccggcctcaagaccatgtccatcgtgagttacaaccacctgggcaacaacgatggggagaacctatcggcgccattgcagttccgctctaaggaggtgtccaagagcaacgtggtggacgacatggtgcagagcaacccagtgctctatacgcccggcgaagagcctgaccactgcgtggtcatcaagtatgtgccgtacgtgggtgacagcaagcgcgcgctggatgagtatacctcggagctgatgctgggcggaaccaacacactggtgctgcacaacacgtgtgaggactcgctgctggccgcacccatcatgctggacctagcgctgctgaccgagctgtgccagcgcgtgagcttctgcactgacatggaccccgagccgcagaccttccaccccgtgctgtccctgctcagcttcctcttcaaggcgccactagtgccgcccggcagcccggtggtcaatgcgcttttccgccagcgcagctgcatcgagaacatcctcagggcctgcgtggggctcccgccacagaaccacatgctcctggaacacaaaatggagcgcccagggcccagcctcaagcgagttggacccgtggctgccacctaccctatgttgaacaagaaaggaccggtacccgctgccaccaatggctgcaccggtgatgccaatgggcatctgcaagaggagcccccaatgcccaccacctgaggccccggtcacacagtttctcggctcttcctccccgctgccccccacgaccctaccttgaaggcccccacaaataaaggcgctgccactcagccctccttccacctgg

SEQ ID NO: 361385 - DNA, 2195 bp, Homo sapiens
gactttgtcccccgagatggatgggggcggacatggggagccaggggatgggactgcctggtaggtgctgctgcccacgaagggggagtaggtggcagtgtggctccgaggagattctggctttggagttctggtcctctgcctgtttcccctgcagtgtctctgacccagaccccctacctacccccccggaggcccagcttccctgcccagctccaccccctggcttgtggctgggctcatgtgtagcctcattgtcctcttgtaaaggggggataggcagccatgagcccctgggggctgcggagcgagcgaggtgaacctatacgcgccgcgctcgtggacgcctggccacttccgccaggcggggacccgatggccacggtggctctgggttgtcgggcctcgaaccgggtctccagacgttgggcccctccctcccagcgcgggagaggcggggaagggggcggggcgggggaggggccgcagcgcttttctccggaggtcgcgcgcccgagagcccgcgctgtccgccgccgctgcctgagtcgactctgcgccgcccgccgcgatggaggccgccgcccagttcttcgtcgagagcccggacgtggtctacggccccgaggccatcgaggcgcaatacgagtaccggacgacgcgcgtcagccgcgagggtggcgttctcaaggaggccaactactacggctcgctgactcaggcgggcaccgtgagcctgggcctggacgccgagggccaggaggtgttcgtacccttcagcgcggtgctgcccatggtggcgcccaacgacctcgtgttcgatggctgggacatctcgtcgctgaacctggccgaggcgatgcggcgcgcgaaggtgctggactgggggctgcaggagcaactgtggccgcacatggaggccctgcggccccggccttctgtttacatccccgaattcatcgcggccaaccagagcgcgcgcgcggacaacctcatcccaggctcgcgtgcgcagcagctggagcagatccgcagggacatccgagacttccggtctagcgcggggctggacaaagtcatagtgctgtggacggcgaacacggagcgcttctgtgaggtgattccaggcctcaacgacacagccgagaacctgctgcgcaccattgagctcggtctggaggtgtcgccctccacgctcttcgccgtggccagcatcctggagggctgtgccttcctcaatgggtctccgcagaacaccctggtgcccggagctcttgagctcgcgtggcagcaccgggtttttgtgggcggagatgacttcaagtcaggccagaccaaagtcaagtccgtgcttgtggacttcctcattggctccggcctcaagaccatgtccatcgtgagttacaaccacctgggcaacaacgatggggagaacctatcggcgccattgcagttccgctctaaggaggtgtccaagagcaacgtggtggacgacatggtgcagagcaacccagtgctctatacgcccggcgaagagcctgaccactgcgtggtcatcaagtatgtgccgtacgtgggtgacagcaagcgcgcgctggatgagtatacctcggagctgatgctgggcggaaccaacacactggtgctgcacaacacgtgtgaggactcgctgctggccgcacccatcatgctggacctagcgctgctgaccgagctgtgccagcgcgtgagcttctgcactgacatggaccccgagccgcagaccttccaccccgtgctgtccctgctcagcttcctcttcaaggcgccactagtgccgcccggcagcccggtggtcaatgcgcttttccgccagcgcagctgcatcgagaacatcctcagggcctgcgtggggctcccgccacagaaccacatgctcctggaacacaaaatggagcgcccagggcccagcctcaagcgagttggacccgtggctgccacctaccctatgttgaacaagaaaggaccggtacccgctgccaccaatggctgcaccggtgatgccaatgggcatctgcaagaggagcccccaatgcccaccacctgaggccccggtcacacagtttctcggctcttcctccccgctgccccccacgaccctaccttgaaggcccccacaaataaaggcgctgccactcagccctccttccacctgg

SEQ ID NO: 361386 - DNA, 2450 bp, Homo sapiens
gactttgtcccccgagatggatgggggcggacatggggagccaggggatgggactgcctggtaggtgctgctgcccacgaagggggagtaggtggcagtgtggctccgaggagattctggctttggagttctggtcctctgcctgtttcccctgcagtgtctctgacccagaccccctacctacccccccggaggcccagcttccctgcccagctccaccccctggcttgtggctgggctcatgtgtagcctcattgtcctcttgtaaaggggggataggcagccatgagcccctgggggctgcggagcgagcgaggtgaacctatacgcgccgcgctcgtggacgcctggccacttccgccaggcggggacccgatggccacggtggctctgggttgtcgggcctcgaaccgggtctccagacgttgggcccctccctcccagcgcgggagaggcggggaagggggcggggcgggggaggggccgcagcgcttttctccggaggtcgcgcgcccgagagcccgcgctgtccgccgccgctgcctgagtcgactctgcgccgcccgccgcgatggaggccgccgcccagttcttcgtcgagagcccggacgtggtctacggccccgaggccatcgaggcgcaatacgagtaccggacgacgcgcgtcagccgcgagggtggcgttctcaaggtgcaccccacgtccacgcgcttcaccttccggaccgcccggcaggtgccccggctcggggtcatgcttgtcggctggggcgggaacaacggctccacactcaccgccgcggtgctggccaatcgactgcgtttgtcctggcccacgcgcagcggccgcaaggaggccaactactacggctcgctgactcaggcgggcaccgtgagcctgggcctggacgccgagggccaggaggtgttcgtacccttcagcgcggtgctgcccatggtggcgcccaacgacctcgtgttcgatggggcggagccctgggccggggtggggcgggatgggagatggggtctggaggggcccaggatccgggcagggccgagtgtgagggtccccccaggctgggacatctcgtcgctgaacctggccgaggcgatgcggcgcgcgaaggtgctggactgggggctgcaggagcaactgtggccgcacatggaggccctgcggccccggccttctgtttacatccccgaattcatcgcggccaaccagagcgcgcgcgcggacaacctcatcccaggctcgcgtgcgcagcagctggagcagatccgcagggacatccgagacttccggtctagcgcggggctggacaaagtcatagtgctgtggacggcgaacacggagcgcttctgtgaggtgattccaggcctcaacgacacagccgagaacctgctgcgcaccattgagctcggtctggaggtgtcgccctccacgctcttcgccgtggccagcatcctggagggctgtgccttcctcaatgggtctccgcagaacaccctggtgcccggagctcttgagctcgcgtggcagcaccgggtttttgtgggcggagatgacttcaagtcaggccagaccaaagtcaagtccgtgcttgtggacttcctcattggctccggcctcaagaccatgtccatcgtgagttacaaccacctgggcaacaacgatggggagaacctatcggcgccattgcagttccgctctaaggaggtgtccaagagcaacgtggtggacgacatggtgcagagcaacccagtgctctatacgcccggcgaagagcctgaccactgcgtggtcatcaagtatgtgccgtacgtgggtgacagcaagcgcgcgctggatgagtatacctcggagctgatgctgggcggaaccaacacactggtgctgcacaacacgtgtgaggactcgctgctggccgcacccatcatgctggacctagcgctgctgaccgagctgtgccagcgcgtgagcttctgcactgacatggaccccgagccgcagaccttccaccccgtgctgtccctgctcagcttcctcttcaaggcgccactagtgccgcccggcagcccggtggtcaatgcgcttttccgccagcgcagctgcatcgagaacatcctcagggcctgcgtggggctcccgccacagaaccacatgctcctggaacacaaaatggagcgcccagggcccagcctcaagcgagttggacccgtggctgccacctaccctatgttgaacaagaaaggaccggtacccgctgccaccaatggctgcaccggtgatgccaatgggcatctgcaagaggagcccccaatgcccaccacctgaggccccggtcacacagtttctcggctcttcctccccgctgccccccacgaccctaccttgaaggcccccacaaataaaggcgctgccactcagccctccttccacctgg

SEQ ID NO: 361387 - DNA, 2306 bp, Homo sapiens
gactttgtcccccgagatggatgggggcggacatggggagccaggggatgggactgcctggtaggtgctgctgcccacgaagggggagtaggtggcagtgtggctccgaggagattctggctttggagttctggtcctctgcctgtttcccctgcagtgtctctgacccagaccccctacctacccccccggaggcccagcttccctgcccagctccaccccctggcttgtggctgggctcatgtgtagcctcattgtcctcttgtaaaggggggataggcagccatgagcccctgggggctgcggagcgagcgaggtgaacctatacgcgccgcgctcgtggacgcctggccacttccgccaggcggggacccgatggccacggtggctctgggttgtcgggcctcgaaccgggtctccagacgttgggcccctccctcccagcgcgggagaggcggggaagggggcggggcgggggaggggccgcagcgcttttctccggaggtcgcgcgcccgagagcccgcgctgtccgccgccgctgcctgagtcgactctgcgccgcccgccgcgatggaggccgccgcccagttcttcgtcgagagcccggacgtggtctacggccccgaggccatcgaggcgcaatacgagtaccggacgacgcgcgtcagccgcgagggtggcgttctcaaggtgcaccccacgtccacgcgcttcaccttccggaccgcccggcaggtgccccggctcggggtcatgcttgtcggctggggcgggaacaacggctccacactcaccgccgcggtgctggccaatcgactgcgtttgtcctggcccacgcgcagcggccgcaaggaggccaactactacggctcgctgactcaggcgggcaccgtgagcctgggcctggacgccgagggccaggaggtgttcgtacccttcagcgcggtgctgcccatggtggcgcccaacgacctcgtgttcgatggctgggacatctcgtcgctgaacctggccgaggcgatgcggcgcgcgaaggtgctggactgggggctgcaggagcaactgtggccgcacatggaggccctgcggccccggccttctgtttacatccccgaattcatcgcggccaaccagagcgcgcgcgcggacaacctcatcccaggctcgcgtgcgcagcagctggagcagatccgcagggacatccgagacttccggtctagcgcggggctggacaaagtcatagtgctgtggacggcgaacacggagcgcttctgtgagctcggtctggaggtgtcgccctccacgctcttcgccgtggccagcatcctggagggctgtgccttcctcaatgggtctccgcagaacaccctggtgcccggagctcttgagctcgcgtggcagcaccgggtttttgtgggcggagatgacttcaagtcaggccagaccaaagtcaagtccgtgcttgtggacttcctcattggctccggcctcaagaccatgtccatcgtgagttacaaccacctgggcaacaacgatggggagaacctatcggcgccattgcagttccgctctaaggaggtgtccaagagcaacgtggtggacgacatggtgcagagcaacccagtgctctatacgcccggcgaagagcctgaccactgcgtggtcatcaagtatgtgccgtacgtgggtgacagcaagcgcgcgctggatgagtatacctcggagctgatgctgggcggaaccaacacactggtgctgcacaacacgtgtgaggactcgctgctggccgcacccatcatgctggacctagcgctgctgaccgagctgtgccagcgcgtgagcttctgcactgacatggaccccgagccgcagaccttccaccccgtgctgtccctgctcagcttcctcttcaaggcgccactagtgccgcccggcagcccggtggtcaatgcgcttttccgccagcgcagctgcatcgagaacatcctcagggcctgcgtggggctcccgccacagaaccacatgctcctggaacacaaaatggagcgcccagggcccagcctcaagcgagttggacccgtggctgccacctaccctatgttgaacaagaaaggaccggtacccgctgccaccaatggctgcaccggtgatgccaatgggcatctgcaagaggagcccccaatgcccaccacctgaggccccggtcacacagtttctcggctcttcctccccgctgccccccacgaccctaccttgaaggcccccacaaataaaggcgctgccactcagccctccttccacctgg

SEQ ID NO: 361388 - DNA, 2062 bp, Homo sapiens
gactttgtcccccgagatggatgggggcggacatggggagccaggggatgggactgcctggtaggtgctgctgcccacgaagggggagtaggtggcagtgtggctccgaggagattctggctttggagttctggtcctctgcctgtttcccctgcagtgtctctgacccagaccccctacctacccccccggaggcccagcttccctgcccagctccaccccctggcttgtggctgggctcatgtgtagcctcattgtcctcttgtaaaggggggataggcagccatgagcccctgggggctgcggagcgagcgaggtgaacctatacgcgccgcgctcgtggacgcctggccacttccgccaggcggggacccgatggccacggtggctctgggttgtcgggcctcgaaccgggtctccagacgttgggcccctccctcccagcgcgggagaggcggggaagggggcggggcgggggaggggccgcagcgcttttctccggaggtcgcgcgcccgagagcccgcgctgtccgccgccgctgcctgagtcgactctgcgccgcccgccgcgatggaggccgccgcccagttcttcgtcgagagcccggacgtggtctacggccccgaggccatcgaggcgcaatacgagtaccggacgacgcgcgtcagccgcgagggtggcgttctcaaggctgggacatctcgtcgctgaacctggccgaggcgatgcggcgcgcgaaggtgctggactgggggctgcaggagcaactgtggccgcacatggaggccctgcggccccggccttctgtttacatccccgaattcatcgcggccaaccagagcgcgcgcgcggacaacctcatcccaggctcgcgtgcgcagcagctggagcagatccgcagggacatccgagacttccggtctagcgcggggctggacaaagtcatagtgctgtggacggcgaacacggagcgcttctgtgaggtgattccaggcctcaacgacacagccgagaacctgctgcgcaccattgagctcggtctggaggtgtcgccctccacgctcttcgccgtggccagcatcctggagggctgtgccttcctcaatgggtctccgcagaacaccctggtgcccggagctcttgagctcgcgtggcagcaccgggtttttgtgggcggagatgacttcaagtcaggccagaccaaagtcaagtccgtgcttgtggacttcctcattggctccggcctcaagaccatgtccatcgtgagttacaaccacctgggcaacaacgatggggagaacctatcggcgccattgcagttccgctctaaggaggtgtccaagagcaacgtggtggacgacatggtgcagagcaacccagtgctctatacgcccggcgaagagcctgaccactgcgtggtcatcaagtatgtgccgtacgtgggtgacagcaagcgcgcgctggatgagtatacctcggagctgatgctgggcggaaccaacacactggtgctgcacaacacgtgtgaggactcgctgctggccgcacccatcatgctggacctagcgctgctgaccgagctgtgccagcgcgtgagcttctgcactgacatggaccccgagccgcagaccttccaccccgtgctgtccctgctcagcttcctcttcaaggcgccactagtgccgcccggcagcccggtggtcaatgcgcttttccgccagcgcagctgcatcgagaacatcctcagggcctgcgtggggctcccgccacagaaccacatgctcctggaacacaaaatggagcgcccagggcccagcctcaagcgagttggacccgtggctgccacctaccctatgttgaacaagaaaggaccggtacccgctgccaccaatggctgcaccggtgatgccaatgggcatctgcaagaggagcccccaatgcccaccacctgaggccccggtcacacagtttctcggctcttcctccccgctgccccccacgaccctaccttgaaggcccccacaaataaaggcgctgccactcagccctccttccacctgg

SEQ ID NO: 361389 - DNA, 1842 bp, Homo sapiens
aacggctagtagagctgggtgttaatcggccgaggccgccgctgcctgagtcgactctgcgccgcccgccgcgatggaggccgccgcccagttcttcgtcgagagcccggacgtggtctacggccccgaggccatcgaggcgcaatacgagtaccggacgacgcgcgtcagccgcgagggtggcgttctcaaggtgcaccccacgtccacgcgcttcaccttccggaccgcccggcaggtgccccggctcggggtcatgcttgtcggctggggcgggaacaacggctccacactcaccgccgcggtgctggccaatcgactgcgtttgtcctggcccacgcgcagcggccgcaaggaggccaactactacggctcgctgactcaggcgggcaccgtgagcctgggcctggacgccgagggccaggaggtgttcgtacccttcagcgcggtgctgcccatggtggcgcccaacgacctcgtgttcgatggctgggacatctcgtcgctgaacctggccgaggcgatgcggcgcgcgaaggtgctggactgggggctgcaggagcaactgtggccgcacatggaggccctgcggccccggccttctgtttacatccccgaattcatcgcggccaaccagagcgcgcgcgcggacaacctcatcccaggctcgcgtgcgcagcagctggagcagatccgcagggacatccgagacttccggtctagcgcggggctggacaaagtcatagtgctgtggacggcgaacacggagcgcttctgtgaggtgattccaggcctcaacgacacagccgagaacctgctgcgcaccattgagctcggtctggaggtgtcgccctccacgctcttcgccgtggccagcatcctggagggctgtgccttcctcaatgggtctccgcagaacaccctggtgcccggagctcttgagctcgcgtggcagcaccgggtttttgtgggcggagatgacttcaagtcaggccagaccaaagtcaagtccgtgcttgtggacttcctcattggctccggcctcaagaccatgtccatcgtgagttacaaccacctgggcaacaacgatggggagaacctatcggcgccattgcagttccgctctaaggaggtgtccaagagcaacgtggtggacgacatggtgcagagcaacccagtgctctatacgcccggcgaagagcctgaccactgcgtggtcatcaagtatgtgccgtacgtgggtgacagcaagcgcgcgctggatgagtatacctcggagctgatgctgggcggaaccaacacactggtgctgcacaacacgtgtgaggactcgctgctggccgcacccatcatgctggacctagcgctgctgaccgagctgtgccagcgcgtgagcttctgcactgacatggaccccgagccgcagaccttccaccccgtgctgtccctgctcagcttcctcttcaaggcgccactagtgccgcccggcagcccggtggtcaatgcgcttttccgccagcgcagctgcatcgagaacatcctcagggcctgcgtggggctcccgccacagaaccacatgctcctggaacacaaaatggagcgcccagggcccagcctcaagcgagttggacccgtggctgccacctaccctatgttgaacaagaaaggaccggtacccgctgccaccaatggctgcaccggtgatgccaatgggcatctgcaagaggagcccccaatgcccaccacctgaggccccggtcacacagtttctcggctcttcctccccgctgaaaaaaaacaacagtatgtatacccatctctattttctcttacacatagaaa

SEQ ID NO: 361390 - DNA, 1471 bp, Homo sapiens
  misc_feature (22)..(22): n is a, c, g, or t
acattacggctaggtacgaggnctcgggtttaccaggaggtgttcgtacccttcagcgcggtgctgcccatggtggcgcccaacgacctcgtgttcgatggctgggacatctcgtcgctgaacctggccgaggcgatgcggcgcgcgaaggtgctggactgggggctgcaggagcaactgtggccgcacatggaggccctgcggccccggccttctgtttacatccccgaattcatcgcggccaaccagagcgcgcgcgcggacaacctcatcccaggctcgcgtgcgcagcagctggagcagatccgcagggacatccgagacttccggtctagcgcggggctggacaaagtcatagtgctgtggacggcgaacacggagcgcttctgtgaggtgattccaggcctcaacgacacagccgagaacctgctgcgcaccattgagctcggtctggaggtgtcgccctccacgctcttcgccgtggccagcatcctggagggctgtgccttcctcaatgggtctccgcagaacaccctggtgcccggagctcttgagctcgcgtggcagcaccgggtttttgtgggcggagatgacttcaagtcaggccagaccaaagtcaagtccgtgcttgtggacttcctcattggctccggcctcaagaccatgtccatcgtgagttacaaccacctgggcaacaacgatggggagaacctatcggcgccattgcagttccgctctaaggaggtgtccaagagcaacgtggtggacgacatggtgcagagcaacccagtgctctatacgcccggcgaagagcctgaccactgcgtggtcatcaagtatgtgccgtacgtgggtgacagcaagcgcgcgctggatgagtatacctcggagctgatgctgggcggaaccaacacactggtgctgcacaacacgtgtgaggactcgctgctggccgcacccatcatgctggacctagcgctgctgaccgagctgtgccagcgcgtgagcttctgcactgacatggaccccgagccgcagaccttccaccccgtgctgtccctgctcagcttcctcttcaaggcgccactagtgccgcccggcagcccggtggtcaatgcgcttttccgccagcgcagctgcatcgagaacatcctcagggcctgcgtggggctcccgccacagaaccacatgctcctggaacacaaaatggagcgcccagggcccagcctcaagcgagttggacccgtggctgccacctaccctatgttgaacaagaaaggaccggtacccgctgccaccaatggctgcaccggtgatgccaatgggcatctgcaagaggagcccccaatgcccaccacctgaggccccggtcacacagtttctcggctcttcctccccgctgccccccacgaccctaccttgaaggcccccacaaataaaggcgctgccactcagccctccttccacctgg

SEQ ID NO: 361391 - DNA, 1339 bp, Homo sapiens
gactttgtcccccgagatggatgggggcggacatggggagccaggggatgggactgcctggtaggtgctgctgcccacgaagggggagtaggtggcagtgtggctccgaggagattctggctttggagttctggtcctctgcctgtttcccctgcagtgtctctgacccagaccccctacctacccccccggaggcccagcttccctgcccagctccaccccctggcttgtggctgggctcatgtgtagcctcattgtcctcttgtaaaggggggataggcagccatgagcccctgggggctgcggagcgagcgaggtgaacctatacgcgccgcgctcgtggacgcctggccacttccgccaggcggggacccgatggccacggtggctctgggttgtcgggcctcgaaccgggtctccagacgttgggcccctccctcccagcgcgggagaggcggggaagggggcggggcgggggaggggccgcagcgcttttctccggaggtcgcgcgcccgagagcccgcgctgtccgccgccgctgcctgagtcgactctgcgccgcccgccgcgatggaggccgccgcccagttcttcgtcgagagcccggacgtggtctacggccccgaggccatcgaggcgcaatacgagtaccggacgacgcgcgtcagccgcgagggtggcgttctcaaggtgcaccccacgtccacgcgcttcaccttccggaccgcccggcaggtgccccggctcggggtcatgcttgtcggctggggcgggaacaacggctccacactcaccgccgcggtgctggccaatcgactgcgtttgtcctggcccacgcgcagcggccgcaaggaggccaactactacggctcgctgactcaggcgggcaccgtgagcctgggcctggacgccgagggccaggaggtgttcgtacccttcagcgcggtgctgcccatggtggcgcccaacgacctcgtgttcgatggggcggagccctgggccggggtggggcgggatgggagatggggtctggaggggcccaggatccgggcagggccgagtgtgagggtccccccaggctgggacatctcgtcgctgaacctggccgaggcgatgcggcgcgcgaaggtgctggactgggggctgcaggagcaactgtggccgcacatggaggccctgcggccccggccttctgtttacatccccgaattcatcgcggccaaccagagcgcgcgcgcggacaacctcatcccaggctcgcgtgcgcagcaggtgctgtcccatcccgcatcccttgcttcctgccacctgttcttcgccacttggttccctcttttt

SEQ ID NO: 361392 - DNA, 714 bp, Homo sapiens
gactttgtcccccgagatggatgggggcggacatggggagccaggggatgggactgcctggtaggtgctgctgcccacgaagggggagtaggtggcagtgtggctccgaggagattctggctttggagttctggtcctctgcctgtttcccctgcagtgtctctgacccagaccccctacctacccccccggaggcccagcttccctgcccagctccaccccctggcttgtggctgggctcatgtgtagcctcattgtcctcttgtaaaggggggataggcagccatgagcccctgggggctgcggagcgagcgaggtgaacctatacgcgccgcgctcgtggacgcctggccacttccgccaggcggggacccgatggccacggtggctctgggttgtcgggcctcgaaccgggtctccagacgttgggcccctccctcccagcgcgggagaggcggggaagggggcggggcgggggaggggccgcagcgcttttctccggaggtcgcgcgcccgagagcccgcgctgtccgccgccgctgcctgagtcgactctgcgccggtgagtgcggttcggggcagggacggcctccgtggggacccaggctggcttggccccggccgcttagagtccccgctgaccccccccccacgaccctaccttgaaggcccccacaaataaaggcgctgccactcagccctccttccacctgg

SEQ ID NO: 361393 - DNA, 1859 bp, Homo sapiens
aacggctagtagagctgggtgttaatcggccgaggccgccgctgcctgagtcgactctgcgccgcccgccgcgatggaggccgccgcccagttcttcgtcgagagcccggacgtggtctacggccccgaggccatcgaggcgcaatacgagtaccggacgacgcgcgtcagccgcgagggtggcgttctcaaggtgcaccccacgtccacgcgcttcaccttccggaccgcccggcaggtgccccggctcggggtcatgcttgtcggctggggcgggaacaacggctccacactcaccgccgcggtgctggccaatcgactgcgtttgtcctggcccacgcgcagcggccgcaaggaggccaactactacggctcgctgactcaggcgggcaccgtgagcctgggcctggacgccgagggccaggaggtgttcgtacccttcagcgcggtgctgcccatggtggcgcccaacgacctcgtgttcgatggctgggacatctcgtcgctgaacctggccgaggcgatgcggcgcgcgaaggtgctggactgggggctgcaggagcaactgtggccgcacatggaggccctgcggccccggccttctgtttacatccccgaattcatcgcggccaaccagagcgcgcgcgcggacaacctcatcccaggctcgcgtgcgcagcagctggagcagatccgcagggacatccgagacttccggtctagcgcggggctggacaaagtcatagtgctgtggacggcgaacacggagcgcttctgtgaggtgattccaggcctcaacgacacagccgagaacctgctgcgcaccattgagctcggtctggaggtgtcgccctccacgctcttcgccgtggccagcatcctggagggctgtgccttcctcaatgggtctccgcagaacaccctggtgcccggagctcttgagctcgcgtggcagcaccgggtttttgtgggcggagatgacttcaagtcaggccagaccaaagtcaagtccgtgcttgtggacttcctcattggctccggcctcaagaccatgtccatcgtgagttacaaccacctgggcaacaacgatggggagaacctatcggcgccattgcagttccgctctaaggaggtgtccaagagcaacgtggtggacgacatggtgcagagcaacccagtgctctatacgcccggcgaagagcctgaccactgcgtggtcatcaagtatgtgccgtacgtgggtgacagcaagcgcgcgctggatgagtatacctcggagctgatgctgggcggaaccaacacactggtgctgcacaacacgtgtgaggactcgctgctggccgcacccatcatgctggacctagcgctgctgaccgagctgtgccagcgcgtgagcttctgcactgacatggaccccgagccgcagaccttccaccccgtgctgtccctgctcagcttcctcttcaaggcgccactagtgccgcccggcagcccggtggtcaatgcgcttttccgccagcgcagctgcatcgagaacatcctcagggcctgcgtggggctcccgccacagaaccacatgctcctggaacacaaaatggagcgcccagggcccagcctcaagcgagttggacccgtggctgccacctaccctatgttgaacaagaaaggaccggtacccgctgccaccaatggctgcaccggtgatgccaatgggcatctgcaagaggagcccccaatgcccaccacctgaggccccggtcacacagtttctcggctcttcctccccgctgccccccacgaccctaccttgaaggcccccacaaataaaggcgctgccactcagccctccttccacctgg

SEQ ID NO: 361394 - DNA, 2357 bp, Homo sapiens
gactttgtcccccgagatggatgggggcggacatggggagccaggggatgggactgcctggtaggtgctgctgcccacgaagggggagtaggtggcagtgtggctccgaggagattctggctttggagttctggtcctctgcctgtttcccctgcagtgtctctgacccagaccccctacctacccccccggaggcccagcttccctgcccagctccaccccctggcttgtggctgggctcatgtgtagcctcattgtcctcttgtaaaggggggataggcagccatgagcccctgggggctgcggagcgagcgaggtgaacctatacgcgccgcgctcgtggacgcctggccacttccgccaggcggggacccgatggccacggtggctctgggttgtcgggcctcgaaccgggtctccagacgttgggcccctccctcccagcgcgggagaggcggggaagggggcggggcgggggaggggccgcagcgcttttctccggaggtcgcgcgcccgagagcccgcgctgtccgccgccgctgcctgagtcgactctgcgccgcccgccgcgatggaggccgccgcccagttcttcgtcgagagcccggacgtggtctacggccccgaggccatcgaggcgcaatacgagtaccggacgacgcgcgtcagccgcgagggtggcgttctcaaggtgcaccccacgtccacgcgcttcaccttccggaccgcccggcaggtgccccggctcggggtcatgcttgtcggctggggcgggaacaacggctccacactcaccgccgcggtgctggccaatcgactgcgtttgtcctggcccacgcgcagcggccgcaaggaggccaactactacggctcgctgactcaggcgggcaccgtgagcctgggcctggacgccgagggccaggaggtgttcgtacccttcagcgcggtgctgcccatggtggcgcccaacgacctcgtgttcgatggctgggacatctcgtcgctgaacctggccgaggcgatgcggcgcgcgaaggtgctggactgggggctgcaggagcaactgtggccgcacatggaggccctgcggccccggccttctgtttacatccccgaattcatcgcggccaaccagagcgcgcgcgcggacaacctcatcccaggctcgcgtgcgcagcagctggagcagatccgcagggacatccgagacttccggtctagcgcggggctggacaaagtcatagtgctgtggacggcgaacacggagcgcttctgtgaggtgattccaggcctcaacgacacagccgagaacctgctgcgcaccattgagctcggtctggaggtgtcgccctccacgctcttcgccgtggccagcatcctggagggctgtgccttcctcaatgggtctccgcagaacaccctggtgcccggagctcttgagctcgcgtggcagcaccgggtttttgtgggcggagatgacttcaagtcaggccagaccaaagtcaagtccgtgcttgtggacttcctcattggctccggcctcaagaccatgtccatcgtgagttacaaccacctgggcaacaacgatggggagaacctatcggcgccattgcagttccgctctaaggaggtgtccaagagcaacgtggtggacgacatggtgcagagcaacccagtgctctatacgcccggcgaagagcctgaccactgcgtggtcatcaagtatgtgccgtacgtgggtgacagcaagcgcgcgctggatgagtatacctcggagctgatgctgggcggaaccaacacactggtgctgcacaacacgtgtgaggactcgctgctggccgcacccatcatgctggacctagcgctgctgaccgagctgtgccagcgcgtgagcttctgcactgacatggaccccgagccgcagaccttccaccccgtgctgtccctgctcagcttcctcttcaaggcgccactagtgccgcccggcagcccggtggtcaatgcgcttttccgccagcgcagctgcatcgagaacatcctcagggcctgcgtggggctcccgccacagaaccacatgctcctggaacacaaaatggagcgcccagggcccagcctcaagcgagttggacccgtggctgccacctaccctatgttgaacaagaaaggaccggtacccgctgccaccaatggctgcaccggtgatgccaatgggcatctgcaagaggagcccccaatgcccaccacctgaggccccggtcacacagtttctcggctcttcctccccgctgccccccacgaccctaccttgaaggcccccacaaataaaggcgctgccactcagccctccttccacctgg

SEQ ID NO: 361395 - DNA, 2461 bp, Homo sapiens
gactttgtcccccgagatggatgggggcggacatggggagccaggggatgggactgcctggtaggtgctgctgcccacgaagggggagtaggtggcagtgtggctccgaggagattctggctttggagttctggtcctctgcctgtttcccctgcagtgtctctgacccagaccccctacctacccccccggaggcccagcttccctgcccagctccaccccctggcttgtggctgggctcatgtgtagcctcattgtcctcttgtaaaggggggataggcagccatgagcccctgggggctgcggagcgagcgaggtgaacctatacgcgccgcgctcgtggacgcctggccacttccgccaggcggggacccgatggccacggtggctctgggttgtcgggcctcgaaccgggtctccagacgttgggcccctccctcccagcgcgggagaggcggggaagggggcggggcgggggaggggccgcagcgcttttctccggaggtcgcgcgcccgagagcccgcgctgtccgccgccgctgcctgagtcgactctgcgccggtgagtgcggttcggggcagggacggcctccgtggggacccaggctggcttggccccggccgcttagagtccccgctgaccccctgctcaccccgggcccccagcccgccgcgatggaggccgccgcccagttcttcgtcgagagcccggacgtggtctacggccccgaggccatcgaggcgcaatacgagtaccggacgacgcgcgtcagccgcgagggtggcgttctcaaggtgcaccccacgtccacgcgcttcaccttccggaccgcccggcaggtgccccggctcggggtcatgcttgtcggctggggcgggaacaacggctccacactcaccgccgcggtgctggccaatcgactgcgtttgtcctggcccacgcgcagcggccgcaaggaggccaactactacggctcgctgactcaggcgggcaccgtgagcctgggcctggacgccgagggccaggaggtgttcgtacccttcagcgcggtgctgcccatggtggcgcccaacgacctcgtgttcgatggctgggacatctcgtcgctgaacctggccgaggcgatgcggcgcgcgaaggtgctggactgggggctgcaggagcaactgtggccgcacatggaggccctgcggccccggccttctgtttacatccccgaattcatcgcggccaaccagagcgcgcgcgcggacaacctcatcccaggctcgcgtgcgcagcagctggagcagatccgcagggacatccgagacttccggtctagcgcggggctggacaaagtcatagtgctgtggacggcgaacacggagcgcttctgtgaggtgattccaggcctcaacgacacagccgagaacctgctgcgcaccattgagctcggtctggaggtgtcgccctccacgctcttcgccgtggccagcatcctggagggctgtgccttcctcaatgggtctccgcagaacaccctggtgcccggagctcttgagctcgcgtggcagcaccgggtttttgtgggcggagatgacttcaagtcaggccagaccaaagtcaagtccgtgcttgtggacttcctcattggctccggcctcaagaccatgtccatcgtgagttacaaccacctgggcaacaacgatggggagaacctatcggcgccattgcagttccgctctaaggaggtgtccaagagcaacgtggtggacgacatggtgcagagcaacccagtgctctatacgcccggcgaagagcctgaccactgcgtggtcatcaagtatgtgccgtacgtgggtgacagcaagcgcgcgctggatgagtatacctcggagctgatgctgggcggaaccaacacactggtgctgcacaacacgtgtgaggactcgctgctggccgcacccatcatgctggacctagcgctgctgaccgagctgtgccagcgcgtgagcttctgcactgacatggaccccgagccgcagaccttccaccccgtgctgtccctgctcagcttcctcttcaaggcgccactagtgccgcccggcagcccggtggtcaatgcgcttttccgccagcgcagctgcatcgagaacatcctcagggcctgcgtggggctcccgccacagaaccacatgctcctggaacacaaaatggagcgcccagggcccagcctcaagcgagttggacccgtggctgccacctaccctatgttgaacaagaaaggaccggtacccgctgccaccaatggctgcaccggtgatgccaatgggcatctgcaagaggagcccccaatgcccaccacctgaggccccggtcacacagtttctcggctcttcctccccgctgccccccacgaccctaccttgaaggcccccacaaataaaggcgctgccactcagccctccttccacctgg

SEQ ID NO: 361396 - DNA, 2186 bp, Homo sapiens
aacggctagtagagctgggtgttaatcggccgaggccgccgctgcctgagtcgactctgcgccgcccgccgcgatggaggccgccgcccagttcttcgtcgagagcccggacgtggtctacggccccgaggccatcgaggcgcaatacgagtaccggacgacgcgcgtcagccgcgagggtggcgttctcaaggtgcaccccacgtccacgcgcttcaccttccggaccgcccggcaggtgccccggctcggggtcatgcttgtcggctggggcgggaacaacggctccacactcaccgccgcggtgctggccaatcgactgcgtttgtcctggcccacgcgcagcggccgcaaggaggccaactactacggctcgctgactcaggcgggcaccgtgagcctgggcctggacgccgagggccaggaggtgttcgtacccttcagcgcggtgctgcccatggtggcgcccaacgacctcgtgttcgatggctgggacatctcgtcgctgaacctggccgaggcgatgcggcgcgcgaaggtgctggactgggggctgcaggagcaactgtggccgcacatggaggccctgcggccccggccttctgtttacatccccgaattcatcgcggccaaccagagcgcgcgcgcggacaacctcatcccaggctcgcgtgcgcagcagctggagcagatccgcagggacatccgagacttccggtctagcgcggggctggacaaagtcatagtgctgtggacggcgaacacggagcgcttctgtgaggtgattccaggcctcaacgacacagccgagaacctgctgcgcaccattgagctcggtctggaggtgtcgccctccacgctcttcgccgtggccagcatcctggagggctgtgccttcctcaatgggtctccgcagaacaccctggtgcccggagctcttgagctcgcgtggcagcaccgggtttttgtgggcggagatgacttcaagtcaggccagaccaaagtcaagtccgtgcttgtggacttcctcattggctccggcctcaagaccatgtccatcgtgagttacaaccacctgggcaacaacgatggggagaacctatcggcgccattgcagttccgctctaaggaggtgtccaagagcaacgtggtggacgacatggtgcagagcaacccagtgctctatacgcccggcgaagagcctgaccactgcgtggtcatcaagtatgtgccgtacgtgggtgacagcaagcgcgcgctggatgagtatacctcggagctgatgctgggcggaaccaacacactggtgctgcacaacacgtgtgaggactcgctgctggccgcacccatcatgctggacctagcgctgctgaccgagctgtgccagcgcgtgagcttctgcactgacatggaccccgagccgcagaccttccaccccgtgctgtccctgctcagcttcctcttcaaggcgccactagtgccgcccggcagcccggtggtcaatgcgcttttccgccagcgcagctgcatcgagaacatcctcagggcctgcgtggggctcccgccacagaaccacatgctcctggaacacaaaatggagcgcccagggcccagcctcaagcgagttggacccgtggctgccacctaccctatgttgaacaagaaaggaccggtacccgctgccaccaatggctgcaccggtgatgccaatgggcatctgcaagaggagcccccaatgcccaccacctgaggccccggtcacacagtttctcggctcttcctccccgctgccccccacgaccctaccttgaaggcccccacaaataaaggcgctgccactcagccctccttccacctggggttcttggggcctgtgacctgactctgcctccctctacttccccgactcttgagcgcccagcttcagtcccatcccctctgcccatggtcatcaccccaactcccagggagagcccagaacctggagcctcgctctgcccccagttctcaaaggtggggctagatgggggcggggacggaacaagaccacagggtggagagtgtggtggcagaaggccaaagagggaatctgagacaagctaccaaaaaccaaaaccagcttccatttatttatgggccccaccccctgacgtcctggggagaggggccccccaaagagcctttct

SEQ ID NO: 361397 - DNA, 2301 bp, Homo sapiens
gactttgtcccccgagatggatgggggcggacatggggagccaggggatgggactgcctggtaggtgctgctgcccacgaagggggagtaggtggcagtgtggctccgaggagattctggctttggagttctggtcctctgcctgtttcccctgcagtgtctctgacccagaccccctacctacccccccggaggcccagcttccctgcccagctccaccccctggcttgtggctgggctcatgtgtagcctcattgtcctcttgtaaaggggggataggcagccatgagcccctgggggctgcggagcgagcgaggtgaacctatacgcgccgcgctcgtggacgcctggccacttccgccaggcggggacccgatggccacggtggctctgggttgtcgggcctcgaaccgggtctccagacgttgggcccctccctcccagcgcgggagaggcggggaagggggcggggcgggggaggggccgcagcgcttttctccggaggtcgcgcgcccgagagcccgcgctgtccgccgccgctgcctgagtcgactctgcgccgcccgccgcgatggaggccgccgcccagttcttcgtcgagagcccggacgtggtctacggccccgaggccatcgaggcgcaatacgagtaccggacgacgcgcgtcagccgcgagggtggcgttctcaaggtgcaccccacgtccacgcgcttcaccttccggaccgcccggcaggtgccccggctcggggtcatgcttgtcggctggggcgggaacaacggctccacactcaccgccgcggtgctggccaatcgactgcgtttgtcctggcccacgcgcagcggccgcaaggaggccaactactacggctcgctgactcaggcgggcaccgtgagcctgggcctggacgccgagggccaggaggtgttcgtacccttcagcgcggtgctgcccatggtggcgcccaacgacctcgtgttcgatggctgggacatctcgtcgctgaacctggccgaggcgatgcggcgcgcgaaggtgctggactgggggctgcaggagcaactgtggccgcacatggaggccctgcggccccggccttctgtttacatccccgaattcatcgctggagcagatccgcagggacatccgagacttccggtctagcgcggggctggacaaagtcatagtgctgtggacggcgaacacggagcgcttctgtgaggtgattccaggcctcaacgacacagccgagaacctgctgcgcaccattgagctcggtctggaggtgtcgccctccacgctcttcgccgtggccagcatcctggagggctgtgccttcctcaatgggtctccgcagaacaccctggtgcccggagctcttgagctcgcgtggcagcaccgggtttttgtgggcggagatgacttcaagtcaggccagaccaaagtcaagtccgtgcttgtggacttcctcattggctccggcctcaagaccatgtccatcgtgagttacaaccacctgggcaacaacgatggggagaacctatcggcgccattgcagttccgctctaaggaggtgtccaagagcaacgtggtggacgacatggtgcagagcaacccagtgctctatacgcccggcgaagagcctgaccactgcgtggtcatcaagtatgtgccgtacgtgggtgacagcaagcgcgcgctggatgagtatacctcggagctgatgctgggcggaaccaacacactggtgctgcacaacacgtgtgaggactcgctgctggccgcacccatcatgctggacctagcgctgctgaccgagctgtgccagcgcgtgagcttctgcactgacatggaccccgagccgcagaccttccaccccgtgctgtccctgctcagcttcctcttcaaggcgccactagtgccgcccggcagcccggtggtcaatgcgcttttccgccagcgcagctgcatcgagaacatcctcagggcctgcgtggggctcccgccacagaaccacatgctcctggaacacaaaatggagcgcccagggcccagcctcaagcgagttggacccgtggctgccacctaccctatgttgaacaagaaaggaccggtacccgctgccaccaatggctgcaccggtgatgccaatgggcatctgcaagaggagcccccaatgcccaccacctgaggccccggtcacacagtttctcggctcttcctccccgctgccccccacgaccctaccttgaaggcccccacaaataaaggcgctgccactcagccctccttccacctgg

SEQ ID NO: 361398 - DNA, 1973 bp, Homo sapiens
aacggctagtagagctgggtgttaatcggccgaggccgccgctgcctgagtcgactctgcgccgcccgccgcgatggaggccgccgcccagttcttcgtcgagagcccggacgtggtctacggccccgaggccatcgaggcgcaatacgagtaccggacgacgcgcgtcagccgcgagggtggcgttctcaaggtgcaccccacgtccacgcgcttcaccttccggaccgcccggcaggtgccccggctcggggtcatgcttgtcggctggggcgggaacaacggctccacactcaccgccgcggtgctggccaatcgactgcgtttgtcctggcccacgcgcagcggccgcaaggaggccaactactacggctcgctgactcaggcgggcaccgtgagcctgggcctggacgccgagggccaggaggtgttcgtacccttcagcgcggtgctgcccatggtggcgcccaacgacctcgtgttcgatggctgggacatctcgtcgctgaacctggccgaggcgatgcggcgcgcgaaggtgctggactgggggctgcaggagcaactgtggccgcacatggaggccctgcggccccggccttctgtttacatccccgaattcatcgcggccaaccagagcgcgcgcgcggacaacctcatcccaggctcgcgtgcgcagcagctggagcagatccgcagggacatccgagacttccggtctagcgcggggctggacaaagtcatagtgctgtggacggcgaacacggagcgcttctgtgaggtgattccaggcctcaacgacacagccgagaacctgctgcgcaccattgagctcggtctggaggtgtcgccctccacgctcttcgccgtggccagcatcctggagggctgtgccttcctcaatgggtctccgcagaacaccctggtgcccggagctcttgagctcgcgtggcagcaccgggtttttgtgggcggagatgacttcaagtcaggccagaccaaagtcaagtccgtgcttgtggacttcctcattggctccggcctcaagaccatgtccatcgtgagttacaaccacctgggcaacaacgatggggagaacctatcggcgccattgcagttccgctctaaggaggtgtccaagagcaacgtggtggacgacatggtgcagagcaacccagtgctctatacgcccggcgaagagcctgaccactgcgtggtcatcaagtatgtgccgtacgtgggtgacagcaagcgcgcgctggatgagtatacctcggagctgatgctgggcggaaccaacacactggtgctgcacaacacgtgtgaggactcgctgctggccgcacccatcatgctggacctagcgctgctgaccgagctgtgccagcgcgtgagcttctgcactgacatggaccccgagccgcagaccttccaccccgtgctgtccctgctcagcttcctcttcaaggcgccactagtgccgcccggcagcccggtggtcaatgcgcttttccgccagcgcagctgcatcgagaacatcctcagggcctgcgtggggctcccgccacagaaccacatgctcctggaacacaaaatggagcgcccagggcccagcctcaagcgagttggacccgtggctgccacctaccctatgttgaacaagaaaggaccggtacccgctgccaccaatggctgcaccggtgatgccaatgggcatctgcaagaggagcccccaatgcccaccacctgaggccccggtcacacagtttctcggctcttcctccccgctgtcccggtggcgtccccactcccggccaccctccccactctgtctcctggatgctgggattccaggcgggagccgcggtgcctggtcctgttgagcatttaaagctgtcgttccaccgtcttcttggtcttctcgtcttcgttgacctctggctttcagtagggtgactctggtgtgccttgcc

SEQ ID NO: 361399 - DNA, 1494 bp, Homo sapiens
tttataagagagatcccctatccgtcgtatgggcggagccctgggccggggtggggcgggatgggagatggggtctggaggggcccaggatccgggcagggccgagtgtgagggtccccccaggctgggacatctcgtcgctgaacctggccgaggcgatgcggcgcgcgaaggtgctggactgggggctgcaggagcaactgtggccgcacatggaggccctgcggccccggccttctgtttacatccccgaattcatcgcggccaaccagagcgcgcgcgcggacaacctcatcccaggctcgcgtgcgcagcagctggagcagatccgcagggacatccgagacttccggtctagcgcggggctggacaaagtcatagtgctgtggacggcgaacacggagcgcttctgtgaggtgattccaggcctcaacgacacagccgagaacctgctgcgcaccattgagctcggtctggaggtgtcgccctccacgctcttcgccgtggccagcatcctggagggctgtgccttcctcaatgggtctccgcagaacaccctggtgcccggagctcttgagctcgcgtggcagcaccgggtttttgtgggcggagatgacttcaagtcaggccagaccaaagtcaagtccgtgcttgtggacttcctcattggctccggcctcaagaccatgtccatcgtgagttacaaccacctgggcaacaacgatggggagaacctatcggcgccattgcagttccgctctaaggaggtgtccaagagcaacgtggtggacgacatggtgcagagcaacccagtgctctatacgcccggcgaagagcctgaccactgcgtggtcatcaagtatgtgccgtacgtgggtgacagcaagcgcgcgctggatgagtatacctcggagctgatgctgggcggaaccaacacactggtgctgcacaacacgtgtgaggactcgctgctggccgcacccatcatgctggacctagcgctgctgaccgagctgtgccagcgcgtgagcttctgcactgacatggaccccgagccgcagaccttccaccccgtgctgtccctgctcagcttcctcttcaaggcgccactagtgccgcccggcagcccggtggtcaatgcgcttttccgccagcgcagctgcatcgagaacatcctcagggcctgcgtggggctcccgccacagaaccacatgctcctggaacacaaaatggagcgcccagggcccagcctcaagcgagttggacccgtggctgccacctaccctatgttgaacaagaaaggaccggtacccgctgccaccaatggctgcaccggtgatgccaatgggcatctgcaagaggagcccccaatgcccaccacctgaggccccggtcacacagtttctcggctcttcctccccgctgccccccacgaccctaccttgaaggcccccacaaataaaggcgctgccactcagccctccttccacctgg

SEQ ID NO: 361400 - DNA, 1261 bp, Homo sapiens
gactttgtcccccgagatggatgggggcggacatggggagccaggggatgggactgcctggtaggtgctgctgcccacgaagggggagtaggtggcagtgtggctccgaggagattctggctttggagttctggtcctctgcctgtttcccctgcagtgtctctgacccagaccccctacctacccccccggaggcccagcttccctgcccagctccaccccctggcttgtggctgggctcatgtgtagcctcattgtcctcttgtaaaggggggataggcagccatgagcccctgggggctgcggagcgagcgaggtgaacctatacgcgccgcgctcgtggacgcctggccacttccgccaggcggggacccgatggccacggtggctctgggttgtcgggcctcgaaccgggtctccagacgttgggcccctccctcccagcgcgggagaggcggggaagggggcggggcgggggaggggccgcagcgcttttctccggaggtcgcgcgcccgagagcccgcgctgtccgccgccgctgcctgagtcgactctgcgccgcccgccgcgatggaggccgccgcccagttcttcgtcgagagcccggacgtggtctacggccccgaggccatcgaggcgcaatacgagtaccggacgacgcgcgtcagccgcgagggtggcgttctcaaggtgcaccccacgtccacgcgcttcaccttccggaccgcccggcaggtgccccggctcggggtcatgcttgtcggctggggcgggaacaacggctccacactcaccgccgcggtgctggccaatcgactgcgtttgtcctggcccacgcgcagcggccgcaaggaggccaactactacggctcgctgactcaggcgggcaccgtgagcctgggcctggacgccgagggccaggaggtgttcgtacccttcagcgcggtgctgcccatggtggcgcccaacgacctcgtgttcgatgacattctcgatcgcttgaaaccttggccgaggcgaatgcgggcggcgcgaaaggtgccttgggacctgggggggcttgccaggaaggcaaacttggtgagcccggcacccattgggacggccccttgcgggccccgggcccttactggttataccattcgccccgaaatttccatccgcgggccagaggcagaaggcgccgcgccgcggaacaaaccttcaatcccagtgcctcggcgttgccgcaggcagcgtgggaaggcaggaattccggag

SEQ ID NO: 361401 - DNA, 716 bp, Homo sapiens
agcgcagctgcatcgagaacatcctcaggtgcaccccagcctccaggttcccgcccggggcccagatacccccctggctaagctatgcacagggcttggggggctgtaggtggcagggataccccccctttctccctgtgggtgtctggctctgctaagctgtgtgacctctccagggcctgcgtggggctcccgccacagaaccacatgctcctggaacacaaaatggagcgcccagggcccagcctcaagcgagttggacccgtggctgccacctaccctatgttgaacaagaaaggaccggtacccgctgccaccaatggctgcaccggtgatgccaatgggcatctgcaagaggagcccccaatgcccaccacctgaggccccggtcacacagtttctcggctcttcctccccgctgccccccacgaccctaccttgaaggcccccacaaataaaggcgctgccactcagccctccttccacctggggttcttggggcctgtgacctgactctgcctccctctacttccccgactcttgagcgcccagcttcagtcccatcccctctgcccatggtcatcaccccaactcccagggagagcccagaacctggagcctcgctctgcccccagttctcaaaggtggggctagatgggggcggggacggaacaagaccacagggtggagagtgtggtggcagaaggccaaagagg

SEQ ID NO: 361402 - DNA, 527 bp, Homo sapiens
tgaggtcgtctagaggatcccggaagcacctgcaacattgaactcccaagagcaaatccacattcctcttgagttctgcagcttctgtgtaaatagggcagctgtcgtctatgccgtagaatcacatgatctgaggaccattcatggaagctgctaaatagcctagtctggggagtcttccataaagttttgcatggagcaaacaaacaggattaaactaggtttggttccttcagccctctaaaagcatagggcttagcctgcaggcttccttgggctttctctgtgtgtgtagttttgtaaacactatagcatctgttaagatccagtgtccatggaaacattcccacatgccgtgactctggactatatcagtttttggaaagcagggttcctctgcctgctaacaagcccacgtggaccagtctgaatgtctttcctttacacctatgtttttaagtagtcaaacttcaagaaacaatctaaacaagtttctgttgcagtgtgcttccggggtaccgagctcg

SEQ ID NO: 361403 - DNA, 417 bp, Homo sapiens
ttttttttttcagtattttccttcactttaatttttattgcttctccagttcaaataattcaggcttccttgggctttctctgtgtgtgtagttttgtaaacactatagcatctgttaagatccagtgtccatggaaacattcccacatgccgtgactctggactatatcagtttttggaaagcagggttcctctgcctgctaacaagcccacgtggaccagtctgaatgtctttcctttacacctatgtttttaagtagtcaaacttcaagaaacaatctaaacaagtttctgttgcatatgtgtttgtgaacttgtatttgtatttagtaggcttctatattgcatttaacttgtttttgtaactcctgattcttccttttcggatactattgatgaataaagaaattaaagtga

SEQ ID NO: 361404 - DNA, 386 bp, Homo sapiens
  misc_feature (88)..(88): n is a, c, g, or t
cttgggctttctctgtgtgtgtagttttgtaaacactaaggcgcccaaaatttttcccttgggggtttttaaaaaaaaaggaaatttnccccacgtgtccatggaaacattcccacatgccgtgactctggactatatcagtttttggaaagcagggttcctctgcctgctaacaagcccacgtggaccagtctgaatgtctttcctttacacctatgtttttaagtagtcaaacttcaagaaacaatctaaacaagtttctgttgcatatgtgtttgtgaacttgtatttgtatttagtaggcttctatattgcatttaacttgtttttgtaactcctgattcttccttttcggatactattgatgaataaagaaattaaagtga

SEQ ID NO: 361405 - DNA, 933 bp, Homo sapiens
cctctccgctgggagaggccagttaaagtctagacactgtctgcttggctctgtgcctttttagcacaatctgcatggttctgtagctcttactttggttgtctgtcctcactcgtttccccagttttcttagttaggcttaaactgtcccgggggactggcaacgagtcgcacacataggaaacaggtgagtgaatttatgagactgtcaggattcagctgccttgaaaggttcagagtgaagatagcagcagtgctgactgaaactgtggctgagtttacagacatccctggtgtgagctggcttcaaacgaacctccatttactggccagagatgggctgggatgaataactcaggacagacagtggcaccccaggtaatgagcagccacctgactcctcatctgccaaatatgggggttagagtaggtgggctctaaaatgcagctttgaagtcctattcatataaaaggaggcggatattctaggctagactgtcaaaatattctacttaatggaattgggatatttgattaactcttatggtgatttacagcctagtgaagaacagtttgaaagataggctggctcaagaatgagaaaacagagtgaataaaaacaggaggcatcttgtgtcctttactttctctcgccatgtagtgagtggaatataaacagtacggcatgtggcacctgaacagtcttcatgcccaggaatcccaaatgctgtttactctacagaaaggaatcacttgattttccacttcagaagccaaccgctcaacaacactggggaagaaatgaagaatcctgggtctccttgtagtcgatcaagaaattttggggggaaaaagggaagacaacccctaattcagagtgtgcagtttgggatttattgaacttacttgaaaaacaaaagcaaacaaaactta

SEQ ID NO: 361406 - DNA, 3745 bp, Homo sapiens
aaaataaaaaacaaaaaaaaacaacagagtattatacgtcgtgctgggtttattagtacgagggatcggcggagctcccacctccgcttacagctcgctgccgccgtcctgccccgcgcccccaggagacctggaccagaccacgatgtggaaacgctggctcgcgctcgcgctcgcgctggtggcggtcgcctgggtccgcgccgaggaagagctaaggagcaaatccaagatctgtgccaatgtgttttgtggagccggccgggaatgtgcagtcacagagaaaggggaacccacctgtctctgcattgagcaatgcaaacctcacaagaggcctgtgtgtggcagtaatggcaagacctacctcaaccactgtgaactgcatcgagatgcctgcctcactggatccaaaatccaggttgattacgatggacactgcaaagagaagaaatccgtaagtccatctgccagcccagttgtttgctatcagtccaaccgtgatgagctccgacgtcgcatcatccagtggctggaagctgagatcattccagatggctggttctctaaaggcagcaactacagtgaaatcctagacaagtattttaagaactttgataatggtgattctcgcctggactccagtgaattcctgaagtttgtggaacagaatgaaactgccatcaatattacaacgtatccagaccaggagaacaacaagttgcttaggggactctgtgttgatgctctcattgaactgtctgatgaaaatgctgattggaaactcagcttccaagagtttctcaagtgcctcaacccatctttcaaccctcctgagaagaagtgtgccctggaggatgaaacgtatgcagatggagctgagaccgaggtggactgtaaccgctgtgtctgtgcctgtggaaattgggtctgtacagccatgacctgtgacggaaagaatcagaagggggcccagacccagacagaggaggagatgaccagatatgtccaggagctccaaaagcatcaggaaacagctgaaaagaccaagagagtgagcaccaaagagatctaatgaggaggcacagaccagtgtctggatcccagcatcttctccacttcagcgctgagttcagtatacacaagtgtctgctacagtcgccaaatcaccagtatttgcttatatagcaatgagttttattttgtttatttgttttgcaataaaggatatgaaggtggctggctaggaagggaagggccacagccttcatttctaggagtgctttaagagaaactgtaaatggtgctctggggctggaggctagtaaggaaactgcatcacgattgaaagaggaacagacccaaatctgaacctcttttgagtttactgcatctgtcagcaggctgcagggagtgcacacgatgccagagagaacttagcagggtgtccccggaggagaggtttgggaagctccacggagaggaacgctctctgcttccagcctctttccattgccgtcagcatgacagacctccagcatccacgcatctcttggtcccaataactgcctctagatacatagccatactgctagttaacccagtgtccctcagacttggatggagtttctgggagggtacacccaaatgatgcagatacttgtatactttgagccccttagcgacctaaccaaattttaaaaatactttttaccaaaggtgctatttctctgtaaaacacttttttttggcaagttgactttattcttcaattattatcattatattattgttttttaatattttattttcttgactaggtattaagcttttgtaattatttttcagtagtcccaccacttcataggtggaaggagtttggggttcttcctggtgcaggggctgaaataacccagatgcccccaccctgccacatactagatgcagcccatagttggcccccctagcttccagcagtccactatctgccagaggagcaagggtgccttagaccgaagccaggggaagaagcatcttcataaaaaactttcaagatccaaacattaatttgtttttatttattctgagaagttgaggcaaatcagtattcccaaggatggcgacaagggcagccaagcagggcttaggatatcccagcctaccaatatgctcattcgactaactaggagggtgagttggccctgtctcttcttttttctggacctcagtttcctcagtgagctggtaagaatgcactaaccttttgatttgataagttataaattctgtggttctgatcattggtccagaggggagataggttcctgtgatttttccttcttctctatagaataaatgaaatcttgttactagaacaagaaatgtcagatggccaaaaacaagatgaccagatttgatctcagcctgatgaccctacaggtcgtgctatgatatggagtcctcatgggtaaagcaggaagagagtgggaaagagaaccaccccactctgtcttcatatttgcatttcatgtttaacctccggctggaaatagaaagcattcccttagagatgaggataaaagaaagtttcagattcaacagggggaagaaaatggagatttaatcctaaaactgtgacttggggaggtcagtcatttacagttagtcctgtgtctttcgacttctgtgattattaaccccactcactaccctgtttcagatgcatttggaataccaaagattaaatccttgacataagatctcatttgcagaaagcagattaaagaccatcagaaggaaattatttaggttgtaatgcacaggcaactgtgagaaactgttgtgccaaaaatagaattccttctagtttttcttgttctcatttgaaaggagaaaattccactttgtttagcatttcaagcttttatgtatccatcccatctaaaaactcttcaaactccacttgttcagtctgaaatgcagctccctgtccaagtgccttggagaactcacagcagcacgccttaatcaaaggttttaccagcccttggacactatgggaggagggcaagagtacaccaatttgttaaaagcaagaaaccacagtgtctcttcactagtcatttagaacatggttatcatccaagactactctaccctgcaacattgaactcccaagagcaaatccacattcctcttgagttctgcagcttctgtgtaaatagggcagctgtcgtctatgccgtagaatcacatgatctgaggaccattcatggaagctgctaaatagcctagtctggggagtcttccataaagttttgcatggagcaaacaaacaggattaaactaggtttggttccttcagccctctaaaagcatagggcttagcctgcaggcttccttgggctttctctgtgtgtgtagttttgtaaacactatagcatctgttaagatccagtgtccatggaaacattcccacatgccgtgactctggactatatcagtttttggaaagcagggttcctctgcctgctaacaagcccacgtggaccagtctgaatgtctttcctttacacctatgtttttaagtagtcaaacttcaagaaacaatctaaacaagtttctgttgcatatgtgtttgtgaacttgtatttgtatttagtaggcttctatattgcatttaacttgtttttgtaactcctgattcttccttttcggatactattgatgaataaagaaattaaagtga

SEQ ID NO: 361407 - DNA, 3841 bp, Homo sapiens
  misc_feature (3787)..(3787): n is a, c, g, or t
  misc_feature (3791)..(3791): n is a, c, g, or t
  misc_feature (3793)..(3794): n is a, c, g, or t
ggaggagaatggggaggagctgggggggcaggcaggcggggaaggagaggtcttaaggggcggcgaggggaggtcgcatttcctccgaggctggcgatcggcggagctcccacctccgcttacagctcgctgccgccgtcctgccccgcgcccccaggagacctggaccagaccacgatgtggaaacgctggctcgcgctcgcgctcgcgctggtggcggtcgcctgggtccgcgccgaggaagagctaaggagcaaatccaagatctgtgccaatgtgttttgtggagccggccgggaatgtgcagtcacagagaaaggggaacccacctgtctctgcattgagcaatgcaaacctcacaagaggcctgtgtgtggcagtaatggcaagacctacctcaaccactgtgaactgcatcgagatgcctgcctcactggatccaaaatccaggttgattacgatggacactgcaaagagaagaaatccgtaagtccatctgccagcccagttgtttgctatcagtccaaccgtgatgagctccgacgtcgcatcatccagtggctggaagctgagatcattccagatggctggttctctaaaggcagcaactacagtgaaatcctagacaagtattttaagaactttgataatggtgattctcgcctggactccagtgaattcctgaagtttgtggaacagaatgaaactgccatcaatattacaacgtatccagaccaggagaacaacaagttgcttaggggactctgtgttgatgctctcattgaactgtctgatgaaaatgctgattggaaactcagcttccaagagtttctcaagtgcctcaacccatctttcaaccctcctgagaagaagtgtgccctggaggatgaaacgtatgcagatggagctgagaccgaggtggactgtaaccgctgtgtctgtgcctgtggaaattgggtctgtacagccatgacctgtgacggaaagaatcagaagggggcccagacccagacagaggaggagatgaccagatatgtccaggagctccaaaagcatcaggaaacagctgaaaagaccaagagagtgagcaccaaagagatctaatgaggaggcacagaccagtgtctggatcccagcatcttctccacttcagcgctgagttcagtatacacaagtgtctgctacagtcgccaaatcaccagtatttgcttatatagcaatgagttttattttgtttatttgttttgcaataaaggatatgaaggtggctggctaggaagggaagggccacagccttcatttctaggagtgctttaagagaaactgtaaatggtgctctggggctggaggctagtaaggaaactgcatcacgattgaaagaggaacagacccaaatctgaacctcttttgagtttactgcatctgtcagcaggctgcagggagtgcacacgatgccagagagaacttagcagggtgtccccggaggagaggtttgggaagctccacggagaggaacgctctctgcttccagcctctttccattgccgtcagcatgacagacctccagcatccacgcatctcttggtcccaataactgcctctagatacatagccatactgctagttaacccagtgtccctcagacttggatggagtttctgggagggtacacccaaatgatgcagatacttgtatactttgagccccttagcgacctaaccaaattttaaaaatactttttaccaaaggtgctatttctctgtaaaacacttttttttggcaagttgactttattcttcaattattatcattatattattgttttttaatattttattttcttgactaggtattaagcttttgtaattatttttcagtagtcccaccacttcataggtggaaggagtttggggttcttcctggtgcaggggctgaaataacccagatgcccccaccctgccacatactagatgcagcccatagttggcccccctagcttccagcagtccactatctgccagaggagcaagggtgccttagaccgaagccaggggaagaagcatcttcataaaaaactttcaagatccaaacattaatttgtttttatttattctgagaagttgaggcaaatcagtattcccaaggatggcgacaagggcagccaagcagggcttaggatatcccagcctaccaatatgctcattcgactaactaggagggtgagttggccctgtctcttcttttttctggacctcagtttcctcagtgagctggtaagaatgcactaaccttttgatttgataagttataaattctgtggttctgatcattggtccagaggggagataggttcctgtgatttttccttcttctctatagaataaatgaaatcttgttactagaacaagaaatgtcagatggccaaaaacaagatgaccagatttgatctcagcctgatgaccctacaggtcgtgctatgatatggagtcctcatgggtaaagcaggaagagagtgggaaagagaaccaccccactctgtcttcatatttgcatttcatgtttaacctccggctggaaatagaaagcattcccttagagatgaggataaaagaaagtttcagattcaacagggggaagaaaatggagatttaatcctaaaactgtgacttggggaggtcagtcatttacagttagtcctgtgtctttcgacttctgtgattattaaccccactcactaccctgtttcagatgcatttggaataccaaagattaaatccttgacataagatctcatttgcagaaagcagattaaagaccatcagaaggaaattatttaggttgtaatgcacaggcaactgtgagaaactgttgtgccaaaaatagaattccttctagtttttcttgttctcatttgaaaggagaaaattccactttgtttagcatttcaagcttttatgtatccatcccatctaaaaactcttcaaactccacttgttcagtctgaaatgcagctccctgtccaagtgccttggagaactcacagcagcacgccttaatcaaaggttttaccagcccttggacactatgggaggagggcaagagtacaccaatttgttaaaagcaagaaaccacagtgtctcttcactagtcatttagaacatggttatcatccaagactactctaccctgcaacattgaactcccaagagcaaatccacattcctcttgagttctgcagcttctgtgtaaatagggcagctgtcgtctatgccgtagaatcacatgatctgaggaccattcatggaagctgctaaatagcctagtctggggagtcttccataaagttttgcatggagcaaacaaacaggattaaactaggtttggttccttcagccctctaaaagcatagggcttagcctgcaggcttccttgggctttctctgtgtgtgtagttttgtaaacactatagcatctgttaagatccagtgtccatggaaacattcccacatgccgtgactctggactatatcagtttttggaaagcagggttcctctgcctgctaacaagcccacgtggaccagtctgaatgtctttcctttacacctatgtttttaagtagtcaaacttcaagaaacaatctaaacaagtttctgttgcatatgtgtttgtgaacttgtatttgtatttagtaggcttctatattgcatttaacttgtttttgtaactcctgattcttccttttcggatactattgatgaataaagaaattaaagtgaaaaaaccacnacancnncacacaaaaaacgcacaaaacaaaaaacacaaccaacaacacccacg

SEQ ID NO: 361408 - DNA, 3123 bp, Homo sapiens
ggagtctgttgggggatgggggactgggggagggatagcattgggagaggtgcctgaagtgggtgacgggttgatggtagtgtttgctcagatatagtgcttctgagggacaggcaggtcttgtctgggaaaaaagggtaaggtgcacagactgtagcaaagatgccctgttccaccctcacagctaaactgttgccccgtatttctggcccaacagagtgtgccctggaggatgaaacgtatgcagatggagctgagaccgaggtggactgtaaccgctgtgtctgtgcctgtggaaattgggtctgtacagccatgacctgtgacggaaagaatcagaagggggcccagacccagacagaggaggagatgaccagatatgtccaggagctccaaaagcatcaggaaacagctgaaaagaccaagagagtgagcaccaaagagatctaatgaggaggcacagaccagtgtctggatcccagcatcttctccacttcagcgctgagttcagtatacacaagtgtctgctacagtcgccaaatcaccagtatttgcttatatagcaatgagttttattttgtttatttgttttgcaataaaggatatgaaggtggctggctaggaagggaagggccacagccttcatttctaggagtgctttaagagaaactgtaaatggtgctctggggctggaggctagtaaggaaactgcatcacgattgaaagaggaacagacccaaatctgaacctcttttgagtttactgcatctgtcagcaggctgcagggagtgcacacgatgccagagagaacttagcagggtgtccccggaggagaggtttgggaagctccacggagaggaacgctctctgcttccagcctctttccattgccgtcagcatgacagacctccagcatccacgcatctcttggtcccaataactgcctctagatacatagccatactgctagttaacccagtgtccctcagacttggatggagtttctgggagggtacacccaaatgatgcagatacttgtatactttgagccccttagcgacctaaccaaattttaaaaatactttttaccaaaggtgctatttctctgtaaaacacttttttttggcaagttgactttattcttcaattattatcattatattattgttttttaatattttattttcttgactaggtattaagcttttgtaattatttttcagtagtcccaccacttcataggtggaaggagtttggggttcttcctggtgcaggggctgaaataacccagatgcccccaccctgccacatactagatgcagcccatagttggcccccctagcttccagcagtccactatctgccagaggagcaagggtgccttagaccgaagccaggggaagaagcatcttcataaaaaactttcaagatccaaacattaatttgtttttatttattctgagaagttgaggcaaatcagtattcccaaggatggcgacaagggcagccaagcagggcttaggatatcccagcctaccaatatgctcattcgactaactaggagggtgagttggccctgtctcttcttttttctggacctcagtttcctcagtgagctggtaagaatgcactaaccttttgatttgataagttataaattctgtggttctgatcattggtccagaggggagataggttcctgtgatttttccttcttctctatagaataaatgaaatcttgttactagaacaagaaatgtcagatggccaaaaacaagatgaccagatttgatctcagcctgatgaccctacaggtcgtgctatgatatggagtcctcatgggtaaagcaggaagagagtgggaaagagaaccaccccactctgtcttcatatttgcatttcatgtttaacctccggctggaaatagaaagcattcccttagagatgaggataaaagaaagtttcagattcaacagggggaagaaaatggagatttaatcctaaaactgtgacttggggaggtcagtcatttacagttagtcctgtgtctttcgacttctgtgattattaaccccactcactaccctgtttcagatgcatttggaataccaaagattaaatccttgacataagatctcatttgcagaaagcagattaaagaccatcagaaggaaattatttaggttgtaatgcacaggcaactgtgagaaactgttgtgccaaaaatagaattccttctagtttttcttgttctcatttgaaaggagaaaattccactttgtttagcatttcaagcttttatgtatccatcccatctaaaaactcttcaaactccacttgttcagtctgaaatgcagctccctgtccaagtgccttggagaactcacagcagcacgccttaatcaaaggttttaccagcccttggacactatgggaggagggcaagagtacaccaatttgttaaaagcaagaaaccacagtgtctcttcactagtcatttagaacatggttatcatccaagactactctaccctgcaacattgaactcccaagagcaaatccacattcctcttgagttctgcagcttctgtgtaaatagggcagctgtcgtctatgccgtagaatcacatgatctgaggaccattcatggaagctgctaaatagcctagtctggggagtcttccataaagttttgcatggagcaaacaaacaggattaaactaggtttggttccttcagccctctaaaagcatagggcttagcctgcaggcttccttgggctttctctgtgtgtgtagttttgtaaacactatagcatctgttaagatccagtgtccatggaaacattcccacatgccgtgactctggactatatcagtttttggaaagcagggttcctctgcctgctaacaagcccacgtggaccagtctgaatgtctttcctttacacctatgtttttaagtagtcaaacttcaagaaacaatctaaacaagtttctgttgcatatgtgtttgtgaacttgtatttgtatttagtaggcttctatattgcatttaacttgtttttgtaactcctgattcttccttttcggatactattgatgaataaagaaattaaagtga

SEQ ID NO: 361409 - DNA, 2930 bp, Homo sapiens
agaaaatgtgggtaattcacctctccttccacaagttaaatgggagatgaattgagagcctctaggtagatcttggcggattcctcactggcttaccacagctgctactgctctgagctttggttcttcttgcaggaaagaatcagaagggggcccagacccagacagaggaggagatgaccagatatgtccaggagctccaaaagcatcaggaaacagctgaaaagaccaagagagtgagcaccaaagagatctaatgaggaggcacagaccagtgtctggatcccagcatcttctccacttcagcgctgagttcagtatacacaagtgtctgctacagtcgccaaatcaccagtatttgcttatatagcaatgagttttattttgtttatttgttttgcaataaaggatatgaaggtggctggctaggaagggaagggccacagccttcatttctaggagtgctttaagagaaactgtaaatggtgctctggggctggaggctagtaaggaaactgcatcacgattgaaagaggaacagacccaaatctgaacctcttttgagtttactgcatctgtcagcaggctgcagggagtgcacacgatgccagagagaacttagcagggtgtccccggaggagaggtttgggaagctccacggagaggaacgctctctgcttccagcctctttccattgccgtcagcatgacagacctccagcatccacgcatctcttggtcccaataactgcctctagatacatagccatactgctagttaacccagtgtccctcagacttggatggagtttctgggagggtacacccaaatgatgcagatacttgtatactttgagccccttagcgacctaaccaaattttaaaaatactttttaccaaaggtgctatttctctgtaaaacacttttttttggcaagttgactttattcttcaattattatcattatattattgttttttaatattttattttcttgactaggtattaagcttttgtaattatttttcagtagtcccaccacttcataggtggaaggagtttggggttcttcctggtgcaggggctgaaataacccagatgcccccaccctgccacatactagatgcagcccatagttggcccccctagcttccagcagtccactatctgccagaggagcaagggtgccttagaccgaagccaggggaagaagcatcttcataaaaaactttcaagatccaaacattaatttgtttttatttattctgagaagttgaggcaaatcagtattcccaaggatggcgacaagggcagccaagcagggcttaggatatcccagcctaccaatatgctcattcgactaactaggagggtgagttggccctgtctcttcttttttctggacctcagtttcctcagtgagctggtaagaatgcactaaccttttgatttgataagttataaattctgtggttctgatcattggtccagaggggagataggttcctgtgatttttccttcttctctatagaataaatgaaatcttgttactagaacaagaaatgtcagatggccaaaaacaagatgaccagatttgatctcagcctgatgaccctacaggtcgtgctatgatatggagtcctcatgggtaaagcaggaagagagtgggaaagagaaccaccccactctgtcttcatatttgcatttcatgtttaacctccggctggaaatagaaagcattcccttagagatgaggataaaagaaagtttcagattcaacagggggaagaaaatggagatttaatcctaaaactgtgacttggggaggtcagtcatttacagttagtcctgtgtctttcgacttctgtgattattaaccccactcactaccctgtttcagatgcatttggaataccaaagattaaatccttgacataagatctcatttgcagaaagcagattaaagaccatcagaaggaaattatttaggttgtaatgcacaggcaactgtgagaaactgttgtgccaaaaatagaattccttctagtttttcttgttctcatttgaaaggagaaaattccactttgtttagcatttcaagcttttatgtatccatcccatctaaaaactcttcaaactccacttgttcagtctgaaatgcagctccctgtccaagtgccttggagaactcacagcagcacgccttaatcaaaggttttaccagcccttggacactatgggaggagggcaagagtacaccaatttgttaaaagcaagaaaccacagtgtctcttcactagtcatttagaacatggttatcatccaagactactctaccctgcaacattgaactcccaagagcaaatccacattcctcttgagttctgcagcttctgtgtaaatagggcagctgtcgtctatgccgtagaatcacatgatctgaggaccattcatggaagctgctaaatagcctagtctggggagtcttccataaagttttgcatggagcaaacaaacaggattaaactaggtttggttccttcagccctctaaaagcatagggcttagcctgcaggcttccttgggctttctctgtgtgtgtagttttgtaaacactatagcatctgttaagatccagtgtccatggaaacattcccacatgccgtgactctggactatatcagtttttggaaagcagggttcctctgcctgctaacaagcccacgtggaccagtctgaatgtctttcctttacacctatgtttttaagtagtcaaacttcaagaaacaatctaaacaagtttctgttgcatatgtgtttgtgaacttgtatttgtatttagtaggcttctatattgcatttaacttgtttttgtaactcctgattcttccttttcggatactattgatgaataaagaaattaaagtga

SEQ ID NO: 361410 - DNA, 4128 bp, Homo sapiens
  misc_feature (3778)..(3778): n is a, c, g, or t
  misc_feature (3784)..(3784): n is a, c, g, or t
  misc_feature (3789)..(3789): n is a, c, g, or t
  misc_feature (3798)..(3798): n is a, c, g, or t
ggaggagaatggggaggagctgggggggcaggcaggcggggaaggagaggtcttaaggggcggcgaggggaggtcgcatttcctccgaggctggcgatcggcggagctcccacctccgcttacagctcgctgccgccgtcctgccccgcgcccccaggagacctggaccagaccacgatgtggaaacgctggctcgcgctcgcgctcgcgctggtggcggtcgcctgggtccgcgccgaggaagagctaaggagcaaatccaagatctgtgccaatgtgttttgtggagccggccgggaatgtgcagtcacagagaaaggggaacccacctgtctctgcattgagcaatgcaaacctcacaagaggcctgtgtgtggcagtaatggcaagacctacctcaaccactgtgaactgcatcgagatgcctgcctcactggatccaaaatccaggttgattacgatggacactgcaaagagaagaaatccgtaagtccatctgccagcccagttgtttgctatcagtccaaccgtgatgagctccgacgtcgcatcatccagtggctggaagctgagatcattccagatggctggttctctaaaggcagcaactacagtgaaatcctagacaagtattttaagaactttgataatggtgattctcgcctggactccagtgaattcctgaagtttgtggaacagaatgaaactgccatcaatattacaacgtatccagaccaggagaacaacaagttgcttaggggactctgtgttgatgctctcattgaactgtctgatgaaaatgctgattggaaactcagcttccaagagtttctcaagtgcctcaacccatctttcaaccctcctgagaagaagtgtgccctggaggatgaaacgtatgcagatggagctgagaccgaggtggactgtaaccgctgtgtctgtgcctgtggaaattgggtctgtacagccatgacctgtgacggaaagaatcagaagggggcccagacccagacagaggaggagatgaccagatatgtccaggagctccaaaagcatcaggaaacagctgaaaagaccaagagagtgagcaccaaagagatctaatgaggaggcacagaccagtgtctggatcccagcatcttctccacttcagcgctgagttcagtatacacaagtgtctgctacagtcgccaaatcaccagtatttgcttatatagcaatgagttttattttgtttatttgttttgcaataaaggatatgaaggtggctggctaggaagggaagggccacagccttcatttctaggagtgctttaagagaaactgtaaatggtgctctggggctggaggctagtaaggaaactgcatcacgattgaaagaggaacagacccaaatctgaacctcttttgagtttactgcatctgtcagcaggctgcagggagtgcacacgatgccagagagaacttagcagggtgtccccggaggagaggtttgggaagctccacggagaggaacgctctctgcttccagcctctttccattgccgtcagcatgacagacctccagcatccacgcatctcttggtcccaataactgcctctagatacatagccatactgctagttaacccagtgtccctcagacttggatggagtttctgggagggtacacccaaatgatgcagatacttgtatactttgagccccttagcgacctaaccaaattttaaaaatactttttaccaaaggtgctatttctctgtaaaacacttttttttggcaagttgactttattcttcaattattatcattatattattgttttttaatattttattttcttgactaggtattaagcttttgtaattatttttcagtagtcccaccacttcataggtggaaggagtttggggttcttcctggtgcaggggctgaaataacccagatgcccccaccctgccacatactagatgcagcccatagttggcccccctagcttccagcagtccactatctgccagaggagcaagggtgccttagaccgaagccaggggaagaagcatcttcataaaaaactttcaagatccaaacattaatttgtttttatttattctgagaagttgaggcaaatcagtattcccaaggatggcgacaagggcagccaagcagggcttaggatatcccagcctaccaatatgctcattcgactaactaggagggtgagttggccctgtctcttcttttttctggacctcagtttcctcagtgagctggtaagaatgcactaaccttttgatttgataagttataaattctgtggttctgatcattggtccagaggggagataggttcctgtgatttttccttcttctctatagaataaatgaaatcttgttactagaacaagaaatgtcagatggccaaaaacaagatgaccagatttgatctcagcctgatgaccctacaggtcgtgctatgatatggagtcctcatgggtaaagcaggaagagagtgggaaagagaaccaccccactctgtcttcatatttgcatttcatgtttaacctccggctggaaatagaaagcattcccttagagatgaggataaaagaaagtttcagattcaacagggggaagaaaatggagatttaatcctaaaactgtgacttggggaggtcagtcatttacagttagtcctgtgtctttcgacttctgtgattattaaccccactcactaccctgtttcagatgcatttggaataccaaagattaaatccttgacataagatctcatttgcagaaagcagattaaagaccatcagaaggaaattatttaggttgtaatgcacaggcaactgtgagaaactgttgtgccaaaaatagaattccttctagtttttcttgttctcatttgaaaggagaaaattccactttgtttagcatttcaagcttttatgtatccatcccatctaaaaactcttcaaactccacttgttcagtctgaaatgcagctccctgtccaagtgccttggagaactcacagcagcacgccttaatcaaaggttttaccagcccttggacactatgggaggagggcaagagtacaccaatttgttaaaagcaagaaaccacagtgtctcttcactagtcatttagaacatggttatcatccaagactactctaccctgcaacattgaactcccaagagcaaatccacattcctcttgagttctgcagcttctgtgtaaatagggcagctgtcgtctatgccgtagaatcacatgatctgaggaccattcatggaagctgctaaatagcctagtctggggagtcttccataaagttttgcatggagcaaacaaacaggattaaactaggtttggttccttcagccctctaaaagcatagggcttagcctgcaggcttccttgggctttctctgtgtgtgtagttttgtaaacactatagcatctgttaagatccagtgtccatggaaacattcccacatgccgtgactctggactatatcagtttttggaaagcagggttcctctgcctgctaacaagcccacgtggaccagtctgaatgtctttcctttacacctatgtttttaagtagtcaaacttcaagaaacaatctaaacaagtttctgttgcatatgtgtttgtgaacttgtatttgtatttagtaggcttctatattgcatttaacttgtttttgtaactcctgattcttccttttcggatactattgatgaataaagaaattaaagtganaaacancacanacaacaaancacccgctaccacacaaaggagcaccacacacaacgaacagcacagcaccaaggccacaaacaagaccacacagcaaccaattcgataggacaagaaacaaccaaacaagaagcaacaatcataagacagaagaaaccggaggagacgggacagacgaacacaactgaggcgcgacgagcacacgccgcaaccacttctgagagagatagacactaccgtaataccaaccacaagcgtacacgtgcgaaaaagaacaagaacacatagtgtagacgagaactactagtgataggtaatacaccaatcgcctacccaaactacagttcgag

SEQ ID NO: 361411 - DNA, 3684 bp, Homo sapiens
ggaggagaatggggaggagctgggggggcaggcaggcggggaaggagaggtcttaaggggcggcgaggggaggtcgcatttcctccgaggctggcgatcggcggagctcccacctccgcttacagctcgctgccgccgtcctgccccgcgcccccaggagacctggaccagaccacgatgtggaaacgctggctcgcgctcgcgctcgcgctggtggcggtcgcctgggtccgcgccgaggaagagctaaggagcaaatccaagatctgtgccaatgtgttttgtggagccggccgggaatgtgcagtcacagagaaaggggaacccacctgtctctgcattgagcaatgcaaacctcacaagaggcctgtgtgtggcagtaatggcaagacctacctcaaccactgtgaactgcatcgagatgcctgcctcactggatccaaaatccaggttgattacgatggacactgcaaagagaagaaatccgtaagtccatctgccagcccagttgtttgctatcagtccaaccgtgatgagctccgacgtcgcatcatccagtggctggaagctgagatcattccagatggctggttctctaaaggcagcaactacagtgaaatcctagacaagtattttaagaactttgataatggtgattctcgcctggactccagtgaattcctgaagtttgtggaacagaatgaaactgccatcaatattacaacgtatccagaccaggagaacaacaagttgcttaggggactctgtgttgatgctctcattgaactgtctgatgaaaatgctgattggaaactcagcttccaagagtttctcaagtgcctcaacccatctttcaaccctcctgagaagaagtgtgccctggaggatgaaacgtatgcagatggagctgagaccgaggtggactgtaaccgctgtgtctgtgcctgtggaaattgggtctgtacagccatgacctgtgacggaaagaatcagaagggggcccagacccagacagaggaggagatgaccagatatgtccaggagctccaaaagcatcaggaaacagctgaaaagaccaagagagtgagcaccaaagagatctaatgaggaggcacagaccagtgtctggatcccagcatcttctccacttcagcgctgagttcagtatacacaagtgtctgctacagtcgccaaatcaccagtatttgcttatatagcaatgagttttattttgtttatttgttttgcaataaaggatatgaaggtggctggctaggaagggaagggccacagccttcatttctaggagtgctttaagagaaactgtaaatggtgctctggggctggaggctagtaaggaaactgcatcacgattgaaagaggaacagacccaaatctgaacctcttttgagtttactgcatctgtcagcaggctgcagggagtgcacacgatgccagagagaacttagcagggtgtccccggaggagaggtttgggaagctccacggagaggaacgctctctgcttccagcctctttccattgccgtcagcatgacagacctccagcatccacgcatctcttggtcccaataactgcctctagatacatagccatactgctagttaacccagtgtccctcagacttggatggagtttctgggagggtacacccaaatgatgcagatacttgtatactttgagccccttagcgacctaaccaaattttaaaaatactttttaccaaaggtgctatttctctgtaaaacacttttttttggcaagttgactttattcttcaattattatcattatattattgttttttaatattttattttcttgactaggtattaagcttttgtaattatttttcagtagtcccaccacttcataggtggaaggagtttggggttcttcctggtgcaggggctgaaataacccagatgcccccaccctgccacatactagatgcagcccatagttggcccccctagcttccagcagtccactatctgccagaggagcaagggtgccttagaccgaagccaggggaagaagcatcttcataaaaaactttcaagatccaaacattaatttgtttttatttattctgagaagttgaggcaaatcagtattcccaaggatggcgacaagggcagccaagcagggcttaggatatcccagcctaccaatatgctcattcgactaactaggagggtgagttggccctgtctcttcttttttctggacctcagtttcctcagtgagctggtaagaatgcactaaccttttgatttgataagttataaattctgtggttctgatcattggtccagaggggagataggttcctgtgatttttccttcttctctatagaataaatgaaatcttgttactagaacaagaaatgtcagatggccaaaaacaagatgaccagatttgatctcagcctgatgaccctacaggtcgtgctatgatatggagtcctcatgggtaaagcaggaagagagtgggaaagagaaccaccccactctgtcttcatatttgcatttcatgtttaacctccggctggaaatagaaagcattcccttagagatgaggataaaagaaagtttcagattcaacagggggaagaaaatggagatttaatcctaaaactgtgacttggggaggtcagtcatttacagttagtcctgtgtctttcgacttctgtgattattaaccccactcactaccctgtttcagatgcatttggaataccaaagattaaatccttgacataagatctcatttgcagaaagcagattaaagaccatcagaaggaaattatttaggttgtaatgcacaggcaactgtgagaaactgttgtgccaaaaatagaattccttctagtttttcttgttctcatttgaaaggagaaaattccactttgtttagcatttcaagcttttatgtatccatcccatctaaaaactcttcaaactccacttgttcagtctgaaatgcagctccctgtccaagtgccttggagaactcacagcagcacgccttaatcaaaggttttaccagcccttggacactatgggaggagggcaagagtacaccaatttgttaaaagcaagaaaccacagtgtctcttcactagtcatttagaacatggttatcatccaagactactctaccctgcaacattgaactcccaagagcaaatccacattcctcttgagttctgcagcttctgtgtaaatagggcagctgtcgtctatgccgtagaatcacatgatctgaggaccattcatggaagctgctaaatagcctagtctggggagtcttccataaagttttgcatggagcaaacaaacaggattaaactaggtttggttccttcagccctctaaaagcatagggcttagcctgcaggcttccttgggctttctctgtgtgtgtagttttgtaaacactatagcatctgttaagatccagtgtccatggaaacattcccacatgccgtgactctggactatatcagtttttggaaagcagggttcctctgcctgctaacaagcccacgtggaccagtctgaatgtctttcctttacacctatgtttttaagtagtcaaacttcaagaaacaatctaaacaagtttctgttgcagtgtgcttccggggtaccgagctcg

SEQ ID NO: 361412 - DNA, 1976 bp, Homo sapiens
ggaggagaatggggaggagctgggggggcaggcaggcggggaaggagaggtcttaaggggcggcgaggggaggtcgcatttcctccgaggctggcgatcggcggagctcccacctccgcttacagctcgctgccgccgtcctgccccgcgcccccaggagacctggaccagaccacgatgtggaaacgctggctcgcgctcgcgctcgcgctggtggcggtcgcctgggtccgcgccgaggaagagctaaggagcaaatccaagatctgtgccaatgtgttttgtggagccggccgggaatgtgcagtcacagagaaaggggaacccacctgtctctgcattgagcaatgcaaacctcacaagaggcctgtgtgtggcagtaatggcaagacctacctcaaccactgtgaactgcatcgagatgcctgcctcactggatccaaaatccaggttgattacgatggacactgcaaagagaagaaatccgtaagtccatctgccagcccagttgtttgctatcagtccaaccgtgatgagctccgacgtcgcatcatccagtggctggaagctgagatcattccagatggctggttctctaaaggcagcaactacagtgaaatcctagacaagtattttaagatttgatctcagcctgatgaccctacaggtcgtgctatgatatggagtcctcatgggtaaagcaggaagagagtgggaaagagaaccaccccactctgtcttcatatttgcatttcatgtttaacctccggctggaaatagaaagcattcccttagagatgaggataaaagaaagtttcagattcaacagggggaagaaaatggagatttaatcctaaaactgtgacttggggaggtcagtcatttacagttagtcctgtgtctttcgacttctgtgattattaaccccactcactaccctgtttcagatgcatttggaataccaaagattaaatccttgacataagatctcatttgcagaaagcagattaaagaccatcagaaggaaattatttaggttgtaatgcacaggcaactgtgagaaactgttgtgccaaaaatagaattccttctagtttttcttgttctcatttgaaaggagaaaattccactttgtttagcatttcaagcttttatgtatccatcccatctaaaaactcttcaaactccacttgttcagtctgaaatgcagctccctgtccaagtgccttggagaactcacagcagcacgccttaatcaaaggttttaccagcccttggacactatgggaggagggcaagagtacaccaatttgttaaaagcaagaaaccacagtgtctcttcactagtcatttagaacatggttatcatccaagactactctaccctgcaacattgaactcccaagagcaaatccacattcctcttgagttctgcagcttctgtgtaaatagggcagctgtcgtctatgccgtagaatcacatgatctgaggaccattcatggaagctgctaaatagcctagtctggggagtcttccataaagttttgcatggagcaaacaaacaggattaaactaggtttggttccttcagccctctaaaagcatagggcttagcctgcaggcttccttgggctttctctgtgtgtgtagttttgtaaacactatagcatctgttaagatccagtgtccatggaaacattcccacatgccgtgactctggactatatcagtttttggaaagcagggttcctctgcctgctaacaagcccacgtggaccagtctgaatgtctttcctttacacctatgtttttaagtagtcaaacttcaagaaacaatctaaacaagtttctgttgcatatgtgtttgtgaacttgtatttgtatttagtaggcttctatattgcatttaacttgtttttgtaactcctgattcttccttttcggatactattgatgaataaagaaattaaagtga

SEQ ID NO: 361413 - DNA, 1208 bp, Homo sapiens
gcgttctgaggataacggaagacgagctgaggtggataaaagaaagtttcagattcaacagggggaagaaaatggagatttaatcctaaaactgtgacttggggaggtcagtcatttacagttagtcctgtgtctttcgacttctgtgattattaaccccactcactaccctgtttcagatgcatttggaataccaaagattaaatccttgacataagatctcatttgcagaaagcagattaaagaccatcagaaggaaattatttaggttgtaatgcacaggcaactgtgagaaactgttgtgccaaaaatagaattccttctagtttttcttgttctcatttgaaaggagaaaattccactttgtttagcatttcaagcttttatgtatccatcccatctaaaaactcttcaaactccacttgttcagtctgaaatgcagctccctgtccaagtgccttggagaactcacagcagcacgccttaatcaaaggttttaccagcccttggacactatgggaggagggcaagagtacaccaatttgttaaaagcaagaaaccacagtgtctcttcactagtcatttagaacatggttatcatccaagactactctaccctgcaacattgaactcccaagagcaaatccacattcctcttgagttctgcagcttctgtgtaaatagggcagctgtcgtctatgccgtagaatcacatgatctgaggaccattcatggaagctgctaaatagcctagtctggggagtcttccataaagttttgcatggagcaaacaaacaggattaaactaggtttggttccttcagccctctaaaagcatagggcttagcctgcaggcttccttgggctttctctgtgtgtgtagttttgtaaacactatagcatctgttaagatccagtgtccatggaaacattcccacatgccgtgactctggactatatcagtttttggaaagcagggttcctctgcctgctaacaagcccacgtggaccagtctgaatgtctttcctttacacctatgtttttaagtagtcaaacttcaagaaacaatctaaacaagtttctgttgcatatgtgtttgtgaacttgtatttgtatttagtaggcttctatattgcatttaacttgtttttgtaactcctgattcttccttttcggatactattgatgaataaagaaattaaagtga

SEQ ID NO: 361414 - DNA, 3722 bp, Homo sapiens
ggaggagaatggggaggagctgggggggcaggcaggcggggaaggagaggtcttaaggggcggcgaggggaggtcgcatttcctccgaggctggcgatcggcggagctcccacctccgcttacagctcgctgccgccgtcctgccccgcgcccccaggagacctggaccagaccacgatgtggaaacgctggctcgcgctcgcgctcgcgctggtggcggtcgcctgggtccgcgccgaggaagagctaaggagcaaatccaagatctgtgccaatgtgttttgtggagccggccgggaatgtgcagtcacagagaaaggggaacccacctgtctctgcattgagcaatgcaaacctcacaagaggcctgtgtgtggcagtaatggcaagacctacctcaaccactgtgaactgcatcgagatgcctgcctcactggatccaaaatccaggttgattacgatggacactgcaaagagaagaaatccgtaagtccatctgccagcccagttgtttgctatcagtccaaccgtgatgagctccgacgtcgcatcatccagtggctggaagctgagatcattccagatggctggttctctaaaggcagcaactacagtgaaatcctagacaagtattttaagaactttgataatggtgattctcgcctggactccagtgaattcctgaagtttgtggaacagaatgaaactgccatcaatattacaacgtatccagaccaggagaacaacaagttgcttaggggactctgtgttgatgctctcattgaactgtctgatgaaaatgctgattggaaactcagcttccaagagtttctcaagtgcctcaacccatctttcaaccctcctgagaagaagtgtgccctggaggatgaaacgtatgcagatggagctgagaccgaggtggactgtaaccgctgtgtctgtgcctgtggaaattgggtctgtacagccatgacctgtgacggaaagaatcagaagggggcccagacccagacagaggaggagatgaccagatatgtccaggagctccaaaagcatcaggaaacagctgaaaagaccaagagagtgagcaccaaagagatctaatgaggaggcacagaccagtgtctggatcccagcatcttctccacttcagcgctgagttcagtatacacaagtgtctgctacagtcgccaaatcaccagtatttgcttatatagcaatgagttttattttgtttatttgttttgcaataaaggatatgaaggtggctggctaggaagggaagggccacagccttcatttctaggagtgctttaagagaaactgtaaatggtgctctggggctggaggctagtaaggaaactgcatcacgattgaaagaggaacagacccaaatctgaacctcttttgagtttactgcatctgtcagcaggctgcagggagtgcacacgatgccagagagaacttagcagggtgtccccggaggagaggtttgggaagctccacggagaggaacgctctctgcttccagcctctttccattgccgtcagcatgacagacctccagcatccacgcatctcttggtcccaataactgcctctagatacatagccatactgctagttaacccagtgtccctcagacttggatggagtttctgggagggtacacccaaatgatgcagatacttgtatactttgagccccttagcgacctaaccaaattttaaaaatactttttaccaaaggtgctatttctctgtaaaacacttttttttggcaagttgactttattcttcaattattatcattatattattgttttttaatattttattttcttgactaggtattaagcttttgtaattatttttcagtagtcccaccacttcataggtggaaggagtttggggttcttcctggtgcaggggctgaaataacccagatgcccccaccctgccacatactagatgcagcccatagttggcccccctagcttccagcagtccactatctgccagaggagcaagggtgccttagaccgaagccaggggaagaagcatcttcataaaaaactttcaagatccaaacattaatttgtttttatttattctgagaagttgaggcaaatcagtattcccaaggatggcgacaagggcagccaagcagggcttaggatatcccagcctaccaatatgctcattcgactaactaggagggtgagttggccctgtctcttcttttttctggacctcagtttcctcagtgagctggtaagaatgcactaaccttttgatttgataagttataaattctgtggttctgatcattggtccagaggggagataggttcctgtgatttttccttcttctctatagaataaatgaaatcttgttactagaacaagaaatgtcagatggccaaaaacaagatgaccagatttgatctcagcctgatgaccctacaggtcgtgctatgatatggagtcctcatgggtaaagcaggaagagagtgggaaagagaaccaccccactctgtcttcatatttgcatttcatgtttaacctccggctggaaatagaaagcattcccttagagatgaggataaaagaaagtttcagattcaacagggggaagaaaatggagatttaatcctaaaactgtgacttggggaggtcagtcatttacagttagtcctgtgtctttcgacttctgtgattattaaccccactcactaccctgtttcagatgcatttggaataccaaagattaaatccttgacataagatctcatttgcagaaagcagattaaagaccatcagaaggaaattatttaggttgtaatgcacaggcaactgtgagaaactgttgtgccaaaaatagaattccttctagtttttcttgttctcatttgaaaggagaaaattccactttgtttagcatttcaagcttttatgtatccatcccatctaaaaactcttcaaactccacttgttcagtctgaaatgcagctccctgtccaagtgccttggagaactcacagcagcacgccttaatcaaaggttttaccagcccttggacactatgggaggagggcaagagtacaccaatttgttaaaagcaagaaaccacagtgtctcttcactagtcatttagaacatggttatcatccaagactactctaccctgcaacattgaactcccaagagcaaatccacattcctcttgagttctgcagcttctgtgtaaatagggcagctgtcgtctatgccgtagaatcacatgatctgaggaccattcatggaagctgctaaatagcctagtctggggagtcttccataaagttttgcatggagcaaacaaacaggattaaactaggtttggttccttcagccctttttgtaaacactatagcatctgttaagatccagtgtccatggaaacattcccacatgccgtgactctggactatatcagtttttggaaagcagggttcctctgcctgctaacaagcccacgtggaccagtctgaatgtctttcctttacacctatgtttttaagtagtcaaacttcaagaaacaatctaaacaagtttctgttgcatatgtgtttgtgaacttgtatttgtatttagtaggcttctatattgcatttaacttgtttttgtaactcctgattcttccttttcggatactattgatgaataaagaaattaaagtga

SEQ ID NO: 361415 - DNA, 950 bp, Homo sapiens
acatgccgtgactctggactatatcagtttttggaaagcagggttcctctgcctgctaacaagcccacgtggaccagtctgaatgtctttcctttacacctatgtttttaagcagtcaaacttcaagaaactatctaaacaagtttctgttgcagtgtgcttgcttgttcagtctgaaatgcagctccctgtccaagtgccttggagaactcacagcagcacgccttaatcaaaggttttaccagcccttggacactatgggaggagggcaagagtacaccaatttgttaaaagcaagaaaccacagtgtctcttcactagtcatttagaacatggttatcatccaagactactctaccctgcaacattgaactcccaagagcaaatccacattcctcttgagttctgcagcttctgtgtaaatagggcagctgtcgtctatgccgtagaatcacatgatctgaggaccattcatggaagctgctaaatagcctagtctggggagtcttccataaagttttgcatggagcaaacaaacaggattaaactaggtttggttccttcagccctctaaaagcatagggcttagcctgcaggcttccttgggctttctctgtgtgtgtagttttgtaaacactatagcatctgttaagatccagtgtccatggaaacattcccacatgccgtgactctggactatatcagtttttggaaagcagggttcctctgcctgctaacaagcccacgtggaccagtctgaatgtctttcctttacacctatgtttttaagtagtcaaacttcaagaaacaatctaaacaagtttctgttgcatatgtgtttgtgaacttgtatttgtatttagtaggcttctatattgcatttaacttgtttttgtaactcctgattcttccttttcggatactattgatgaataaagaaattaaagtga

SEQ ID NO: 361416 - DNA, 834 bp, Homo sapiens
cagctcggtaccccatttttgaattcttgtcccatatccatggcacagtgctgtgagggatgagcttccatagtcctcgggcagatctgcacctgcacggcggcacgccttaatcaaaggttttaccagcccttggacactatgggaggagggcaagagtacaccaatttgttaaaagcaagaaaccacagtgtctcttcactagtcatttagaacatggttatcatccaagactactctaccctgcaacattgaactcccaagagcaaatccacattcctcttgagttctgcagcttctgtgtaaatagggcagctgtcgtctatgccgtagaatcacatgatctgaggaccattcatggaagctgctaaatagcctagtctggggagtcttccataaagttttgcatggagcaaacaaacaggattaaactaggtttggttccttcagccctctaaaagcatagggcttagcctgcaggcttccttgggctttctctgtgtgtgtagttttgtaaacactatagcatctgttaagatccagtgtccatggaaacattcccacatgccgtgactctggactatatcagtttttggaaagcagggttcctctgcctgctaacaagcccacgtggaccagtctgaatgtctttcctttacacctatgtttttaagtagtcaaacttcaagaaacaatctaaacaagtttctgttgcatatgtgtttgtgaacttgtatttgtatttagtaggcttctatattgcatttaacttgtttttgtaactcctgattcttccttttcggatactattgatgaataaagaaattaaagtga

SEQ ID NO: 361417 - DNA, 3400 bp, Homo sapiens
ggaggagaatggggaggagctgggggggcaggcaggcggggaaggagaggtcttaaggggcggcgaggggaggtcgcatttcctccgaggctggcgatcggcggagctcccacctccgcttacagctcgctgccgccgtcctgccccgcgcccccaggagacctggaccagaccacgatgtggaaacgctggctcgcgctcgcgctcgcgctggtggcggtcgcctgggtccgcgccgaggaagagctaaggagcaaatccaagatctgtgccaatgtgttttgtggagccggccgggaatgtgcagtcacagagaaaggggaacccacctgtctctgcattgagcaatgcaaacctcacaagaggcctgtgtgtggcagtaatggcaagacctacctcaaccactgtgaactgcatcgagatgcctgcctcactggatccaaaatccaggttgattacgatggacactgcaaagagaagaaatccgtaagtccatctgccagcccagttgtttgctatcagtccaaccgtgatgagctccgacgtcgcatcatccagtggctggaagctgagatcattccagatggctggttctctaaaggcagcaactacagtgaaatcctagacaagtattttaagaactttgataatggtgattctcgcctggactccagtgaattcctgaagtttgtggaacagaatgaaactgccatcaatattacaacgtatccagaccaggagaacaacaagttgcttaggggactctgtgttgatgctctcattgaactgtctgatgaaaatgctgattggaaactcagcttccaagagtttctcaagtgcctcaacccatctttcaaccctcctgagaagaagtgtgccctggaggatgaaacgtatgcagatggagctgagaccgaggtggactgtaaccgctgtgtctgtgcctgtggaaattgggtctgtacagccatgacctgtgacggaaagaatcagaagggggcccagacccagacagaggaggagatgaccagatatgtccaggagctccaaaagcatcaggaaacagctgaaaagaccaagagagtgagcaccaaagagatctaatgaggaggcacagaccagtgtctggatcccagcatcttctccacttcagcgctgagttcagtatacacaagtgtctgctacagtcgccaaatcaccagtatttgcttatatagcaatgagttttattttgtttatttgttttgcaataaaggatatgaaggtggctggctaggaagggaagggccacagccttcatttctaggagtgctttaagagaaactgtaaatggtgctctggggctggaggctagtaaggaaactgcatcacgattgaaagaggaacagacccaaatctgaacctcttttgagtttactgcatctgtcagcaggctgcagggagtgcacacgatgccagagagaacttagcagggtgtccccggaggagaggtttgggaagctccacggagaggaacgctctctgcttccagcctctttccattgccgtcagcatgacagacctccagcatccacgcatctcttggtcccaataactgcctctagatacatagccatactgctagttaacccagtgtccctcagacttggatggagtttctgggagggtacacccaaatgatgcagatacttgtatactttgagccccttagcgacctaaccaaattttaaaaatactttttaccaaaggtgctatttctctgtaaaacacttttttttggcaagttgactttattcttcaattattatcattatattattgttttttaatattttattttcttgactaggtattaagcttttgtaattatttttcagtagtcccaccacttcataggtggaaggagtttggggttcttcctggtgcaggggctgaaataacccagatgcccccaccctgccacatactagatgcagcccatagttggcccccctagcttccagcagtccactatctgccagaggagcaagggtgccttagaccgaagccaggggaagaagcatcttcataaaaaactttcaagatccaaacattaatttgtttttatttattctgagaagttgaggcaaatcagtattcccaaggatggcgacaagggcagccaagcagggcttaggatatcccagcctaccaatatgctcattcgactaactaggagggtgagttggccctgtctcttcttttttctggacctcagtttcctcagtgagctggtaagaatgcactaaccttttgatttgataagttataaattctgtggttctgatcattggtccagaggggagataggttcctgtgatttttccttcttctctatagaataaatgaaatcttgttactagaacaagaaatgtcagatggccaaaaacaagatgaccagatttgatctcagcctgatgaccctacaggtcgtgctatgatatggagtcctcatgggtaaagcaggaagagagtgggaaagagaaccaccccactctgtcttcatatttgcatttcatgtttaacctccggctggaaatagaaagcattcccttagagatgaggataaaagaaagtttcagattcaacagggggaagaaaatggagatttaatcctaaaactgtgacttggggaggtcagtcatttacagttagtcctgtgtctttcgacttctgtgattattaaccccactcactaccctgtttcagatgcatttggaataccaaagattaaatccttgacataagatctcatttgcagaaagcagattaaagaccatcagaaggaaattatttaggttgtaatgcacaggcaactgtgagaaactgttgtgccaaaaatagaattccttctagtttttcttgttctcatttgaaaggagaaaattccactttgtttagcatttcaagcttttatgtatccatcccatctaaaaactcttcaaactccacttgttcagtctgaaatgcagctccctgtccaagtgccttggagaactcacagcagcacgccttaatcaaaggttttaccagcccttggacactatgggaggagggcaagagtacaccaatttgttaaaagcaagaaaccacagtgtctcttcactagtcatttagaacatggttatcatccaagactactctaccctgcaacattgaactcccaagagcaaatccacattcctcttgagttctgcagcttctgtgtaaatagggcagctgtcgtctatgccgtagaatcacatgatctgaggaccattcatggaagctgctaaatagcctagtctggggagtcttccataaagttttgcatggagcaaacaaacagatagagagtgttgggggggatctgtagagtcac

SEQ ID NO: 361418 - DNA, 620 bp, Homo sapiens
tgaggtcgtctagaggatcccggaagcacctgcaacattgaactcccaagagcaaatccacattcctcttgagttctgcagcttctgtgtaaatagggcagctgtcgtctatgccgtagaatcacatgatctgaggaccattcatggaagctgctaaatagcctagtctggggagtcttccataaagttttgcatggagcaaacaaacaggattaaactaggtttggttccttcagccctctaaaagcatagggcttagcctgcaggcttccttgggctttctctgtgtgtgtagttttgtaaacactatagcatctgttaagatccagtgtccatggaaacattcccacatgccgtgactctggactatatcagtttttggaaagcagggttcctctgcctgctaacaagcccacgtggaccagtctgaatgtctttcctttacacctatgtttttaagtagtcaaacttcaagaaacaatctaaacaagtttctgttgcatatgtgtttgtgaacttgtatttgtatttagtaggcttctatattgcatttaacttgtttttgtaactcctgattcttccttttcggatactattgatgaataaagaaattaaagtga

SEQ ID NO: 361419 - DNA, 2638 bp, Homo sapiens
ggaggagaatggggaggagctgggggggcaggcaggcggggaaggagaggtcttaaggggcggcgaggggaggtcgcatttcctccgaggctggcgatcggcggagctcccacctccgcttacagctcgctgccgccgtcctgccccgcgcccccaggagacctggaccagaccacgatgtggaaacgctggctcgcgctcgcgctcgcgctggtggcggtcgcctgggtccgcgccgaggaagagctaaggagcaaatccaagatctgtgccaatgtgttttgtggagccggccgggaatgtgcagtcacagagaaaggggaacccacctgtctctgcattgagcaatgcaaacctcacaagaggcctgtgtgtggcagtaatggcaagacctacctcaaccactgtgaactgcatcgagatgcctgcctcactggatccaaaatccaggttgattacgatggacactgcaaagagaagaaatccgtaagtccatctgccagcccagttgtttgctatcagtccaaccgtgatgagctccgacgtcgcatcatccagtggctggaagctgagatcattccagatggctggttctctaaaggcagcaactacagtgaaatcctagacaagtattttaagaactttgataatggtgattctcgcctggactccagtgaattcctgaagtttgtggaacagaatgaaactgccatcaatattacaacgtatccagaccaggagaacaacaagttgcttaggggactctgtgttgatgctctcattgaactgtctgatgaaaatgctgattggaaactcagcttccaagagtttctcaagtgcctcaacccatctttcaaccctcctgagaagaagtgtgccctggaggatgaaacgtatgcagatggagctgagaccgaggtggactgtaaccgctgtgtctgtgcctgtggaaattgggtctgtacagccatgacctgtgacggaaagaatcagaagggggcccagacccagacagaggaggagatgaccagatatgtccaggagctccaaaagcatcaggaaacagctgaaaagaccaagagagtgagcaccaaagagatctaatgaggaggcacagaccagtgtctggatcccagcatcttctccacttcagcgctgagttcagtatacacaagtgtctgctacagtcgccaaatcaccagtatttgcttatatagcaatgagttttattttgtttatttgttttgcaataaaggatatgaaggtggctggctaggaagggaagggccacagccttcatttctaggagtgctttaagagaaactgtaaatggtgctctggggctggaggctagtaaggaaactgcatcacgattgaaagaggaacagacccaaatctgaacctcttttgagtttactgcatctgtcagcaggctgcagggagtgcacacgatgccagagagaacttagcagggtgtccccggaggagaggtttgggaagctccacggagaggaacgctctctgcttccagcctctttccattgccgtcagcatgacagacctccagcatccacgcatctcttggtcccaataactgcctctagatacatagccatactgctagttaacccagtgtccctcagacttggatggagtttctgggagggtacacccaaatgatgcagatacttgtatactttgagccccttagcgacctaaccaaattttaaaaatactttttaccaaaggtgctatttctctgtaaaacacttttttttggcaagttgactttattcttcaattattatcattatattattgttttttaatattttattttcttgactaggctgactttatcatgacaactctagctgattctttatgaaggattagggatattcatcttcagcagtgcacatgagaaataaactctgaaaaaggcaatttctggggtttaggaaggaccgtattctgggaattacttcagaggaacggacaataattctaggattatagccaagaaggactggaagacttcaggagatgcttcagcttcttctagattttgaatgctgaataagccactgaagtgtgatatctatattatccttttctttgcaagaaattgaatagcagcaaatttctctatcctgaatagcagacagattcattttttcaattagctgtttctcatccaaggcattaggaagacctccctttttccaaggcacatcgaacctgagttagcaggaagggattctccaataagagcagaaatgccaggaaatcctcaacactatggaagatttcttaccggacccttgaacctcaatgatccagatgcaaaatgcagattccccaaaatttttgtaaatacagatgacacttatgaagagctccatttaatcgtttataaggccatgagtgcggctgtgtgctttatgatcgacgcctctgtccacccaacgttggatttttgccgaagactggacagcatcgttggcccccagctcacagtgctgccctctgacatctgtgaacagtttaacatcaacaagaggatgtccgggtctgagaaagaaccccagtttaagtttatctacttcaaccacatgaatctcgccgagaagagcac

SEQ ID NO: 361420 - DNA, 455 bp, Homo sapiens
aattctatttttggcacaacagtttctcacagttgcctgtgcattacaacctaaataatttccttctgatggtctctaaaagcatagggcttagcctgcaggcttccttgggctttctctgtgtgtgtagttttgtaaacactatagcatctgttaagatccagtgtccatggaaacattcccacatgccgtgactctggactatatcagtttttggaaagcagggttcctctgcctgctaacaagcccacgtggaccagtctgaatgtctttcctttacacctatgtttttaagtagtcaaacttcaagaaacaatctaaacaagtttctgttgcatatgtgtttgtgaacttgtatttgtatttagtaggcttctatattgcatttaacttgtttttgtaactcctgattcttccttttcggatactattgatgaataaagaaattaaagtga

SEQ ID NO: 361421 - DNA, 1447 bp, Homo sapiens
ggaggagaatggggaggagctgggggggcaggcaggcggggaaggagaggtcttaaggggcggcgaggggaggtcgcatttcctccgaggctggcgatcggcggagctcccacctccgcttacagctcgctgccgccgtcctgccccgcgcccccaggagacctggaccagaccacgatgtggaaacgctggctcgcgctcgcgctcgcgctggtggcggtcgcctgggtccgcgccgaggaagagctaaggagcaaatccaagatctgtgccaatgtgttttgtggagccggccgggaatgtgcagtcacagagaaaggggaacccacctgtctctgcattgagcaatgcaaacctcacaagaggcctgtgtgtggcagtaatggcaagacctacctcaaccactgtgaactgcatcgagatgcctgcctcactggatccaaaatccaggttgattacgatggacactgcaaagagaagaaatccgtaagtccatctgccagcccagttgtttgctatcagtccaaccgtgatgagctccgacgtcgcatcatccagtggctggaagctgagatcattccagatggctggttctctaaaggcagcaactacagtgaaatcctagacaagtattttaagaactttgataatggtgattctcgcctggactccagtgaattcctgaagtttgtggaacagaatgaaactgccatcaatattacaacgtatccagaccaggagaacaacaagttgcttaggggactctgtgttgatgctctcattgaactgtctgatgaaaatgctgattggaaactcagcttccaagagtttctcaagtgcctcaacccatctttcaaccctcctgagaagaagtgtgccctggaggatgaaacgtatgcagatggagctgagaccgaggtggactgtaaccgctgtgtctgtgcctgtggaaattgggtctgtacagccatgacctgtgacggaaagaatcagaagggggcccagacccagacagaggaggagatgaccagatatgtccaggagctccaaaagcatcaggaaacagctgaaaagaccaagagagtgagcaccaaagagatctaatgaggaggcacagaccagtgtctggatcccagcatcttctccacttcagcgctgagttcagtatacacaagtgtctgctacagtcgccaaatcaccagtatttgcttatatagcaatgagttttattttgtttatttgttttgcaataaaggatatgaaggtggctggctaggaagggaagggccacagccttcatttctaggagtgctttaagagaaactgtaaatggtgctctggggcaggagaatcgcttgaactcgggaggcggaggttgcagtgagccgagatcgcgccactgcactccagcctgggtgacagagtgagactctgtctcaaaaaaaaa

SEQ ID NO: 361422 - DNA, 1019 bp, Homo sapiens
ggaggagaatggggaggagctgggggggcaggcaggcggggaaggagaggtcttaaggggcggcgaggggaggtcgcatttcctccgaggctggcgatcggcggagctcccacctccgcttacagctcgctgccgccgtcctgccccgcgcccccaggagacctggaccagaccacgatgtggaaacgctggctcgcgctcgcgctcgcgctggtggcggtcgcctgggtccgcgccgaggaagagctaaggagcaaatccaagatctgtgccaatgtgttttgtggagccggccgggaatgtgcagtcacagagaaaggggaacccacctgtctctgcattgagcaatgcaaacctcacaagaggcctgtgtgtggcagtaatggcaagacctacctcaaccactgtgaactgcatcgagatgcctgcctcactggatccaaaatccaggttgattacgatggacactgcaaagagaagaaatccgtaagtccatctgccagcccaggtgagtgcctattttttctactgtgtgcatctcagggaggacattcttttcatgatagaaattttgtgttccacaatccctgccaagctcataagatcttctatgcatcagaattgtgtcccagaactggccactcctcaacacagctcagaaaagctgcaaaactacatttgtgtatgtgtttgccaattgaagcagctggttgggtcagaatgttggctgtgttttcccatttttcctgagtagtgattgaactgcataaacaggaaagccactgagttcatttttcaacatcctataagacatgctcgtgtcatgggaccagcaaatagaaggcacaactctttttgaaaggggataactggaaatgccagtaagacttctgtggttttctattagtgatcactaaaattttatcatgatttatagttacagagcttttttgcacatactttccttagattctcacggtagcctttgtgaagtagatcttattgtaattaccatatag

SEQ ID NO: 361423 - DNA, 791 bp, Homo sapiens
ggaggagaatggggaggagctgggggggcaggcaggcggggaaggagaggtcttaaggggcggcgaggggaggtcgcatttcctccgaggctggcgatcggcggagctcccacctccgcttacagctcgctgccgccgtcctgccccgcgcccccaggagacctggaccagaccacgatgtggaaacgctggctcgcgctcgcgctcgcgctggtggcggtcgcctgggtccgcgccgaggcattcatcaaatagcatttgatgggtttaaatctttttccttggccattactgaagaagactggaggatttatactctgtacattggccttcaaagtggacaagtcttaggtagacaattggagaggagaaaataagaaccatattcaaacctaacaagctaattcagggcagataaatggtctgtattagaaacttccacttggactttcctaagaaaccgaagggtgaaattatgaaactagtggcagccttacaaaaacattttttaggaagagtgacaagatatcttgggaactcctaagaatcactctgaggagtgttgctttcataatggggagcccgaaagaccctgtcagtagcagtggagtcactgggtgttcctgtgttgagaaggcggtgtggtatgtcacaggggagactctccaactcgtcactgtggaccatgagaacagaagcacctctctcaagtaccggagttggagccacctgggtctgactcttacctcagtcatggcccagctcttgaagtcacagtctcctcagtgcaa

SEQ ID NO: 361424 - DNA, 322 bp, Homo sapiens
gcgaagctgaggtcttgctaacacatttctcctgtgttttgtttcaggggactctgtgttgatgctctcattgaactgtctgatgaaaatgctgattggaaactcagcttccaagagtttctcaagtgcctcaacccatctttcaaccctcctgagaagagtatgcctaacctaagaaatagagagctgtagtgaatggaggcattttgtaggagccaagatagagaggattggtggaactctccagagctagctgagaaaatccccttccatgattctaaactgggccccagcccattctccccatggtgaagttagggcc

SEQ ID NO: 361425 - DNA, 3777 bp, Homo sapiens
ggaggagaatggggaggagctgggggggcaggcaggcggggaaggagaggtcttaaggggcggcgaggggaggtcgcatttcctccgaggctggcgatcggcggagctcccacctccgcttacagctcgctgccgccgtcctgccccgcgcccccaggagacctggaccagaccacgatgtggaaacgctggctcgcgctcgcgctcgcgctggtggcggtcgcctgggtccgcgccgaggaagagctaaggagcaaatccaagatctgtgccaatgtgttttgtggagccggccgggaatgtgcagtcacagagaaaggggaacccacctgtctctgcattgagcaatgcaaacctcacaagaggcctgtgtgtggcagtaatggcaagacctacctcaaccactgtgaactgcatcgagatgcctgcctcactggatccaaaatccaggttgattacgatggacactgcaaagagaagaaatccgtaagtccatctgccagcccagttgtttgctatcagtccaaccgtgatgagctccgacgtcgcatcatccagtggctggaagctgagatcattccagatggctggttctctaaaggcagcaactacagtgaaatcctagacaagtattttaagaactttgataatggtgattctcgcctggactccagtgaattcctgaagtttgtggaacagaatgaaactgccatcaatattacaacgtatccagaccaggagaacaacaagttgcttaggggactctgtgttgatgctctcattgaactgtctgatgaaaatgctgattggaaactcagcttccaagagtttctcaagtgcctcaacccatctttcaaccctcctgagaagaagtgtgccctggaggatgaaacgtatgcagatggagctgagaccgaggtggactgtaaccgctgtgtctgtgcctgtggaaattgggtctgtacagccatgacctgtgacggaaagaatcagaagggggcccagacccagacagaggaggagatgaccagatatgtccaggagctccaaaagcatcaggaaacagctgaaaagaccaagagagtgagcaccaaagagatctaatgaggaggcacagaccagtgtctggatcccagcatcttctccacttcagcgctgagttcagtatacacaagtgtctgctacagtcgccaaatcaccagtatttgcttatatagcaatgagttttattttgtttatttgttttgcaataaaggatatgaaggtggctggctaggaagggaagggccacagccttcatttctaggagtgctttaagagaaactgtaaatggtgctctggggctggaggctagtaaggaaactgcatcacgattgaaagaggaacagacccaaatctgaacctcttttgagtttactgcatctgtcagcaggctgcagggagtgcacacgatgccagagagaacttagcagggtgtccccggaggagaggtttgggaagctccacggagaggaacgctctctgcttccagcctctttccattgccgtcagcatgacagacctccagcatccacgcatctcttggtcccaataactgcctctagatacatagccatactgctagttaacccagtgtccctcagacttggatggagtttctgggagggtacacccaaatgatgcagatacttgtatactttgagccccttagcgacctaaccaaattttaaaaatactttttaccaaaggtgctatttctctgtaaaacacttttttttggcaagttgactttattcttcaattattatcattatattattgttttttaatattttattttcttgactaggtattaagcttttgtaattatttttcagtagtcccaccacttcataggtggaaggagtttggggttcttcctggtgcaggggctgaaataacccagatgcccccaccctgccacatactagatgcagcccatagttggcccccctagcttccagcagtccactatctgccagaggagcaagggtgccttagaccgaagccaggggaagaagcatcttcataaaaaactttcaagatccaaacattaatttgtttttatttattctgagaagttgaggcaaatcagtattcccaaggatggcgacaagggcagccaagcagggcttaggatatcccagcctaccaatatgctcattcgactaactaggagggtgagttggccctgtctcttcttttttctggacctcagtttcctcagtgagctggtaagaatgcactaaccttttgatttgataagttataaattctgtggttctgatcattggtccagaggggagataggttcctgtgatttttccttcttctctatagaataaatgaaatcttgttactagaacaagaaatgtcagatggccaaaaacaagatgaccagatttgatctcagcctgatgaccctacaggtcgtgctatgatatggagtcctcatgggtaaagcaggaagagagtgggaaagagaaccaccccactctgtcttcatatttgcatttcatgtttaacctccggctggaaatagaaagcattcccttagagatgaggataaaagaaagtttcagattcaacagggggaagaaaatggagatttaatcctaaaactgtgacttggggaggtcagtcatttacagttagtcctgtgtctttcgacttctgtgattattaaccccactcactaccctgtttcagatgcatttggaataccaaagattaaatccttgacataagatctcatttgcagaaagcagattaaagaccatcagaaggaaattatttaggttgtaatgcacaggcaactgtgagaaactgttgtgccaaaaatagaattccttctagtttttcttgttctcatttgaaaggagaaaattccactttgtttagcatttcaagcttttatgtatccatcccatctaaaaactcttcaaactccacttgttcagtctgaaatgcagctccctgtccaagtgccttggagaactcacagcagcacgccttaatcaaaggttttaccagcccttggacactatgggaggagggcaagagtacaccaatttgttaaaagcaagaaaccacagtgtctcttcactagtcatttagaacatggttatcatccaagactactctaccctgcaacattgaactcccaagagcaaatccacattcctcttgagttctgcagcttctgtgtaaatagggcagctgtcgtctatgccgtagaatcacatgatctgaggaccattcatggaagctgctaaatagcctagtctggggagtcttccataaagttttgcatggagcaaacaaacaggattaaactaggtttggttccttcagccctctaaaagcatagggcttagcctgcaggcttccttgggctttctctgtgtgtgtagttttgtaaacactatagcatctgttaagatccagtgtccatggaaacattcccacatgccgtgactctggactatatcagtttttggaaagcagggttcctctgcctgctaacaagcccacgtggaccagtctgaatgtctttcctttacacctatgtttttaagtagtcaaacttcaagaaacaatctaaacaagtttctgttgcatatgtgtttgtgaacttgtatttgtatttagtaggcttctatattgcatttaacttgtttttgtaactcctgattcttccttttcggatactattgatgaataaagaaattaaagtga

SEQ ID NO: 361426 - DNA, 3714 bp, Homo sapiens
ggaggagaatggggaggagctgggggggcaggcaggcggggaaggagaggtcttaaggggcggcgaggggaggtcgcatttcctccgaggctggcgatcggcggagctcccacctccgcttacagctcgctgccgccgtcctgccccgcgcccccaggagacctggaccagaccacgatgtggaaacgctggctcgcgctcgcgctcgcgctggtggcggtcgcctgggtccgcgccgaggaagagctaaggagcaaatccaagatctgtgccaatgtgttttgtggagccggccgggaatgtgcagtcacagagaaaggggaacccacctgtctctgcattgagcaatgcaaacctcacaagaggcctgtgtgtggcagtaatggcaagacctacctcaaccactgtgaactgcatcgagatgcctgcctcactggatccaaaatccaggttgattacgatggacactgcaaagagaagaaatccgtaagtccatctgccagcccagttgtttgctatcagtccaaccgtgatgagctccgacgtcgcatcatccagtggctggaagctgagatcattccagatggctggttctctaaaggcagcaactacagtgaaatcctagacaagtattttaagaactttgataatggtgattctcgcctggactccagtgaattcctgaagtttgtggaacagaatgaaactgccatcaatattacaacgtatccagaccaggagaacaacaagttgcttaggggactctgtgttgatgctctcattgaactgtctgatgaaaatgctgattggaaactcagcttccaagagtttctcaagtgcctcaacccatctttcaaccctcctgagaagaagtgtgccctggaggatgaaacgtatgcagatggagctgagaccgaggtggactgtaaccgctgtgtctgtgcctgtggaaattgggtctgtacagccatgacctgtgacggaaagaatcagaagggggcccagacccagacagaggaggagatgaccagatatgtccaggagctccaaaagcatcagtgtctggatcccagcatcttctccacttcagcgctgagttcagtatacacaagtgtctgctacagtcgccaaatcaccagtatttgcttatatagcaatgagttttattttgtttatttgttttgcaataaaggatatgaaggtggctggctaggaagggaagggccacagccttcatttctaggagtgctttaagagaaactgtaaatggtgctctggggctggaggctagtaaggaaactgcatcacgattgaaagaggaacagacccaaatctgaacctcttttgagtttactgcatctgtcagcaggctgcagggagtgcacacgatgccagagagaacttagcagggtgtccccggaggagaggtttgggaagctccacggagaggaacgctctctgcttccagcctctttccattgccgtcagcatgacagacctccagcatccacgcatctcttggtcccaataactgcctctagatacatagccatactgctagttaacccagtgtccctcagacttggatggagtttctgggagggtacacccaaatgatgcagatacttgtatactttgagccccttagcgacctaaccaaattttaaaaatactttttaccaaaggtgctatttctctgtaaaacacttttttttggcaagttgactttattcttcaattattatcattatattattgttttttaatattttattttcttgactaggtattaagcttttgtaattatttttcagtagtcccaccacttcataggtggaaggagtttggggttcttcctggtgcaggggctgaaataacccagatgcccccaccctgccacatactagatgcagcccatagttggcccccctagcttccagcagtccactatctgccagaggagcaagggtgccttagaccgaagccaggggaagaagcatcttcataaaaaactttcaagatccaaacattaatttgtttttatttattctgagaagttgaggcaaatcagtattcccaaggatggcgacaagggcagccaagcagggcttaggatatcccagcctaccaatatgctcattcgactaactaggagggtgagttggccctgtctcttcttttttctggacctcagtttcctcagtgagctggtaagaatgcactaaccttttgatttgataagttataaattctgtggttctgatcattggtccagaggggagataggttcctgtgatttttccttcttctctatagaataaatgaaatcttgttactagaacaagaaatgtcagatggccaaaaacaagatgaccagatttgatctcagcctgatgaccctacaggtcgtgctatgatatggagtcctcatgggtaaagcaggaagagagtgggaaagagaaccaccccactctgtcttcatatttgcatttcatgtttaacctccggctggaaatagaaagcattcccttagagatgaggataaaagaaagtttcagattcaacagggggaagaaaatggagatttaatcctaaaactgtgacttggggaggtcagtcatttacagttagtcctgtgtctttcgacttctgtgattattaaccccactcactaccctgtttcagatgcatttggaataccaaagattaaatccttgacataagatctcatttgcagaaagcagattaaagaccatcagaaggaaattatttaggttgtaatgcacaggcaactgtgagaaactgttgtgccaaaaatagaattccttctagtttttcttgttctcatttgaaaggagaaaattccactttgtttagcatttcaagcttttatgtatccatcccatctaaaaactcttcaaactccacttgttcagtctgaaatgcagctccctgtccaagtgccttggagaactcacagcagcacgccttaatcaaaggttttaccagcccttggacactatgggaggagggcaagagtacaccaatttgttaaaagcaagaaaccacagtgtctcttcactagtcatttagaacatggttatcatccaagactactctaccctgcaacattgaactcccaagagcaaatccacattcctcttgagttctgcagcttctgtgtaaatagggcagctgtcgtctatgccgtagaatcacatgatctgaggaccattcatggaagctgctaaatagcctagtctggggagtcttccataaagttttgcatggagcaaacaaacaggattaaactaggtttggttccttcagccctctaaaagcatagggcttagcctgcaggcttccttgggctttctctgtgtgtgtagttttgtaaacactatagcatctgttaagatccagtgtccatggaaacattcccacatgccgtgactctggactatatcagtttttggaaagcagggttcctctgcctgctaacaagcccacgtggaccagtctgaatgtctttcctttacacctatgtttttaagtagtcaaacttcaagaaacaatctaaacaagtttctgttgcatatgtgtttgtgaacttgtatttgtatttagtaggcttctatattgcatttaacttgtttttgtaactcctgattcttccttttcggatactattgatgaataaagaaattaaagtga

SEQ ID NO: 361427 - DNA, 3845 bp, Homo sapiens
ggaggagaatggggaggagctgggggggcaggcaggcggggaaggagaggtcttaaggggcggcgaggggaggtcgcatttcctccgaggctggcgatcggcggagctcccacctccgcttacagctcgctgccgccgtcctgccccgcgcccccaggagacctggaccagaccacgatgtggaaacgctggctcgcgctcgcgctcgcgctggtggcggtcgcctgggtccgcgccgaggaagagctaaggagcaaatccaagatctgtgccaatgtgttttgtggagccggccgggaatgtgcagtcacagagaaaggggaacccacctgtctctgcattgagcaatgcaaacctcacaagaggcctgtgtgtggcagtaatggcaagacctacctcaaccactgtgaactgcatcgagatgcctgcctcactggatccaaaatccaggttgattacgatggacactgcaaagagaagaaatccgtaagtccatctgccagcccagttgtttgctatcagtccaaccgtgatgagctccgacgtcgcatcatccagtggctggaagctgagatcattccagatggctggttctctaaaggcagcaactacagtgaaatcctagacaagtattttaagaactttgataatggtgattctcgcctggactccagtgaattcctgaagtttgtggaacagaatgaaactgccatcaatattacaacgtatccagaccaggagaacaacaagttgcttaggggactctgtgttgatgctctcattgaactgtctgatgaaaatgctgattggaaactcagcttccaagagtttctcaagtgcctcaacccatctttcaaccctcctgagaagaagtgtgccctggaggatgaaacgtatgcagatggagctgagaccgaggtggactgtaaccgctgtgtctgtgcctgtggaaattgggtctgtacagccatgacctgtgacggaaagaatcagaagggggcccagacccagacagaggaggagatgaccagatatgtccaggagctccaaaagcatcaggaaacagctgaaaagaccaagagagtgagcaccaaagagatctaatgaggaggcacagaccagtgtctggatcccagcatcttctccacttcagcgctgagttcagtatacacaagtgtctgctacagtcgccaaatcaccagtatttgcttatatagcaatgagttttattttgtttatttgttttgcaataaaggatatgaaggtggctggctaggaagggaagggccacagccttcatttctaggagtgctttaagagaaactgtaaatggtgctctggggctggaggctagtaaggaaactgcatcacgattgaaagaggaacagacccaaatctgaacctcttttgagtttactgcatctgtcagcaggctgcagggagtgcacacgatgccagagagaacttagcagggtgtccccggaggagaggtttgggaagctccacggagaggaacgctctctgcttccagcctctttccattgccgtcagcatgacagacctccagcatccacgcatctcttggtcccaataactgcctctagatacatagccatactgctagttaacccagtgtccctcagacttggatggagtttctgggagggtacacccaaatgatgcagatacttgtatactttgagccccttagcgacctaaccaaattttaaaaatactttttaccaaaggtgctatttctctgtaaaacacttttttttggcaagttgactttattcttcaattattatcattatattattgttttttaatattttattttcttgactaggtattaagcttttgtaattatttttcagtagtcccaccacttcataggtggaaggagtttggggttcttcctggtgcaggggctgaaataacccagatgcccccaccctgccacatactagatgcagcccatagttggcccccctagcttccagcagtccactatctgccagaggagcaagggtgccttagaccgaagccaggggaagaagcatcttcataaaaaactttcaagatccaaacattaatttgtttttatttattctgagaagttgaggcaaatcagtattcccaaggatggcgacaagggcagccaagcagggcttaggatatcccagcctaccaatatgctcattcgactaactaggagggtgagttggccctgtctcttcttttttctggacctcagtttcctcagtgagctggtaagaatgcactaaccttttgatttgataagttataaattctgtggttctgatcattggtccagaggggagataggttcctgtgatttttccttcttctctatagaataaatgaaatcttgttactagaacaagaaatgtcagatggccaaaaacaagatgaccagatttgatctcagcctgatgaccctacaggtcgtgctatgatatggagtcctcatgggtaaagcaggaagagagtgggaaagagaaccaccccactctgtcttcatatttgcatttcatgtttaacctccggctggaaatagaaagcattcccttagagatgaggataaaagaaagtttcagattcaacagggggaagaaaatggagatttaatcctaaaactgtgacttggggaggtcagtcatttacagttagtcctgtgtctttcgacttctgtgattattaaccccactcactaccctgtttcagatgcatttggaataccaaagattaaatccttgacataagatctcatttgcagaaagcagattaaagaccatcagaaggaaattatttaggttgtaatgcacaggcaactgtgagaaactgttgtgccaaaaatagaattccttctagtttttcttgttctcatttgaaaggagaaaattccactttgtttagcatttcaagcttttatgtatccatcccatctaaaaactcttcaaactccacttgttcagtctgaaatgcagctccctgtccaagtgccttggagaactcacagcagcacgccttaatcaaaggttttaccagcccttggacactatgggaggagggcaagagtacaccaatttgttaaaagcaagaaaccacagtgtctcttcactagtcatttagaacatggttatcatccaagactactctaccctgcaacattgaactcccaagagcaaatccacattcctcttgagttctgcagcttctgtgtaaatagggcagctgtcgtctatgccgtagaatcacatgatctgaggaccattcatggaagctgctaaatagcctagtctggggagtcttccataaagttttgcatggagcaaacaaacaggattaaactaggtttggttccttcagccctctaaaagcatagggcttagcctgcaggcttccttgggctttctctgtgtgtgtagttttgtaaacactatagcatctgttaagatccagtgtccatggaaacattcccacatgccgtgactctggactatatcagtttttggaaagcagggttcctctgcctgctaacaagcccacgtggaccagtctgaatgtctttcctttacacctatgtttttaagtagtcaaacttcaagaaacaatctaaacaagtttctgttgcatatgtgtttgtgaacttgtatttgtatttagtaggcttctatattgcatttaacttgtttttgtaactcctgattcttccttttcggatactattgatgaataaagaaattaaagtgatagttttattggtttcctttcccccaattaaggccaaataaagtcgtgagaacattacccatttactt

SEQ ID NO: 361428 - DNA, 1995 bp, Homo sapiens
ggaggagaatggggaggagctgggggggcaggcaggcggggaaggagaggtcttaaggggcggcgaggggaggtcgcatttcctccgaggctggcgatcggcggagctcccacctccgcttacagctcgctgccgccgtcctgccccgcgcccccaggagacctggaccagaccacgatgtggaaacgctggctcgcgctcgcgctcgcgctggtggcggtcgcctgggtccgcgccgaggaagagctaaggagcaaatccaagatctgtgccaatgtgttttgtggagccggccgggaatgtgcagtcacagagaaaggggaacccacctgtctctgcattgagcaatgcaaacctcacaagaggcctgtgtgtggcagtaatggcaagacctacctcaaccactgtgaactgcatcgagatgcctgcctcactggatccaaaatccaggttgattacgatggacactgcaaagagaagaaatccgtaagtccatctgccagcccagttgtttgctatcagtccaaccgtgatgagctccgacgtcgcatcatccagtggctggaagctgagatcattccagatggctggttctctaaaggcagcaactacagtgaaatcctagacaagtattttaagaactttgataatggtgattctcgcctggactccagtgaattcctgaagtttgtggaacagaatgaaactgccatcaatattacaacgtatccagaccaggagaaccaccccactctgtcttcatatttgcatttcatgtttaacctccggctggaaatagaaagcattcccttagagatgaggataaaagaaagtttcagattcaacagggggaagaaaatggagatttaatcctaaaactgtgacttggggaggtcagtcatttacagttagtcctgtgtctttcgacttctgtgattattaaccccactcactaccctgtttcagatgcatttggaataccaaagattaaatccttgacataagatctcatttgcagaaagcagattaaagaccatcagaaggaaattatttaggttgtaatgcacaggcaactgtgagaaactgttgtgccaaaaatagaattccttctagtttttcttgttctcatttgaaaggagaaaattccactttgtttagcatttcaagcttttatgtatccatcccatctaaaaactcttcaaactccacttgttcagtctgaaatgcagctccctgtccaagtgccttggagaactcacagcagcacgccttaatcaaaggttttaccagcccttggacactatgggaggagggcaagagtacaccaatttgttaaaagcaagaaaccacagtgtctcttcactagtcatttagaacatggttatcatccaagactactctaccctgcaacattgaactcccaagagcaaatccacattcctcttgagttctgcagcttctgtgtaaatagggcagctgtcgtctatgccgtagaatcacatgatctgaggaccattcatggaagctgctaaatagcctagtctggggagtcttccataaagttttgcatggagcaaacaaacaggattaaactaggtttggttccttcagccctctaaaagcatagggcttagcctgcaggcttccttgggctttctctgtgtgtgtagttttgtaaacactatagcatctgttaagatccagtgtccatggaaacattcccacatgccgtgactctggactatatcagtttttggaaagcagggttcctctgcctgctaacaagcccacgtggaccagtctgaatgtctttcctttacacctatgtttttaagtagtcaaacttcaagaaacaatctaaacaagtttctgttgcatatgtgtttgtgaacttgtatttgtatttagtaggcttctatattgcatttaacttgtttttgtaactcctgattcttccttttcggatactattgatgaataaagaaattaaagtga

SEQ ID NO: 361429 - DNA, 1433 bp, Homo sapiens
  misc_feature (25)..(25): n is a, c, g, or t
aaaaaaaaaaaaaaaaaaatacagngaaatcctagacaagtattttaagaactttgataatggtgattctcgcctggactccagtgaattcctgaagtttgtggaacagaatgaaactgccatcaatattacaacgtatccagaccaggagaacaacaagttgcttaggggactctgtgttgatgctctcattgaactgtctgatgaaaatgctgattggaaactcagcttccaagagtttctcaagtgcctcaacccatctttcaaccctcctgagaagaagtgtgccctggaggatgaaacgtatgcagatggagctgagaccgaggtggactgtaaccgctgtgtctgtgcctgtggaaattgggtctgtacagccatgacctgtgacggaaagaatcagaagggggcccagacccagacagaggaggagatgacataagatctcatttgcagaaagcagattaaagaccatcagaaggaaattatttaggttgtaatgcacaggcaactgtgagaaactgttgtgccaaaaatagaattccttctagtttttcttgttctcatttgaaaggagaaaattccactttgtttagcatttcaagcttttatgtatccatcccatctaaaaactcttcaaactccacttgttcagtctgaaatgcagctccctgtccaagtgccttggagaactcacagcagcacgccttaatcaaaggttttaccagcccttggacactatgggaggagggcaagagtacaccaatttgttaaaagcaagaaaccacagtgtctcttcactagtcatttagaacatggttatcatccaagactactctaccctgcaacattgaactcccaagagcaaatccacattcctcttgagttctgcagcttctgtgtaaatagggcagctgtcgtctatgccgtagaatcacatgatctgaggaccattcatggaagctgctaaatagcctagtctggggagtcttccataaagttttgcatggagcaaacaaacaggattaaactaggtttggttccttcagccctctaaaagcatagggcttagcctgcaggcttccttgggctttctctgtgtgtgtagttttgtaaacactatagcatctgttaagatccagtgtccatggaaacattcccacatgccgtgactctggactatatcagtttttggaaagcagggttcctctgcctgctaacaagcccacgtggaccagtctgaatgtctttcctttacacctatgtttttaagtagtcaaacttcaagaaacaatctaaacaagtttctgttgcatatgtgtttgtgaacttgtatttgtatttagtaggcttctatattgcatttaacttgtttttgtaactcctgattcttccttttcggatactattgatgaataaagaaattaaagtga

SEQ ID NO: 361430 - DNA, 2659 bp, Homo sapiens
ggaggagaatggggaggagctgggggggcaggcaggcggggaaggagaggtcttaaggggcggcgaggggaggtcgcatttcctccgaggctggcgatcggcggagctcccacctccgcttacagctcgctgccgccgtcctgccccgcgcccccaggagacctggaccagaccacgatgtggaaacgctggctcgcgctcgcgctcgcgctggtggcggtcgcctgggtccgcgccgaggaagagctaaggagcaaatccaagatctgtgccaatgtgttttgtggagccggccgggaatgtgcagtcacagagaaaggggaacccacctgtctctgcattgagcaatgcaaacctcacaagaggcctgtgtgtggcagtaatggcaagacctacctcaaccactgtgaactgcatcgagatgcctgcctcactggatccaaaatccaggttgattacgatggacactgcaaagagaagaaatccgtaagtccatctgccagcccagttgtttgctatcagtccaaccgtgatgagctccgacgtcgcatcatccagtggctggaagctgagatcattccagatggctggttctctaaaggcagcaactacagtgaaatcctagacaagtattttaagaactttgataatggtgattctcgcctggactccagtgaattcctgaagtttgtggaacagaatgaaactgccatcaatattacaacgtatccagaccaggagaacaacaagttgcttaggggactctgtgttgatgctctcattgaactgtctgatgaaaatgctgattggaaactcagcttccaagagtttctcaagtgcctcaacccatctttcaaccctcctgagaagaagtgtgccctggaggatgaaacgtatgcagatggagctgagaccgaggtggactgtaaccgctgtgtctgtgcctgtggaaattgggtctgtacagccatgacctgtgacggaaagaatcagaagggggcccagacccagacagaggaggagatgaccagatatgtccaggagctccaaaagcatcaggaaacagctgaaaagaccaagagagtgagcaccaaagagatctaatgaggaggcacagaccagtgtctggatcccagcatcttctccacttcagcgctgagttcagtatacacaagtgtctgctacagtcgccaaatcaccagtatttgcttatatagcaatgagttttattttgtttatttgttttgcaataaaggatatgaaggtggctggctaggaagggaagggccacagccttcatttctaggagtgctttaagagaaactgtaaatggtgctctggggctggaggctagtaaggaaactgcatcacgattgaaagaggaacagacccaaatctgaacctcttttgagtttactgcatctgtcagcaggctgcagggagtgcacacgatgccagagagaacttagcagggtgtccccggaggagaggtttgggaagctccacggagaggaacgctctctgcttccagcctctttccattgccgtcagcatgacagacctccagcatccacgcatctcttggtcccaataactgcctctagatacatagccatactgctagttaacccagtgtccctcagacttggatggagtttctgggagggtacacccaaatgatgcagatacttgtatactttgagccccttagcgacctaaccaaattttaaaaatactttttaccaaaggtgctatttctctgtaaaacacttttttttggcaagttgactttattcttcaattattatcattatattattgttttttaatattttattttcttgactaggtattaagcttttgtaattatttttcagtagtcccaccacttcataggtggaaggagtttggggttcttcctggtgcaggggctgaaataacccagatgcccccaccctgccacatactagatgcagcccatagttggcccccctagcttccagcagtccactatctgccagaggagcaagggtgccttagaccgaagccaggggaagaagcatcttcataaaaaactttcaagatccaaacattaatttgtttttatttattctgagaagttgaggcaaatcagtattcccaaggatggcgacaagggcagccaagcagggcttaggatatcccagcctaccaatatgctcattcgactaactaggagggtgagttggccctgtctcttcttttttctggacctcagtttcctcagtgagctggtaagaatgcactaaccttttgatttgataagttataaattctgtggttctgatcattggtccagaggggagataggttcctgtgatttttccttcttctctatagaataaatgaaatcttgttactagaacaagaaatgtcagatggccaaaaacaagatgaccagatttgatctcagcctgatgaccctacaggtcgtgctatgatatggagtcctcatgggtaaagcaggaagagagtgggaaagagaaccaccccactctgtcttcatatttgcatttcatgtttaacctccggctggaaatagaaagcattcccttagagatgagcatgaaatgcaaatgtcgaccggccgcgaatttagtagtagtagacccggaattcc

SEQ ID NO: 361431 - DNA, 1668 bp, Homo sapiens
ggaggagaatggggaggagctgggggggcaggcaggcggggaaggagaggtcttaaggggcggcgaggggaggtcgcatttcctccgaggctggcgatcggcggagctcccacctccgcttacagctcgctgccgccgtcctgccccgcgcccccaggagacctggaccagaccacgatgtggaaacgctggctcgcgctcgcgctcgcgctggtggcggtcgcctgggtccgcgccgaggaagagctaaggagcaaatccaagatctgtgccaatgtgttttgtggagccggccgggaatgtgcagtcacagagaaaggggaacccacctgtctctgcattgagcaatgcaaacctcacaagaggcctgtgtgtggcagtaatggcaagacctacctcaaccactgtgaactgcatcgagatgcctgcctcactggatccaaaatccaggttgattacgatggacactgcaaagagaagaaatccgtaagtccatctgccagcccagttgtttgctatcagtccaaccgtgatgagctccgacgtcgcatcatccagtggctggaagctgagatcattccagatggctggttctctaaaggcagcaactacagtgaaatcctagacaagtattttaagaactttgataatggtgattctcgcctggactccagtgaattcctgaagtttgtggaacagaatgaaactgccatcaatattacaacgtatccagaccaggagaacaacaagttgcttaggggactctgtgttgatgctctcattgaactgtctgatgaaaatgctgattggaaactcagcttccaagagtttctcaagtgcctcaacccatctttcaaccctcctgagaagaagtgtgccctggaggatgaaacgtatgcagatggagctgagaccgaggtggactgtaaccgctgtgtctgtgcctgtggaaattgggtctgtacagccatgacctgtgacggaaagaatcagaagggggcccagacccagacagaggaggagatgaccagatatgtccaggagctccaaaagcatcaggaaacagctgaaaagaccaagagagtgagcaccaaagagatctaatgaggaggcacagaccagtgtctggatcccagcatcttctccacttcagcgctgagttcagtatacacaagtgtctgctacagtcgccaaatcaccagtatttgcttatatagcaatgagttttattttgtttatttgttttgcaataaaggatatgaaggtggctggctaggaagggaagggccacagccttcatttctaggagtgctttaagagaaactgtaaatggtgctctggggctggaggctagtaaggaaactgcatcacgattgaaagaggaacagacccaaatctgaacctcttttgagtttactgcatctgtcagcaggctgcagggagtgcacacgatgccagagagaacttagcagggtgtccccggaggagaggtttgggaagctccacggagaggaacgctctctgcttccagcctctttccattgccgtcagcatgacagacctccagcatccacgcatctcttggtcccaataactgcctctagatacatagccatactgctagttaacccagtgtccctcagactctatgacatcatcttacagaat

SEQ ID NO: 361432 - DNA, 1339 bp, Homo sapiens
  misc_feature (1183)..(1183): n is a, c, g, or t
ggaggagaatggggaggagctgggggggcaggcaggcggggaaggagaggtcttaaggggcggcgaggggaggtcgcatttcctccgaggctggcgatcggcggagctcccacctccgcttacagctcgctgccgccgtcctgccccgcgcccccaggagacctggaccagaccacgatgtggaaacgctggctcgcgctcgcgctcgcgctggtggcggtcgcctgggtccgcgccgaggaagagctaaggagcaaatccaagatctgtgccaatgtgttttgtggagccggccgggaatgtgcagtcacagagaaaggggaacccacctgtctctgcattgagcaatgcaaacctcacaagaggcctgtgtgtggcagtaatggcaagacctacctcaaccactgtgaactgcatcgagatgcctgcctcactggatccaaaatccaggttgattacgatggacactgcaaagagaagaaatccgtaagtccatctgccagcccagttgtttgctatcagtccaaccgtgatgagctccgacgtcgcatcatccagtggctggaagctgagatcattccagatggctggttctctaaaggcagcaactacagtgaaatcctagacaagtattttaagaactttgataatggtgattctcgcctggactccagtgaattcctgaagtttgtggaacagaatgaaactgccatcaatattacaacgtatccagaccaggagaacaacaagttgcttaggggactctgtgttgatgctctcattgaactgtctgatgaaaatgctgattggaaactcagcttccaagagtttctcaagtgcctcaacccatctttcaaccctcctgagaagaagtgtgccctggaggatgaaacgtatgcagatggagctgagaccgaggtggactgtaaccgctgtgtctgtgcctgtggaaattgggtctgtacagccatgacctgtgacggaaagaatcagaagggggcccagacccagacagaggaggagatgaccagatatgtccaggagctccaaaagcatcagaaactcacaaaaaggagaactgaaaatttagacatacagttggccattgtaaaaaacatcagtttcctctcatacattccaagtaaaccaagtaaaataagtgttggagtaacacttgcataanagaatttaaggagtgatagctctttctgttctgccattcccaacattcctgggggaaaggagactcaatgagttaatactatttcacttggagccccaagatggaaactttggttttgaccttaaaacatcttgattaattataggcttagcttga

SEQ ID NO: 361433 - DNA, 649 bp, Homo sapiens
ggaggagaatggggaggagctgggggggcaggcaggcggggaaggagaggtcttaaggggcggcgaggggaggtcgcatttcctccgaggctggcgatcggcggagctcccacctccgcttacagctcgctgccgccgtcctgccccgcgcccccaggagacctggaccagaccacgatgtggaaacgctggctcgcgctcgcgctcgcgctggtggcggtcgcctgggtccgcgccgaggaagagattgaagtactcatggagcatctcctgtgcagaggcagtaggatgggaagccagcataggttctccctaaaggtagagtgagtgaatggaaataactgggaagaaaacagaaagaaaaggcaaaaaaagagtgagtggaatataaacagtacggcatgtggcacctgaacagtcttcatgcccaggaatcccaaatgctgtttactctacagaaaggaatcacttgattttccacttcagaagccaaccgctcaacaacactggggaagaaatgaagaatcctgggtctccttgtagtcgatcaagaaattttggggggaaaaagggaagacaacccctaattcagagtgtgcagtttgggatttattgaacttacttgaaaaacaaaagcaaacaaaactta

SEQ ID NO: 361434 - DNA, 588 bp, Homo sapiens
cccagcattgataccaacagcagacactattcgtgcttcttttttcaatctgaaaggaccaagattgttattatttttaaatccctctctcctttctttgtcctggcccttcttagggccacctcacctacctccttccaatgtggtaccagtaaaatatagatctccagataaatttgagtttcagatgaacaatgagtaaaatttttggtataagtatgtctcaaacattgcttgggacatactaaaaattattcactgattatttaaattcaggtttaactggtgtcgtgtattttatttgctcaacctggcaagcttcctccccgacaacctcctgcccccagaccctgctcccacccccatgccactcttgccattctctaatgttgagaaatcacaagaataaaattaaaacccttaaggaaaccaaccagttgccttataaacaaaagaagacaaaaaatccctttgctaatcaggaactcccatgactaggtattcaaaactttagacttcaagaagagggagaaataagttctcactgggtcccttctaacagctgaaattaccattaacattattttg

SEQ ID NO: 361435 - DNA, 458 bp, Homo sapiens
actctccaaattcccattctttgcctcataaatgattagctgaactcttttgtccccactggacaaaatgggaacaaaatcaaaatctttggttcatattctctgcttcccccaaggctcctaagtattggcccaccctcaacctgagccagcaggcagtcctgctacttctggaaacagactgggctaggtgcagtggctcacacctgtgatccccttagtttgggaagccgagcctggaggatttcttgagcccaggaattcaagaccagcctgggcaacaaagtgagactccatctctacaaaaaatttaaaaattagccagatgtagtagtgcatgcctgtagacccaactagtcaggaggctgaggtaggagaatcacttgagcccaggaggttgaggctgcagtgagccatattcatgccactgcactccagccttgctgacagagtgagac

SEQ ID NO: 361436 - DNA, 1203 bp, Homo sapiens
cacctcttgaaatacacaaaactcttctagtttcctggttgaccgacccagggcttgacgactccttttgagccacctgacaattcagtccagcacagcaactgaaggaaggcgttccccaacctgctgtcctatgaaggcctctaggtcaccggtgctaaagccctcctttctccaccctccttaagtggaggtaaacgtcccagcaggaagtcaaggctggattggcgctcttcgcgagcaccctgggaacgggagtctgggtcacgggtgctagagccctcccctctcctcccggccggtgtatgggaaattgtccccgcagaaagtaaaggctggccaggccgcccccagcacgtagagggaatgagtcaggctccggctccacactggcacgtagtgggcggatcgcgccggcgctgagtaggaaggagcttcagccgccagcccggaacgcatcataggttagcttttcaagacacttcctgcatctctgacctgttgcacctctgttatcttggcacctctgttatcttagcagcaagcacctgcctcagctgacccttgagccataacccatagggcttattccaaagggccagtgtgcaaaatatgaatccaagatggcattgtggaaagacgctgtacctcctgtgataaaattactttggtggtgcttttttctcatgtatctcgggaaactaaaaatctgaattgtattcagtggccttttccaaatgaagctcctgaaaagtacatcaagtctaaagtgaaccagctaactcattaagactggaatcatgagcaacaatggagcagacctaacctttggttacatctcctgttttgtagctatccttttgtttggctcaaattttgtgccacttaaaaaatttgatactggtgatggaatgtttctccagtgggttctttgtgctgccatatggttggttgccttggttgtcaatctgatattacattgtccaaagttttggccttttgcaatgcttgggggctgcatttgggcaacagggaacattgctgttgtcccaattatcaaaaccattggtttaggccttggaatcttaatctggggatccattaggcctactggtggcagacccaggttggtgtggcttgctgccacaattccacccggaaaacatgaggattaaaaacagctccatatggccaaagaaccaa

SEQ ID NO: 361437 - DNA, 1094 bp, Homo sapiens
cacctcttgaaatacacaaaactcttctagtttcctggttgaccgacccagggcttgacgactccttttgagccacctgacaattcagtccagcacagcaactgaaggaaggcgttccccaacctgctgtcctatgaaggcctctaggtcaccggtgctaaagccctcctttctccaccctccttaagtggaggtaaacgtcccagcaggaagtcaaggctggattggcgctcttcgcgagcaccctgggaacgggagtctgggtcacgggtgctagagccctcccctctcctcccggccggtgtatgggaaattgtccccgcagaaagtaaaggctggccaggccgcccccagcacgtagagggaatgagtcaggctccggctccacactggcacgtagtgggcggatcgcgccggcgctgagtaggaaggagcttcagccgccagcccggaacgcatcataggttagcttttcaagacacttcctgcatctctgacctgttgcacctctgttatcttggcacctctgttatcttagcagcaagcacctgcctcagctgacccttgagccataacccataagctcctgaaaagtacatcaagtctaaagtgaaccagctaactcattaagactggaatcatgagcaacaatggagcagacctaacctttggttacatctcctgttttgtagctatccttttgtttggctcaaattttgtgccacttaaaaaatttgatactggtgatggtaattatttttccttgattgttaacgttatattatttttaaaaatgaagttccttttttggtcttttaaaagtatagctacaaaaataaatcatgttgatcttgatacctagtgaatagagcttaaaattagtcatttgacagtgctcataccagtttgtctgaaagtcagaataggagaaccattaaggttgtttcatggtaaagttagggagggtacagtcaggaaatctcttgggccattatatgaatggaagaaatttatagtcagttctactataacacctgttttgaaaacatgaatcttcaacatgattgatatattagagaacaatgtaagcataa

SEQ ID NO: 361438 - DNA, 795 bp, Homo sapiens
agttgaagttagaataaaaactaattctatttataaatgtattttctatatggaaataacatgtttcttctgtatattacatctacagggaacattgctgttgtcccaattatcaaaaccattggtttaggccttggaatcttaatctggggatcatttaatgccttaactggctgggcaagctcaaggtaattcaagtcaaactagttcaactaagatttcctgcatccatattctatgtaaagcaagtgattaccgagaggaataacatatgattcttattctcacagagtttatagctggtaaaacatacacatcatatatgccaccttctattgctatttgccctaaattcttaataagtgatctagatatttgatcaagatatagtgtagcattaaatctgggaaacagaggtagagagagaaaaaggaaactgatgtttattgtccctttctattgtgtgacaatttgctggacatgttctatgcatcattctcatctcactttcacaaatacgtgaggtaagcactatcttataagagagtagataaaaagagattaagtaacttactgtaggtcacagaactaagaagctaggattcaaacccaggtcttctagttccagagcacatattctttcctctagagcagggttggcaaagcacggtctggtttcccagccatttctataaataacgttttatcagaacacagccaaacccatccatttaaggattgtctatggctatttttatgttacagtggcagagttgagcagcaagggaataactg

SEQ ID NO: 361439 - DNA, 615 bp, Homo sapiens
ccaagaatccctccataatacagagcatgtgatcaacacaacccaagacccctgttcctgggtggataaactttctacagtacaccaccgcatagtgtaaggagaggttacttctttgctctattactctgtttcatatttggttaaagcagggattaccagcatgaagtaatgttcatctgagttcaagaagaaaattgtaatgcaagctttgacttctatctccatgcggcgaggtttttttgtccccagctgaattttaggtacagatgcccttgagctcaactgctttgagtaattactaaatcattgcatttatctccaaatgataagtagataataaaagcaacctaattttgcatgacttgtgtagctaaagtaaaagaggtagtaacgtgaccaacctgctctcagcagtcatagtcagattaggcaataaacttgtctagcactgcaccacccaggatgcccaccctgctctgggaatccccacactcctgtgtttagacagttatataattccagacattcattgtcaaatatagtggaacattctgtgtccgtgtgggtcctactccctctatctccgtggttgttctgttttttggacttcca

SEQ ID NO: 361440 - DNA, 428 bp, Homo sapiens
agcagtcctgtggtgaggcccatgtcaagaaggcctgagatctcccaccatcagctacagccaatttgtcagtcacgtgagtaaaccacctgggacgtgaatcctctcgacttaaccacctcttcaggtggccagagccctagcccaggtctgactgcaacctgatgagaaaccctgagtaggaagacctgcttgagctgctcccaaattattgatccacacacacacacacacacacagagtctctagtcttcctagctccttaatttttttttccttagcacatatcactatttcatataccatatttgtcatctattttctggtttccctttctcagatgtaagctaagttggtgcaggggtttttgtctgttcccaatgtctagaagagtgtctgatttacagtagacactccatgaaatttgt

SEQ ID NO: 361441 - DNA, 4426 bp, Homo sapiens
cacctcttgaaatacacaaaactcttctagtttcctggttgaccgacccagggcttgacgactccttttgagccacctgacaattcagtccagcacagcaactgaaggaaggcgttccccaacctgctgtcctatgaaggcctctaggtcaccggtgctaaagccctcctttctccaccctccttaagtggaggtaaacgtcccagcaggaagtcaaggctggattggcgctcttcgcgagcaccctgggaacgggagtctgggtcacgggtgctagagccctcccctctcctcccggccggtgtatgggaaattgtccccgcagaaagtaaaggctggccaggccgcccccagcacgtagagggaatgagtcaggctccggctccacactggcacgtagtgggcggatcgcgccggcgctgagtaggaaggagcttcagccgccagcccggaacgcagtgagtacagccactcaaaggaaagccaagtcgctttgcaggggagcgtctcatgatttttcagaaacgtgctcatggttaaaaagaaaaatcaaggctcggaataaatacattcaagcactgttaattttagcccaaagacaggcggtacttgcctggagatttgggaaaatcaacatgaaactaaaaatgaaattttagttggagtggagcaagcagtattgatcagaacataccaaatacgaattttttcaaagtctgcgtagaagtttaaattactaggaaaaatgtaaaggagaagtatttactaataaatgaaacaaaagtaataaaataaaaatgaattaatatagtttgacaaaatatcagcgaacgctgaaaagaaaacattaaaataatgtttgagactttttaggttttgtgcaggaagaattgggaaaaatgtgctggatggagtgatactgcttttcttttccacaaaaatttcattattttagagagcggtagagcctttttaaagacagtaagttattgccaattcacaatgaaataagatcacatgctctgaaatgtacaagagctgcatgcaataaacttcatttatctataggtaataactgattgatgtttattcagtagtcgaaatgcacctcatgcactctaattagcacgtcaaattagtctctccgtttcagaggtgtagggcctttgtggagccttctcaataaaataatttgccactcttgaaggttagacattctcttctatcaatgtacacataaaggttttgttttgctttgcttgttgtgaattaaaatggggagaaaatgatgtgttagctattacccagtcatgtgtctttttagtcataggttagcttttcaagacacttcctgcatctctgacctgttgcacctctgttatcttggcacctctgttatcttagcagcaagcacctgcctcagctgacccttgagccataacccataagctcctgaaaagtacatcaagtctaaagtgaaccagctaactcattaagactggaatcatgagcaacaatggagcagacctaacctttggttacatctcctgttttgtagctatccttttgtttggctcaaattttgtgccacttaaaaaatttgatactggtgatggaatgtttctccagtgggttctttgtgctgccatatggttggttgccttggttgtcaatctgatattacattgtccaaagttttggccttttgcaatgcttgggggctgcatttgggcaacagggaacattgctgttgtcccaattatcaaaaccattggtttaggccttggaatcttaatctggggatcatttaatgccttaactggctgggcaagctcaaggtttggctggtttggattggatgcagaagaagtatcaaatccgctgctaaattacattggagctgggctatcagtagtaagtgctttcatattttgttcatcaaaagtgaaataccaaataacacgtgttccatggataccactccattaataacagagcatgtgagtgatcaacacaacccaagacccctgttcctgggtggataaactttctacagtacaccaccgcatagtgggctgcagtcttgcagtgatatctggagtactctatggatctacatttgtgccaatcatctacatcaaggaccacagcaaaagaaatgatagtatatatgcaggggcaagccaatatgatttagactatgtgtttgcgcacttcagtggcatctttcttacaagtactgtctactttctggcctactgcatagccatgaaaaatagtcctaaactatatcctgaagcagtcctaccaggattcctgtcaggagtactttgggctatagctacctgctgttggttcatagcaaatcactctctgagtgctgtggtcagttttccaataatcactgctggtccaggatttatagctgcaatgtggggtatcttcatgtttaaggaaataaagggtctacaaaactacctattaatgatacttgcattttgcatcatcttgactggagccttatgcactgctttttctaaaatctaacaatgacaaaaccagcaggtggcagcagtagttaagagaacgcgtctatcggacagcggagagatcatgctgagaaaagagtgcattttcatatagcaaatggatctcagccactgttggagtgggtaaatgatttttttccccaaaaatgtgagaatgaaggaagattgagtttcattcaagtataaaaatgaaaatttcttctgatgaactgtttatgaaggtagtactttactgggtgactaaaatgtctacattattatagcattacatacgaggatgctctttttaccacagtatgtacctagtgttgcataatctagaacacagtatagagtccatatacaaagaagttacagcccatatttctcacctattaccccagtgaagtgaggcagaaataccttgggcgaggagggagagccttaccttctaatggaattagattccaaagatatttggatcctttgtttcataaagtaaatgcatagttggtaactaaatgttaaaaaggccattttattattgttagccaaaacttctgtttatttcaagttaatatcgcccaactctacatcatctacccattttagctcataatgcttttgattatcgccagataaagtccattctcagagaacaaaaatttttcatcattgagaaaatgtgcataacataatacatacatacacaagtatattcacgtacataaatacacacagatatgttgctaaagtgagattgtaggttatcagtaacaatttaaaggaaacaaccactcttttgaatgtacaatttttttttctgaaatacacttttctaaaaccctcttaactggaggtttcctgttttcttcttgttttaactggtggtttccagtaggcaaaataaaatgacaggcatgctagttttttttttgttttttttttttaagaaaactgaaattaagccaggcagggtggcgcactactataatcccagctgctggggcggctgaagtaggagggtcacttagcccaagagtgcaaatctgccagcctaggcaacatagcaaggtcccatctctaaaaaagaaatttaatttaaatttgtaagaaaaaagaaaactgaaacagaactgccagtacaatgtttgttgcaattgtttccaaaactttgaaataacgaaacccctattcaaatgtaaattttacccattcccacctgatagtactgtttattactttgctatgcaggagaaacaaaacagctttttatttgtgtgtatactctgaagtcaatgtgcatgggttaaatcccacctctgcttcattttatttgtgtggctttggacaagttcctaagccctctgtgtcaggcccctcattaacaaaatggagtttatgatggcatctacctcacatggttattgtgtggttgaaattagttcaaatctgtaaagtatgttgatgagtatctggtacttggcaaacactatataattgttagctttattattatgtgttgtttgaaggggaaaaaagtttttgtagattggagaacaccatgtaagagctactaagctcaccaccttcccatccaattattactcctctaaatgaatactacttaaaagtgatggagcttctgtttgtttattgaattgctaatacaaataaatatttgactataacttcttatactcattttaattttaacctgaaatgtcattaaattatgctgataaactttgaataaattgtgatacaaaagctatttttctcatttaaatatattttagaattttatattggataacttttaattattctttagttgggatttccaatttatatgcaaaattttaaatgtgaagtaaagcagtttcagaagaaaaatg

SEQ ID NO: 361442 - DNA, 3244 bp, Homo sapiens
agcagtcctgtggtgaggcccatgtcaagaaggcctgagatctcccaccatcagctacagccaatttgtcagtcacagatcctcaaaatgagcagcagatacactcagtctgtaggatcatttagcaactcggggaaggaggtcataggttagcttttcaagacacttcctgcatctctgacctgttgcacctctgttatcttggcacctctgttatcttagcagcaagcacctgcctcagctgacccttgagccataacccataagctcctgaaaagtacatcaagtctaaagtgaaccagctaactcattaagactggaatcatgagcaacaatggagcagacctaacctttggttacatctcctgttttgtagctatccttttgtttggctcaaattttgtgccacttaaaaaatttgatactggtgatggaatgtttctccagtgggttctttgtgctgccatatggttggttgccttggttgtcaatctgatattacattgtccaaagttttggccttttgcaatgcttgggggctgcatttgggcaacagggaacattgctgttgtcccaattatcaaaaccattggtttaggccttggaatcttaatctggggatcatttaatgccttaactggctgggcaagctcaaggtttggctggtttggattggatgcagaagaagtatcaaatccgctgctaaattacattggagctgggctatcagtagtaagtgctttcatattttgttcatcaaaagtgaaataccaaataacacgtgttccatggataccactccattaataacagagcatgtgagtgatcaacacaacccaagacccctgttcctgggtggataaactttctacagtacaccaccgcatagtgggctgcagtcttgcagtgatatctggagtactctatggatctacatttgtgccaatcatctacatcaaggaccacagcaaaagaaatgatagtatatatgcaggggcaagccaatatgatttagactatgtgtttgcgcacttcagtggcatctttcttacaagtactgtctactttctggcctactgcatagccatgaaaaatagtcctaaactatatcctgaagcagtcctaccaggattcctgtcaggagtactttgggctatagctacctgctgttggttcatagcaaatcactctctgagtgctgtggtcagttttccaataatcactgctggtccaggatttatagctgcaatgtggggtatcttcatgtttaaggaaataaagggtctacaaaactacctattaatgatacttgcattttgcatcatcttgactggagccttatgcactgctttttctaaaatctaacaatgacaaaaccagcaggtggcagcagtagttaagagaacgcgtctatcggacagcggagagatcatgctgagaaaagagtgcattttcatatagcaaatggatctcagccactgttggagtgggtaaatgatttttttccccaaaaatgtgagaatgaaggaagattgagtttcattcaagtataaaaatgaaaatttcttctgatgaactgtttatgaaggtagtactttactgggtgactaaaatgtctacattattatagcattacatacgaggatgctctttttaccacagtatgtacctagtgttgcataatctagaacacagtatagagtccatatacaaagaagttacagcccatatttctcacctattaccccagtgaagtgaggcagaaataccttgggcgaggagggagagccttaccttctaatggaattagattccaaagatatttggatcctttgtttcataaagtaaatgcatagttggtaactaaatgttaaaaaggccattttattattgttagccaaaacttctgtttatttcaagttaatatcgcccaactctacatcatctacccattttagctcataatgcttttgattatcgccagataaagtccattctcagagaacaaaaatttttcatcattgagaaaatgtgcataacataatacatacatacacaagtatattcacgtacataaatacacacagatatgttgctaaagtgagattgtaggttatcagtaacaatttaaaggaaacaaccactcttttgaatgtacaatttttttttctgaaatacacttttctaaaaccctcttaactggaggtttcctgttttcttcttgttttaactggtggtttccagtaggcaaaataaaatgacaggcatgctagttttttttttgttttttttttttaagaaaactgaaattaagccaggcagggtggcgcactactataatcccagctgctggggcggctgaagtaggagggtcacttagcccaagagtgcaaatctgccagcctaggcaacatagcaaggtcccatctctaaaaaagaaatttaatttaaatttgtaagaaaaaagaaaactgaaacagaactgccagtacaatgtttgttgcaattgtttccaaaactttgaaataacgaaacccctattcaaatgtaaattttacccattcccacctgatagtactgtttattactttgctatgcaggagaaacaaaacagctttttatttgtgtgtatactctgaagtcaatgtgcatgggttaaatcccacctctgcttcattttatttgtgtggctttggacaagttcctaagccctctgtgtcaggcccctcattaacaaaatggagtttatgatggcatctacctcacatggttattgtgtggttgaaattagttcaaatctgtaaagtatgttgatgagtatctggtacttggcaaacactatataattgttagctttattattatgtgttgtttgaaggggaaaaaagtttttgtagattggagaacaccatgtaagagctactaagctcaccaccttcccatccaattattactcctctaaatgaatactacttaaaagtgatggagcttctgtttgtttattgaattgctaatacaaataaatatttgactataacttcttatactcattttaattttaacctgaaatgtcattaaattatgctgataaactttgaataaattgtgatacaaaagctatttttctcatttaaatatattttagaattttatattggataacttttaattattctttagttgggatttccaatttatatgcaaaattttaaatgtgaagtaaagcagtttcagaagaaaaatg

SEQ ID NO: 361443 - DNA, 3404 bp, Homo sapiens
agcagtcctgtggtgaggcccatgtcaagaaggcctgagatctcccaccatcagctacagccaatttgtcagtcacagatcctcaaaatgagcagcagatacactcagtctgtaggatcatttagcaactcggggaaggaggtcataggttagcttttcaagacacttcctgcatctctgacctgttgcacctctgttatcttggcacctctgttatcttagcagcaagcacctgcctcagctgacccttgagccataacccatagggcttattccaaagggccagtgtgcaaaatatgaatccaagatggcattgtggaaagacgctgtacctcctgtgataaaattactttggtggtgcttttttctcatgtatctcgggaaactaaaaatctgaattgtattcagtggccttttccaaatgaagctcctgaaaagtacatcaagtctaaagtgaaccagctaactcattaagactggaatcatgagcaacaatggagcagacctaacctttggttacatctcctgttttgtagctatccttttgtttggctcaaattttgtgccacttaaaaaatttgatactggtgatggaatgtttctccagtgggttctttgtgctgccatatggttggttgccttggttgtcaatctgatattacattgtccaaagttttggccttttgcaatgcttgggggctgcatttgggcaacagggaacattgctgttgtcccaattatcaaaaccattggtttaggccttggaatcttaatctggggatcatttaatgccttaactggctgggcaagctcaaggtttggctggtttggattggatgcagaagaagtatcaaatccgctgctaaattacattggagctgggctatcagtagtaagtgctttcatattttgttcatcaaaagtgaaataccaaataacacgtgttccatggataccactccattaataacagagcatgtgagtgatcaacacaacccaagacccctgttcctgggtggataaactttctacagtacaccaccgcatagtgggctgcagtcttgcagtgatatctggagtactctatggatctacatttgtgccaatcatctacatcaaggaccacagcaaaagaaatgatagtatatatgcaggggcaagccaatatgatttagactatgtgtttgcgcacttcagtggcatctttcttacaagtactgtctactttctggcctactgcatagccatgaaaaatagtcctaaactatatcctgaagcagtcctaccaggattcctgtcaggagtactttgggctatagctacctgctgttggttcatagcaaatcactctctgagtgctgtggtcagttttccaataatcactgctggtccaggatttatagctgcaatgtggggtatcttcatgtttaaggaaataaagggtctacaaaactacctattaatgatacttgcattttgcatcatcttgactggagccttatgcactgctttttctaaaatctaacaatgacaaaaccagcaggtggcagcagtagttaagagaacgcgtctatcggacagcggagagatcatgctgagaaaagagtgcattttcatatagcaaatggatctcagccactgttggagtgggtaaatgatttttttccccaaaaatgtgagaatgaaggaagattgagtttcattcaagtataaaaatgaaaatttcttctgatgaactgtttatgaaggtagtactttactgggtgactaaaatgtctacattattatagcattacatacgaggatgctctttttaccacagtatgtacctagtgttgcataatctagaacacagtatagagtccatatacaaagaagttacagcccatatttctcacctattaccccagtgaagtgaggcagaaataccttgggcgaggagggagagccttaccttctaatggaattagattccaaagatatttggatcctttgtttcataaagtaaatgcatagttggtaactaaatgttaaaaaggccattttattattgttagccaaaacttctgtttatttcaagttaatatcgcccaactctacatcatctacccattttagctcataatgcttttgattatcgccagataaagtccattctcagagaacaaaaatttttcatcattgagaaaatgtgcataacataatacatacatacacaagtatattcacgtacataaatacacacagatatgttgctaaagtgagattgtaggttatcagtaacaatttaaaggaaacaaccactcttttgaatgtacaatttttttttctgaaatacacttttctaaaaccctcttaactggaggtttcctgttttcttcttgttttaactggtggtttccagtaggcaaaataaaatgacaggcatgctagttttttttttgttttttttttttaagaaaactgaaattaagccaggcagggtggcgcactactataatcccagctgctggggcggctgaagtaggagggtcacttagcccaagagtgcaaatctgccagcctaggcaacatagcaaggtcccatctctaaaaaagaaatttaatttaaatttgtaagaaaaaagaaaactgaaacagaactgccagtacaatgtttgttgcaattgtttccaaaactttgaaataacgaaacccctattcaaatgtaaattttacccattcccacctgatagtactgtttattactttgctatgcaggagaaacaaaacagctttttatttgtgtgtatactctgaagtcaatgtgcatgggttaaatcccacctctgcttcattttatttgtgtggctttggacaagttcctaagccctctgtgtcaggcccctcattaacaaaatggagtttatgatggcatctacctcacatggttattgtgtggttgaaattagttcaaatctgtaaagtatgttgatgagtatctggtacttggcaaacactatataattgttagctttattattatgtgttgtttgaaggggaaaaaagtttttgtagattggagaacaccatgtaagagctactaagctcaccaccttcccatccaattattactcctctaaatgaatactacttaaaagtgatggagcttctgtttgtttattgaattgctaatacaaataaatatttgactataacttcttatactcattttaattttaacctgaaatgtcattaaattatgctgataaactttgaataaattgtgatacaaaagctatttttctcatttaaatatattttagaattttatattggataacttttaattattctttagttgggatttccaatttatatgcaaaattttaaatgtgaagtaaagcagtttcagaagaaaaatg

SEQ ID NO: 361444 - DNA, 3028 bp, Homo sapiens
aggatcacgacggcgggtgtactattcagtggcttttccagatgaaggaagctcctgaaaagtacatcaagtctaaagtgaaccagctaactcattaagactggaatcatgagcaacaatggagcagacctaacctttggttacatctcctgttttgtagctatccttttgtttggctcaaattttgtgccacttaaaaaatttgatactggtgatggaatgtttctccagtgggttctttgtgctgccatatggttggttgccttggttgtcaatctgatattacattgtccaaagttttggccttttgcaatgcttgggggctgcatttgggcaacagggaacattgctgttgtcccaattatcaaaaccattggtttaggccttggaatcttaatctggggatcatttaatgccttaactggctgggcaagctcaaggtttggctggtttggattggatgcagaagaagtatcaaatccgctgctaaattacattggagctgggctatcagtagtaagtgctttcatattttgttcatcaaaagtgaaataccaaataacacgtgttccatggataccactccattaataacagagcatgtgagtgatcaacacaacccaagacccctgttcctgggtggataaactttctacagtacaccaccgcatagtgggctgcagtcttgcagtgatatctggagtactctatggatctacatttgtgccaatcatctacatcaaggaccacagcaaaagaaatgatagtatatatgcaggggcaagccaatatgatttagactatgtgtttgcgcacttcagtggcatctttcttacaagtactgtctactttctggcctactgcatagccatgaaaaatagtcctaaactatatcctgaagcagtcctaccaggattcctgtcaggagtactttgggctatagctacctgctgttggttcatagcaaatcactctctgagtgctgtggtcagttttccaataatcactgctggtccaggatttatagctgcaatgtggggtatcttcatgtttaaggaaataaagggtctacaaaactacctattaatgatacttgcattttgcatcatcttgactggagccttatgcactgctttttctaaaatctaacaatgacaaaaccagcaggtggcagcagtagttaagagaacgcgtctatcggacagcggagagatcatgctgagaaaagagtgcattttcatatagcaaatggatctcagccactgttggagtgggtaaatgatttttttccccaaaaatgtgagaatgaaggaagattgagtttcattcaagtataaaaatgaaaatttcttctgatgaactgtttatgaaggtagtactttactgggtgactaaaatgtctacattattatagcattacatacgaggatgctctttttaccacagtatgtacctagtgttgcataatctagaacacagtatagagtccatatacaaagaagttacagcccatatttctcacctattaccccagtgaagtgaggcagaaataccttgggcgaggagggagagccttaccttctaatggaattagattccaaagatatttggatcctttgtttcataaagtaaatgcatagttggtaactaaatgttaaaaaggccattttattattgttagccaaaacttctgtttatttcaagttaatatcgcccaactctacatcatctacccattttagctcataatgcttttgattatcgccagataaagtccattctcagagaacaaaaatttttcatcattgagaaaatgtgcataacataatacatacatacacaagtatattcacgtacataaatacacacagatatgttgctaaagtgagattgtaggttatcagtaacaatttaaaggaaacaaccactcttttgaatgtacaatttttttttctgaaatacacttttctaaaaccctcttaactggaggtttcctgttttcttcttgttttaactggtggtttccagtaggcaaaataaaatgacaggcatgctagttttttttttgttttttttttttaagaaaactgaaattaagccaggcagggtggcgcactactataatcccagctgctggggcggctgaagtaggagggtcacttagcccaagagtgcaaatctgccagcctaggcaacatagcaaggtcccatctctaaaaaagaaatttaatttaaatttgtaagaaaaaagaaaactgaaacagaactgccagtacaatgtttgttgcaattgtttccaaaactttgaaataacgaaacccctattcaaatgtaaattttacccattcccacctgatagtactgtttattactttgctatgcaggagaaacaaaacagctttttatttgtgtgtatactctgaagtcaatgtgcatgggttaaatcccacctctgcttcattttatttgtgtggctttggacaagttcctaagccctctgtgtcaggcccctcattaacaaaatggagtttatgatggcatctacctcacatggttattgtgtggttgaaattagttcaaatctgtaaagtatgttgatgagtatctggtacttggcaaacactatataattgttagctttattattatgtgttgtttgaaggggaaaaaagtttttgtagattggagaacaccatgtaagagctactaagctcaccaccttcccatccaattattactcctctaaatgaatactacttaaaagtgatggagcttctgtttgtttattgaattgctaatacaaataaatatttgactataacttcttatactcattttaattttaacctgaaatgtcattaaattatgctgataaactttgaataaattgtgatacaaaagctatttttctcatttaaatatattttagaattttatattggataacttttaattattctttagttgggatttccaatttatatgcaaaattttaaatgtgaagtaaagcagtttcagaagaaaaatg

SEQ ID NO: 361445 - DNA, 2776 bp, Homo sapiens
agttgaagttagaataaaaactaattctatttataaatgtattttctatatggaaataacatgtttcttctgtatattacatctacagggaacattgctgttgtcccaattatcaaaaccattggtttaggccttggaatcttaatctggggatcatttaatgccttaactggctgggcaagctcaaggtttggctggtttggattggatgcagaagaagtatcaaatccgctgctaaattacattggagctgggctatcagtagtaagtgctttcatattttgttcatcaaaagtgaaataccaaataacacgtgttccatggataccactccattaataacagagcatgtgagtgatcaacacaacccaagacccctgttcctgggtggataaactttctacagtacaccaccgcatagtgggctgcagtcttgcagtgatatctggagtactctatggatctacatttgtgccaatcatctacatcaaggaccacagcaaaagaaatgatagtatatatgcaggggcaagccaatatgatttagactatgtgtttgcgcacttcagtggcatctttcttacaagtactgtctactttctggcctactgcatagccatgaaaaatagtcctaaactatatcctgaagcagtcctaccaggattcctgtcaggagtactttgggctatagctacctgctgttggttcatagcaaatcactctctgagtgctgtggtcagttttccaataatcactgctggtccaggatttatagctgcaatgtggggtatcttcatgtttaaggaaataaagggtctacaaaactacctattaatgatacttgcattttgcatcatcttgactggagccttatgcactgctttttctaaaatctaacaatgacaaaaccagcaggtggcagcagtagttaagagaacgcgtctatcggacagcggagagatcatgctgagaaaagagtgcattttcatatagcaaatggatctcagccactgttggagtgggtaaatgatttttttccccaaaaatgtgagaatgaaggaagattgagtttcattcaagtataaaaatgaaaatttcttctgatgaactgtttatgaaggtagtactttactgggtgactaaaatgtctacattattatagcattacatacgaggatgctctttttaccacagtatgtacctagtgttgcataatctagaacacagtatagagtccatatacaaagaagttacagcccatatttctcacctattaccccagtgaagtgaggcagaaataccttgggcgaggagggagagccttaccttctaatggaattagattccaaagatatttggatcctttgtttcataaagtaaatgcatagttggtaactaaatgttaaaaaggccattttattattgttagccaaaacttctgtttatttcaagttaatatcgcccaactctacatcatctacccattttagctcataatgcttttgattatcgccagataaagtccattctcagagaacaaaaatttttcatcattgagaaaatgtgcataacataatacatacatacacaagtatattcacgtacataaatacacacagatatgttgctaaagtgagattgtaggttatcagtaacaatttaaaggaaacaaccactcttttgaatgtacaatttttttttctgaaatacacttttctaaaaccctcttaactggaggtttcctgttttcttcttgttttaactggtggtttccagtaggcaaaataaaatgacaggcatgctagttttttttttgttttttttttttaagaaaactgaaattaagccaggcagggtggcgcactactataatcccagctgctggggcggctgaagtaggagggtcacttagcccaagagtgcaaatctgccagcctaggcaacatagcaaggtcccatctctaaaaaagaaatttaatttaaatttgtaagaaaaaagaaaactgaaacagaactgccagtacaatgtttgttgcaattgtttccaaaactttgaaataacgaaacccctattcaaatgtaaattttacccattcccacctgatagtactgtttattactttgctatgcaggagaaacaaaacagctttttatttgtgtgtatactctgaagtcaatgtgcatgggttaaatcccacctctgcttcattttatttgtgtggctttggacaagttcctaagccctctgtgtcaggcccctcattaacaaaatggagtttatgatggcatctacctcacatggttattgtgtggttgaaattagttcaaatctgtaaagtatgttgatgagtatctggtacttggcaaacactatataattgttagctttattattatgtgttgtttgaaggggaaaaaagtttttgtagattggagaacaccatgtaagagctactaagctcaccaccttcccatccaattattactcctctaaatgaatactacttaaaagtgatggagcttctgtttgtttattgaattgctaatacaaataaatatttgactataacttcttatactcattttaattttaacctgaaatgtcattaaattatgctgataaactttgaataaattgtgatacaaaagctatttttctcatttaaatatattttagaattttatattggataacttttaattattctttagttgggatttccaatttatatgcaaaattttaaatgtgaagtaaagcagtttcagaagaaaaatg

SEQ ID NO: 361446 - DNA, 1813 bp, Homo sapiens
  misc_feature (1813)..(1813): n is a, c, g, or t
cacctcttgaaatacacaaaactcttctagtttcctggttgaccgacccagggcttgacgactccttttgagccacctgacaattcagtccagcacagcaactgaaggaaggcgttccccaacctgctgtcctatgaaggcctctaggtcaccggtgctaaagccctcctttctccaccctccttaagtggaggtaaacgtcccagcaggaagtcaaggctggattggcgctcttcgcgagcaccctgggaacgggagtctgggtcacgggtgctagagccctcccctctcctcccggccggtgtatgggaaattgtccccgcagaaagtaaaggctggccaggccgcccccagcacgtagagggaatgagtcaggctccggctccacactggcacgtagtgggcggatcgcgccggcgctgagtaggaaggagcttcagccgccagcccggaacgcatcataggttagcttttcaagacacttcctgcatctctgacctgttgcacctctgttatcttggcacctctgttatcttagcagcaagcacctgcctcagctgacccttgagccataacccataagctcctgaaaagtacatcaagtctaaagtgaaccagctaactcattaagactggaatcatgagcaacaatggagcagacctaacctttggttacatctcctgttttgtagctatccttttgtttggctcaaattttgtgccacttaaaaaatttgatactggtgatggaatgtttctccagtgggttctttgtgctgccatatggttggttgccttggttgtcaatctgatattacattgtccaaagttttggccttttgcaatgcttgggggctgcatttgggcaacagggaacattgctgttgtcccaattatcaaaaccattggtttaggccttggaatcttaatctggggatcatttaatgccttaactggctgggcaagctcaaggtttggctggtttggattggatgcagaagaagtatcaaatccgctgctaaattacattggagctgggctatcagtagtaagtgctttcatattttgttcatcaaaagtgaaataccaaataacacgtgttccatggataccactccattaataacagagcatgtgagggctgcagtcttgcagtgatatctggagtactctatggatctacatttgtgccaatcatctacatcaaggaccacagcaaaagaaatgatagtatatatgcaggggcaagccaatatgatttagactatgtgtttgcgcacttcagtggcatctttcttacaagtactgtctactttctggcctactgcatagccatgaaaaatagtcctaaactatatcctgaagcagtcctaccaggattcctgtcaggagtactttgggctatagctacctgctgttggttcatagcaaatcactctctgagtgctgtggtcagttttccaataatcactgctgatccatgagttatagctgttatgcgagcgatctcatcgcattatgaccacttgcatgcacaactctgtgcccactttccatacgcgaggggaggtggaacctttgccgaagataagcggtggctggaactttataaaccaccaccgcttatactgcctgactgttgcagactataaccgaccatctcgaccagtctatggcctacaggtaattttaattaaacacctatgggccacagagtaagtcttttctaaccccatcctttagaggagcccacttgaaagagtttggcccacacacttaggtttgattacgagtcttgttccaggtaaggggn

SEQ ID NO: 361447 - DNA, 2445 bp, Homo sapiens
cacctcttgaaatacacaaaactcttctagtttcctggttgaccgacccagggcttgacgactccttttgagccacctgacaattcagtccagcacagcaactgaaggaaggcgttccccaacctgctgtcctatgaaggcctctaggtcaccggtgctaaagccctcctttctccaccctccttaagtggaggtaaacgtcccagcaggaagtcaaggctggattggcgctcttcgcgagcaccctgggaacgggagtctgggtcacgggtgctagagccctcccctctcctcccggccggtgtatgggaaattgtccccgcagaaagtaaaggctggccaggccgcccccagcacgtagagggaatgagtcaggctccggctccacactggcacgtagtgggcggatcgcgccggcgctgagtaggaaggagcttcagccgccagcccggaacgcagtgagtacagccactcaaaggaaagccaagtcgctttgcaggggagcgtctcatgatttttcagaaacgtgctcatggttaaaaagaaaaatcaaggctcggaataaatacattcaagcactgttaattttagcccaaagacaggcggtacttgcctggagatttgggaaaatcaacatgaaactaaaaatgaaattttagttggagtggagcaagcagtattgatcagaacataccaaatacgaattttttcaaagtctgcgtagaagtttaaattactaggaaaaatgtaaaggagaagtatttactaataaatgaaacaaaagtaataaaataaaaatgaattaatatagtttgacaaaatatcagcgaacgctgaaaagaaaacattaaaataatgtttgagactttttaggttttgtgcaggaagaattgggaaaaatgtgctggatggagtgatactgcttttcttttccacaaaaatttcattattttagagagcggtagagcctttttaaagacagtaagttattgccaattcacaatgaaataagatcacatgctctgaaatgtacaagagctgcatgcaataaacttcatttatctataggtaataactgattgatgtttattcagtagtcgaaatgcacctcatgcactctaattagcacgtcaaattagtctctccgtttcagaggtgtagggcctttgtggagccttctcaataaaataatttgccactcttgaaggttagacattctcttctatcaatgtacacataaaggttttgttttgctttgcttgttgtgaattaaaatggggagaaaatgatgtgttagctattacccagtcatgtgtctttttagtcataggttagcttttcaagacacttcctgcatctctgacctgttgcacctctgttatcttggcacctctgttatcttagcagcaagcacctgcctcagctgacccttgagccataacccataagctcctgaaaagtacatcaagtctaaagtgaaccagctaactcattaagactggaatcatgagcaacaatggagcagacctaacctttggttacatctcctgttttgtagctatccttttgtttggctcaaattttgtgccacttaaaaaatttgatactggtgatggaatgtttctccagtgggttctttgtgctgccatatggttggttgccttggttgtcaatctgatattacattgtccaaagttttggccttttgcaatgcttgggggctgcatttgggcaacagggaacattgctgttgtcccaattatcaaaaccattggtttaggccttggaatcttaatctggggatcatttaatgccttaactggctgggcaagctcaaggtaattcaagtcaaactagttcaactaagatttcctgcatccatattctatgtaaagcaagtgattaccgagaggaataacatatgattcttattctcacagagtttatagctggtaaaacatacacatcatatatgccaccttctattgctatttgccctaaattcttaataagtgatctagatatttgatcaagatatagtgtagcattaaatctgggaaacagaggtagagagagaaaaaggaaactgatgtttattgtccctttctattgtgtgacaatttgctggacatgttctatgcatcattctcatctcactttcacaaatacgtgaggtaagcactatcttataagagagtagataaaaagagattaagtaacttactgtaggtcacagaactaagaagctaggattcaaacccaggtcttctagttccagagcacatattctttcctctagagcagggttggcaaagcacggtctggtttcccagccatttctataaataacgttttatcagaacacagccaaacccatccatttaaggattgtctatggctatttttatgttacagtggcagagttgagcagcaagggaataactg

SEQ ID NO: 361448 - DNA, 1769 bp, Homo sapiens
cacctcttgaaatacacaaaactcttctagtttcctggttgaccgacccagggcttgacgactccttttgagccacctgacaattcagtccagcacagcaactgaaggaaggcgttccccaacctgctgtcctatgaaggcctctaggtcaccggtgctaaagccctcctttctccaccctccttaagtggaggtaaacgtcccagcaggaagtcaaggctggattggcgctcttcgcgagcaccctgggaacgggagtctgggtcacgggtgctagagccctcccctctcctcccggccggtgtatgggaaattgtccccgcagaaagtaaaggctggccaggccgcccccagcacgtagagggaatgagtcaggctccggctccacactggcacgtagtgggcggatcgcgccggcgctgagtaggaaggagcttcagccgccagcccggaacgcagtgagtacagccactcaaaggaaagccaagtcgctttgcaggggagcgtctcatgatttttcagaaacgtgctcatggttaaaaagaaaaatcaaggctcggaataaatacattcaagcactgttaattttagcccaaagacaggcggtacttgcctggagatttgggaaaatcaacatgaaactaaaaatgaaattttagttggagtggagcaagcagtattgatcagaacataccaaatacgaattttttcaaagtctgcgtagaagtttaaattactaggaaaaatgtaaaggagaagtatttactaataaatgaaacaaaagtaataaaataaaaatgaattaatatagtttgacaaaatatcagcgaacgctgaaaagaaaacattaaaataatgtttgagactttttaggttttgtgcaggaagaattgggaaaaatgtgctggatggagtgatactgcttttcttttccacaaaaatttcattattttagagagcggtagagcctttttaaagacagtaagttattgccaattcacaatgaaataagatcacatgctctgaaatgtacaagagctgcatgcaataaacttcatttatctataggtaataactgattgatgtttattcagtagtcgaaatgcacctcatgcactctaattagcacgtcaaattagtctctccgtttcagaggtgtagggcctttgtggagccttctcaataaaataatttgccactcttgaaggttagacattctcttctatcaatgtacacataaaggttttgttttgctttgcttgttgtgaattaaaatggggagaaaatgatgtgttagctattacccagtcatgtgtctttttagtcataggttagcttttcaagacacttcctgcatctctgacctgttgcacctctgttatcttggcacctctgttatcttagcagcaagcacctgcctcagctgacccttgagccataacccataagctcctgaaaagtacatcaagtctaaagtgaaccagctaactcattaagactggaatcatgagcaacaatggagcagacctaacctttggttacatctcctgttttgtagctatccttttgtttggctcaaattttgtgccacttaaaaaatttgatactggtgatggaatgtttctccagtgggttctttgtgctgccatatggttggttgccttggttgtcaatctgatattacattgtccaaagttttggccttttgcaatgcttgggggctgcatttgggcaacaggaacatgtggggcccaatatccatgtgcctg

SEQ ID NO: 361449 - DNA, 524 bp, Homo sapiens
ttatcttagcagcaagcacctgcctcagctgacccttgagccataacccatgtaagtcactgcagggctgaacctctctttgagcctaacagtagaataataattatttttattgaatagtgttaatgtgtcaatgttgaaatgtgcctcagtgtgtcttcctcaaccacatccctatagaggatgttttcttaatagcaatgtgtttttgttttaagaaagtccacacaatttcaaatacacattttctttactaaagtttattgaccagttttgaagtgatccttgttttcagttaaactatctttaataatggtaaataacatattttgtaggttgttgtatatttaatattctctgcaagaacacataaggaacaatacatggacctttaaatatttgtcattgtgaaataaaataacaaggaaaggtgatttcaggtgtactttattcaatacatatatacaagaagttattactataacattaaatttgcaggaaaaaagaaaccactggattattct

SEQ ID NO: 361450 - DNA, 1273 bp, Homo sapiens
  misc_feature (1161)..(1161): n is a, c, g, or t
cacctcttgaaatacacaaaactcttctagtttcctggttgaccgacccagggcttgacgactccttttgagccacctgacaattcagtccagcacagcaactgaaggaaggcgttccccaacctgctgtcctatgaaggcctctaggtcaccggtgctaaagccctcctttctccaccctccttaagtggaggtaaacgtcccagcaggaagtcaaggctggattggcgctcttcgcgagcaccctgggaacgggagtctgggtcacgggtgctagagccctcccctctcctcccggccggtgtatgggaaattgtccccgcagaaagtaaaggctggccaggccgcccccagcacgtagagggaatgagtcaggctccggctccacactggcacgtagtgggcggatcgcgccggcgctgagtaggaaggagcttcagccgccagcccggaacgcatcataggttagcttttcaagacacttcctgcatctctgacctgttgcacctctgttatcttggcacctctgttatcttagcagcaagcacctgcctcagctgacccttgagccataacccataagctcctgaaaagtacatcaagtctaaagtgaaccagctaactcattaagactggaatcatgagcaacaatggagcagacctaacctttggttacatctcctgttttgtagctatccttttgtttggctcaaattttgtgccacttaaaaaatttgatactggtgatggaatgtttctccagtgggttctttgtgctgccatatggttggttgccttggttgtcaatctgatattacattgtccaaagttttggccttttgcaatgcttgggggctgcatttgggcaacagggaacattgctgttgtcccaattatcaaaaccattggtttaggccttggaatcttaatctggggatcatttaatgccttaactggctgggcaagctcaaggtttggctggtttggattggatgcagaagaagtatcaaatccgctgctaaattacattggagctgggctatcagtagtaagtgctttcatattttgttcatcaaaagtgaaataccaaataacacgtgttccatggataccactccattaataacagagcatgtgatcaacaacaaccaagaaccctgnccggggtgtgaaacacttctacaagaagacacacggaaaagaggtcgcaagcttagcgagaaaacagggaaacaccatagaaacacacttgagcacaccaccaagaaggacc

SEQ ID NO: 361451 - DNA, 3560 bp, Homo sapiens
cacctcttgaaatacacaaaactcttctagtttcctggttgaccgacccagggcttgacgactccttttgagccacctgacaattcagtccagcacagcaactgaaggaaggcgttccccaacctgctgtcctatgaaggcctctaggtcaccggtgctaaagccctcctttctccaccctccttaagtggaggtaaacgtcccagcaggaagtcaaggctggattggcgctcttcgcgagcaccctgggaacgggagtctgggtcacgggtgctagagccctcccctctcctcccggccggtgtatgggaaattgtccccgcagaaagtaaaggctggccaggccgcccccagcacgtagagggaatgagtcaggctccggctccacactggcacgtagtgggcggatcgcgccggcgctgagtaggaaggagcttcagccgccagcccggaacgcatcataggttagcttttcaagacacttcctgcatctctgacctgttgcacctctgttatcttggcacctctgttatcttagcagcaagcacctgcctcagctgacccttgagccataacccataagctcctgaaaagtacatcaagtctaaagtgaaccagctaactcattaagactggaatcatgagcaacaatggagcagacctaacctttggttacatctcctgttttgtagctatccttttgtttggctcaaattttgtgccacttaaaaaatttgatactggtgatggaatgtttctccagtgggttctttgtgctgccatatggttggttgccttggttgtcaatctgatattacattgtccaaagttttggccttttgcaatgcttgggggctgcatttgggcaacagggaacattgctgttgtcccaattatcaaaaccattggtttaggccttggaatcttaatctggggatcatttaatgccttaactggctgggcaagctcaaggtttggctggtttggattggatgcagaagaagtatcaaatccgctgctaaattacattggagctgggctatcagtagtaagtgctttcatattttgttcatcaaaagtgaaataccaaataacacgtgttccatggataccactccattaataacagagcatgtgagtgatcaacacaacccaagacccctgttcctgggtggataaactttctacagtacaccaccgcatagtgggctgcagtcttgcagtgatatctggagtactctatggatctacatttgtgccaatcatctacatcaaggaccacagcaaaagaaatgatagtatatatgcaggggcaagccaatatgatttagactatgtgtttgcgcacttcagtggcatctttcttacaagtactgtctactttctggcctactgcatagccatgaaaaatagtcctaaactatatcctgaagcagtcctaccaggattcctgtcaggagtactttgggctatagctacctgctgttggttcatagcaaatcactctctgagtgctgtggtcagttttccaataatcactgctggtccaggatttatagctgcaatgtggggtatcttcatgtttaaggaaataaagggtctacaaaactacctattaatgatacttgcattttgcatcatcttgactggagccttatgcactgctttttctaaaatctaacaatgacaaaaccagcaggtggcagcagtagttaagagaacgcgtctatcggacagcggagagatcatgctgagaaaagagtgcattttcatatagcaaatggatctcagccactgttggagtgggtaaatgatttttttccccaaaaatgtgagaatgaaggaagattgagtttcattcaagtataaaaatgaaaatttcttctgatgaactgtttatgaaggtagtactttactgggtgactaaaatgtctacattattatagcattacatacgaggatgctctttttaccacagtatgtacctagtgttgcataatctagaacacagtatagagtccatatacaaagaagttacagcccatatttctcacctattaccccagtgaagtgaggcagaaataccttgggcgaggagggagagccttaccttctaatggaattagattccaaagatatttggatcctttgtttcataaagtaaatgcatagttggtaactaaatgttaaaaaggccattttattattgttagccaaaacttctgtttatttcaagttaatatcgcccaactctacatcatctacccattttagctcataatgcttttgattatcgccagataaagtccattctcagagaacaaaaatttttcatcattgagaaaatgtgcataacataatacatacatacacaagtatattcacgtacataaatacacacagatatgttgctaaagtgagattgtaggttatcagtaacaatttaaaggaaacaaccactcttttgaatgtacaatttttttttctgaaatacacttttctaaaaccctcttaactggaggtttcctgttttcttcttgttttaactggtggtttccagtaggcaaaataaaatgacaggcatgctagttttttttttgttttttttttttaagaaaactgaaattaagccaggcagggtggcgcactactataatcccagctgctggggcggctgaagtaggagggtcacttagcccaagagtgcaaatctgccagcctaggcaacatagcaaggtcccatctctaaaaaagaaatttaatttaaatttgtaagaaaaaagaaaactgaaacagaactgccagtacaatgtttgttgcaattgtttccaaaactttgaaataacgaaacccctattcaaatgtaaattttacccattcccacctgatagtactgtttattactttgctatgcaggagaaacaaaacagctttttatttgtgtgtatactctgaagtcaatgtgcatgggttaaatcccacctctgcttcattttatttgtgtggctttggacaagttcctaagccctctgtgtcaggcccctcattaacaaaatggagtttatgatggcatctacctcacatggttattgtgtggttgaaattagttcaaatctgtaaagtatgttgatgagtatctggtacttggcaaacactatataattgttagctttattattatgtgttgtttgaaggggaaaaaagtttttgtagattggagaacaccatgtaagagctactaagctcaccaccttcccatccaattattactcctctaaatgaatactacttaaaagtgatggagcttctgtttgtttattgaattgctaatacaaataaatatttgactataacttcttatactcattttaattttaacctgaaatgtcattaaattatgctgataaactttgaataaattgtgatacaaaagctatttttctcatttaaatatattttagaattttatattggataacttttaattattctttagttgggatttccaatttatatgcaaaattttaaatgtgaagtaaagcagtttcagaagaaaaatg

SEQ ID NO: 361452 - DNA, 3720 bp, Homo sapiens
cacctcttgaaatacacaaaactcttctagtttcctggttgaccgacccagggcttgacgactccttttgagccacctgacaattcagtccagcacagcaactgaaggaaggcgttccccaacctgctgtcctatgaaggcctctaggtcaccggtgctaaagccctcctttctccaccctccttaagtggaggtaaacgtcccagcaggaagtcaaggctggattggcgctcttcgcgagcaccctgggaacgggagtctgggtcacgggtgctagagccctcccctctcctcccggccggtgtatgggaaattgtccccgcagaaagtaaaggctggccaggccgcccccagcacgtagagggaatgagtcaggctccggctccacactggcacgtagtgggcggatcgcgccggcgctgagtaggaaggagcttcagccgccagcccggaacgcatcataggttagcttttcaagacacttcctgcatctctgacctgttgcacctctgttatcttggcacctctgttatcttagcagcaagcacctgcctcagctgacccttgagccataacccatagggcttattccaaagggccagtgtgcaaaatatgaatccaagatggcattgtggaaagacgctgtacctcctgtgataaaattactttggtggtgcttttttctcatgtatctcgggaaactaaaaatctgaattgtattcagtggccttttccaaatgaagctcctgaaaagtacatcaagtctaaagtgaaccagctaactcattaagactggaatcatgagcaacaatggagcagacctaacctttggttacatctcctgttttgtagctatccttttgtttggctcaaattttgtgccacttaaaaaatttgatactggtgatggaatgtttctccagtgggttctttgtgctgccatatggttggttgccttggttgtcaatctgatattacattgtccaaagttttggccttttgcaatgcttgggggctgcatttgggcaacagggaacattgctgttgtcccaattatcaaaaccattggtttaggccttggaatcttaatctggggatcatttaatgccttaactggctgggcaagctcaaggtttggctggtttggattggatgcagaagaagtatcaaatccgctgctaaattacattggagctgggctatcagtagtaagtgctttcatattttgttcatcaaaagtgaaataccaaataacacgtgttccatggataccactccattaataacagagcatgtgagtgatcaacacaacccaagacccctgttcctgggtggataaactttctacagtacaccaccgcatagtgggctgcagtcttgcagtgatatctggagtactctatggatctacatttgtgccaatcatctacatcaaggaccacagcaaaagaaatgatagtatatatgcaggggcaagccaatatgatttagactatgtgtttgcgcacttcagtggcatctttcttacaagtactgtctactttctggcctactgcatagccatgaaaaatagtcctaaactatatcctgaagcagtcctaccaggattcctgtcaggagtactttgggctatagctacctgctgttggttcatagcaaatcactctctgagtgctgtggtcagttttccaataatcactgctggtccaggatttatagctgcaatgtggggtatcttcatgtttaaggaaataaagggtctacaaaactacctattaatgatacttgcattttgcatcatcttgactggagccttatgcactgctttttctaaaatctaacaatgacaaaaccagcaggtggcagcagtagttaagagaacgcgtctatcggacagcggagagatcatgctgagaaaagagtgcattttcatatagcaaatggatctcagccactgttggagtgggtaaatgatttttttccccaaaaatgtgagaatgaaggaagattgagtttcattcaagtataaaaatgaaaatttcttctgatgaactgtttatgaaggtagtactttactgggtgactaaaatgtctacattattatagcattacatacgaggatgctctttttaccacagtatgtacctagtgttgcataatctagaacacagtatagagtccatatacaaagaagttacagcccatatttctcacctattaccccagtgaagtgaggcagaaataccttgggcgaggagggagagccttaccttctaatggaattagattccaaagatatttggatcctttgtttcataaagtaaatgcatagttggtaactaaatgttaaaaaggccattttattattgttagccaaaacttctgtttatttcaagttaatatcgcccaactctacatcatctacccattttagctcataatgcttttgattatcgccagataaagtccattctcagagaacaaaaatttttcatcattgagaaaatgtgcataacataatacatacatacacaagtatattcacgtacataaatacacacagatatgttgctaaagtgagattgtaggttatcagtaacaatttaaaggaaacaaccactcttttgaatgtacaatttttttttctgaaatacacttttctaaaaccctcttaactggaggtttcctgttttcttcttgttttaactggtggtttccagtaggcaaaataaaatgacaggcatgctagttttttttttgttttttttttttaagaaaactgaaattaagccaggcagggtggcgcactactataatcccagctgctggggcggctgaagtaggagggtcacttagcccaagagtgcaaatctgccagcctaggcaacatagcaaggtcccatctctaaaaaagaaatttaatttaaatttgtaagaaaaaagaaaactgaaacagaactgccagtacaatgtttgttgcaattgtttccaaaactttgaaataacgaaacccctattcaaatgtaaattttacccattcccacctgatagtactgtttattactttgctatgcaggagaaacaaaacagctttttatttgtgtgtatactctgaagtcaatgtgcatgggttaaatcccacctctgcttcattttatttgtgtggctttggacaagttcctaagccctctgtgtcaggcccctcattaacaaaatggagtttatgatggcatctacctcacatggttattgtgtggttgaaattagttcaaatctgtaaagtatgttgatgagtatctggtacttggcaaacactatataattgttagctttattattatgtgttgtttgaaggggaaaaaagtttttgtagattggagaacaccatgtaagagctactaagctcaccaccttcccatccaattattactcctctaaatgaatactacttaaaagtgatggagcttctgtttgtttattgaattgctaatacaaataaatatttgactataacttcttatactcattttaattttaacctgaaatgtcattaaattatgctgataaactttgaataaattgtgatacaaaagctatttttctcatttaaatatattttagaattttatattggataacttttaattattctttagttgggatttccaatttatatgcaaaattttaaatgtgaagtaaagcagtttcagaagaaaaatg

SEQ ID NO: 361453 - DNA, 5682 bp, Homo sapiens
tgccacaattccctgagatctcccaggtggcagctgcctccccaagacaggctcactcaccatgaccaagctgagcgcccaagtcaaaggctctctcaacatcaccaccccggggctgcagatatggaggatcgaggccatgcagatggtgcctgttccttccagcacctttggaagcttcttcgatggtgactgctacatcatcctggctatccacaagacagccagcagcctgtcctatgacatccactactggattggccaggactcatccctggatgagcagggggcagctgccatctacaccacacagatggatgacttcctgaagggccgggctgtgcagcaccgcgaggtccagggcaacgagagcgaggccttccgaggctacttcaagcaaggccttgtgatccggaaagggggcgtggcttctggcatgaagcacgtggagaccaactcctatgacgtccagaggctgctgcatgtcaagggcaagaggaacgtggtagctggagaggtagagatgtcctggaagagtttcaaccgaggggatgttttcctcctggaccttgggaagcttatcatccagtggaatggaccggaaagcacccgtatggagagactcaggggcatgactctggccaaggagatccgagaccaggagcggggagggcgcacctatgtaggcgtggtggacggagagaatgaattggcatccccgaagctgatggaggtgatgaaccacgtgctgggcaagcgcagggagctgaaggcggccgtgcccgacacggtggtggagccggcactcaaggctgcactcaaactgtaccatgtgtctgactccgaggggaatctggtggtgagggaagtcgccacacggccactgacacaggacctgctcagtcacgaggactgttacatcctggaccaggggggcctgaagatctacgtgtggaaagggaagaaagccaatgagcaggagaagaagggagccatgagccatgcgctgaacttcatcaaagccaagcagtacccaccaagcacacaggtggaggtgcagaatgatggggctgagtcggccgtctttcagcagctcttccagaagtggacagcgtccaaccggacctcaggcctaggcaaaacccacactgtgggctccgtggccaaagtggaacaggtgaagttcgatgccacatccatgcatgtcaagcctcaggtggctgcccagcagaagatggtagatgatgggagtggggaagtgcaggtgtggcgcattgagaacctagagctggtacctgtggattccaagtggctaggccacttctatgggggcgactgctacctgctgctctacacctacctcatcggcgagaagcagcattacctgctctacgtttggcagggcagccaggccagccaagatgaaattacagcatcagcttatcaagccgtcatcctggaccagaagtacaatggtgaaccagtccagatccgggtcccaatgggcaaggagccacctcatcttatgtccatcttcaagggacgcatggtggtctaccagggaggcacctcccgaactaacaacttggagaccgggccctccacacggctgttccaggtccagggaactggcgccaacaacaccaaggcctttgaggtcccagcgcgggccaatttcctcaattccaatgatgtctttgtcctcaagacccagtcttgctgctatctatggtgtgggaagggttgtagcggggacgagcgggagatggccaagatggttgctgacaccatctcccggacggagaagcaagtggtggtggaagggcaggagccagccaacttctggatggccctgggtgggaaggccccctatgccaacaccaagagactacaggaagaaaacctggtcatcaccccccggctctttgagtgttccaacaagactgggcgcttcctggccacagagatccctgacttcaatcaggatgacttggaagaggatgatgtgttcctactagatgtctgggaccaggtcttcttctggattgggaaacatgccaacgaggaggagaagaaggccgcagcaaccactgcacaggaatacctcaagacccatcccagcgggcgtgaccctgagacccccatcattgtggtgaagcagggacacgagccccccaccttcacaggctggttcctggcttgggatcccttcaagtggagtaacaccaaatcctatgaggacctgaaggcggagcttggcaactctagggactggagccagatcactgctgaggtcacaagccccaaagtggacgtgttcaatgctaacagcaacctcagttctgggcctctgcccatcttccccctggagcagctagtgaacaagcctgtagaggagctccccgagggtgtggaccccagcaggaaggaggaacacctgtccattgaagatttcactcaggcctttgggatgactccagctgccttctctgctctgcctcgatggaagcaacaaaacctcaagaaagaaaaaggactattttgagaagagtagctgtggttgtaaagcagtaccctaccctgattgtagggtctcattttctcaccgatattagtcctacaccaattgaagtgaaattttgcagatgtgcctatgagcacaaacttctgtggcaaatgccagttttgtttaataatgtacctattccttcagaaagatgataccccaaaaggagcctatggtcctcatttcaacttctaaggtcgctagattgtttctatcctgaggtattgcatcaattttaatactcctatagttttctcttcttagaagagcacaaacactccatggaacattagagttctgaggcactaccctagcttgtcctctatcatgactcatttttatctatggcaggtaggctgaagcactttgcaggtttacatcttccccagagtaacagcttttccttttcacatatactttccttactgccttactcagtgggtaagttaaagggctgaaggagagttgaatggtccacaagactaccctcttaagaggtttcacaaattccaaacagtaccagtgagagcagcacttccactggggctaggcttgagacctaaaggcaagtatgaaatgcatatgctacttcactccctctcccaacccttaataatgaggcaaagcaagagcctagtgaaggccaatgctaggtttacaaacttacccagaagcctctgcaaagcttcacaggctcctcagatgaaaataacaggaatcaatggggactacggccagacactggtttgccattctgttccttttaagaagtaacagtgctgcaaggaagtccatgtcagaaagccaacagaaggtgatttccacaactttgaacaggttgttacaagtatcagcaagaatgtgtccttttcagaaataacagtcaaatcaaagaaggttaataaaggctttaatttcatacacacaaaaaaactctatgcataatttaaaaaggaaacaaaaacaaagaaaaaccgtaaaggatacagaggaacagttctgctaaaacacagataaaagtgccgctccatacaaaacataaagaatcagaatcaaaagtcactctgaacataaagaaaaaaaatcatctcacaaataatgtggccacagctgccagaaaacctggtagtggctcaattaggcaaagtgtaggaatctcatttttgtttttctctccttaagtttaaagaaacaacaatgacaataggccagagaagttagggagggaaagaaaagctcaaagggagggaaacctggggacaagaggtgtgcacacccacatgtggtctcactcttcacacaggcccactatttttgaagtagaccagtttagttgactgttcttctttgttctggcatctgactggaccaacctggaacctggtccagaccctcacccactctattcttatgccaatggacatacctatactttgaacctctgtacttttaagaaaagtccaatgttacaaaatcaaatgcttatattcagactggcacactttttaaataaaaactccatacacctcagacatatagcacacatggagacaacttactaattgtgtgtaagtatgatacaatgaatgagactgcctgaagtctagtaatcaaagcatgccataaggtgaatgattgtggttaaacacagcaaaataattgtcacaaaactttcaaggcctaacaaattagaattttccaataaaaaatatatattttttcagatgttaataagacatatcagtagagacaaaattaggattttgaagtaatgcaataaaaagatgttggagggcagaagtctatttagtttttgtatacacttgcaagagtgcattactcagtataaagcaaaatggggaggaaaaagacatccatccattttattggaacacttttatgtgacttgaatctggtgttaggttgttgatttttctaaaaatctcctatatatacaaaatccatatgtacttggagatccagctgttgccccctgtttaaaacaaaagaccacctcggggggtcaattaaattaaaaaggccctccaaccaccctaaatgggataactaagagtatctactgcagtcatttcagaggacagagaaggaaaatattttaatttgctttaatataacctcttttcagtagatcacaaatgagtttacaaactacttttttttctctttaatttaggtgtttgcagataattttcattatacaactatatccgtagctgtatgtgtgtatagttacataatggtaactacacacgatacagaagaatcagtaaattcatggattattttgctgaggttttaaattttaaagcctctgtttcagaattttacacttgatcaaggagaaaaataaatgtgtagtctaacatttgctttctggagttaattaactgatctgtaagaaccactgcatatgtcttaaaatgtaaacatatttacatttgttgtatttgttattgagcctttaaggttaggcccagaatgaacagaccatagcaagtaaacaaataatttttagaatcaaagtattaatagaagaccagttcatggatttgcttattctatcctgctgagacaaaactcatgagtgtgcacacacatgtgaatatatccctacgaaacagtctatcttctcataggcttaaattatagtcatggctattaaagaaattaacagcatccagccacatgcaactttccaaccttcagtactattaggtgattaaaatcaacaaatatgaagtttagttcatttttcccttaaaattccaacaaagatcaaaaggttgtatctagaactaattgccatcaagttccaattcaatgtcatttaaagtaatgtaaccacacatttggtattttcaataggaaggttaattaggtattgtgcaaactgcctgcaacggaagcactcagtccttatctaacttgtcccttcctggccccaacatgctaactgccccatccccaattctgggcaaactgatcacaatgtgcaaaaaataatatattatctatttataattttaaaatatatacagccagctcaaaaacaacaacaaaccccatcaacatagtccagctgaaatctccactgg

SEQ ID NO: 361454 - DNA, 3492 bp, Homo sapiens
tgccacaattccctgagatctcccaggtggcagctgcctccccaagacaggctcactcaccatgaccaagctgagcgcccaagtcaaaggctctctcaacatcaccaccccggggctgcagatatggaggatcgaggccatgcagatggtgcctgttccttccagcacctttggaagcttcttcgatggtgactgctacatcatcctggctatccacaagacagccagcagcctgtcctatgacatccactactggattggccaggactcatccctggatgagcagggggcagctgccatctacaccacacagatggatgacttcctgaagggccgggctgtgcagcaccgcgaggtccagggcaacgagagcgaggccttccgaggctacttcaagcaaggccttgtgatccggaaagggggcgtggcttctggcatgaagcacgtggagaccaactcctatgacgtccagaggctgctgcatgtcaagggcaagaggaacgtggtagctggagaggtagagatgtcctggaagagtttcaaccgaggggatgttttcctcctggaccttgggaagcttatcatccagtggaatggaccggaaagcacccgtatggagagactcaggggcatgactctggccaaggagatccgagaccaggagcggggagggcgcacctatgtaggcgtggtggacggagagaatgaattggcatccccgaagctgatggaggtgatgaaccacgtgctgggcaagcgcagggagctgaaggcggccgtgcccgacacggtggtggagccggcactcaaggctgcactcaaactgtaccatgtgtctgactccgaggggaatctggtggtgagggaagtcgccacacggccactgacacaggacctgctcagtcacgaggactgttacatcctggaccaggggggcctgaagatctacgtgtggaaagggaagaaagccaatgagcaggagaagaagggagccatgagccatgcgctgaacttcatcaaagccaagcagtacccaccaagcacacaggtggaggtgcagaatgatggggctgagtcggccgtctttcagcagctcttccagaagtggacagcgtccaaccggacctcaggcctaggcaaaacccacactgtgggctccgtggccaaagtggaacaggtgaagttcgatgccacatccatgcatgtcaagcctcaggtggctgcccagcagaagatggtagatgatgggagtggggaagtgcaggtgtggcgcattgagaacctagagctggtacctgtggattccaagtggctaggccacttctatgggggcgactgctacctgctgctctacacctacctcatcggcgagaagcagcattacctgctctacgtttggcagggcagccaggccagccaagatgaaattacagcatcagcttatcaagccgtcatcctggaccagaagtacaatggtgaaccagtccagatccgggtcccaatgggcaaggagccacctcatcttatgtccatcttcaagggacgcatggtggtctaccagggaggcacctcccgaactaacaacttggagaccgggccctccacacggctgttccaggtccagggaactggcgccaacaacaccaaggcctttgaggtcccagcgcgggccaatttcctcaattccaatgatgtctttgtcctcaagacccagtcttgctgctatctatggtgtgggaagggttgtagcggggacgagcgggagatggccaagatggttgctgacaccatctcccggacggagaagcaagtggtggtggaagggcaggagccagccaacttctggatggccctgggtgggaaggccccctatgccaacaccaagagactacaggaagaaaacctggtcatcaccccccggctctttgagtgttccaacaagactgggcgcttcctggccacagagatccctgacttcaatcaggatgacttggaagaggatgatgtgttcctactagatgtctgggaccaggtcttcttctggattgggaaacatgccaacgaggaggagaagaaggccgcagcaaccactgcacaggaatacctcaagacccatcccagcgggcgtgaccctgagacccccatcattgtggtgaagcagggacacgagccccccaccttcacaggctggttcctggcttgggatcccttcaagtggagtaacaccaaatcctatgaggacctgaaggcggagcttggcaactctagggactggagccagatcactgctgaggtcacaagccccaaagtggacgtgttcaatgctaacagcaacctcagttctgggcctctgcccatcttccccctggagcagctagtgaacaagcctgtagaggagctccccgagggtgtggaccccagcaggaaggaggaacacctgtccattgaagatttcactcaggcctttgggatgactccagctgccttctctgctctgcctcgatggaagcaacaaaacctcaagaaagaaaaaggactattttgagaagagtagctgtggttgtaaagcagtaccctaccctgattgtagggtctcattttctcaccgatattagtcctacaccaattgaagtgaaattttgcagatgtgcctatgagcacaaacttctgtggcaaatgccagttttgtttaataatgtacctattccttcagaaagatgataccccaaaaggagcctatggtcctcatttcaacttctaaggtcgctagattgtttctatcctgaggtattgcatcaattttaatactcctatagttttctcttcttagaagagcacaaacactccatggaacattagagttctgaggcactaccctagcttgtcctctatcatgactcatttttatctatggcaggtaggctgaagcactttgcaggtttacatcttccccagagtaacagcttttccttttcacatatactttccttactgccttactcagtgggtaagttaaagggctgaaggagagttgaatggtccacaagactaccctcttaagaggtttcacaaattccaaacagtaccagtgagagcagcacttccactggggctaggcttgagacctaaaggcaagtatgaaatgcatatgctacttcactccctctcccaacccttaataatgaggcaaagcaagagcctagtgaaggccaatgctaggtttacaaacttacccagaagcctctgcaaagcttcacaggctcctcagatgaaaataacaggaatcaatggggactacggccagacactggtttgccattctgttccttttaagaagtaacagtgctgcaaggaagtccatgtcagaaagccaacagaaggtgatttccacaactttgaacaggttgttacaagtatcagcaagaatgtgtccttttcagaaataacagtcaaatcaaagaaggttaataaaggctttaatttcatacacac

SEQ ID NO: 361455 - DNA, 5541 bp, Homo sapiens
tgccacaattccctgagatctcccaggtggcagctgcctccccaagacaggctcactcaccatgaccaagctgagcgcccaagtcaaaggctctctcaacatcaccaccccggggctgcagatatggaggatcgaggccatgcagatggtgcctgttccttccagcacctttggaagcttcttcgatggtgactgctacatcatcctggctatccacaagacagccagcagcctgtcctatgacatccactactggattggccaggactcatccctggatgagcagggggcagctgccatctacaccacacagatggatgacttcctgaagggccgggctgtgcagcaccgcgaggtccagggcaacgagagcgaggccttccgaggctacttcaagcaaggccttgtgatccggaaagggggcgtggcttctggcatgaagcacgtggagaccaactcctatgacgtccagaggctgctgcatgtcaagggcaagaggaacgtggtagctggagaggtagagatgtcctggaagagtttcaaccgaggggatgttttcctcctggaccttgggaagcttatcatccagtggaatggaccggaaagcacccgtatggagagactcaggggcatgactctggccaaggagatccgagaccaggagcggggagggcgcacctatgtaggcgtggtggacggagagaatgaattggcatccccgaagctgatggaggtgatgaaccacgtgctgggcaagcgcagggagctgaaggcggccgtgcccgacacggtggtggagccggcactcaaggctgcactcaaactgtaccatgtgtctgactccgaggggaatctggtggtgagggaagtcgccacacggccactgacacaggacctgctcagtcacgaggactgttacatcctggaccaggggggcctgaagatctacgtgtggaaagggaagaaagccaatgagcaggagaagaagggagccatgagccatgcgctgaacttcatcaaagccaagcagtacccaccaagcacacaggtggaggtgcagaatgatggggctgagtcggccgtctttcagcagctcttccagaagtggacagcgtccaaccggacctcaggcctaggcaaaacccacactgtgggctccgtggccaaagtggaacaggtgaagttcgatgccacatccatgcatgtcaagcctcaggtggctgcccagcagaagatggtagatgatgggagtggggaagtgcaggtgtggcgcattgagaacctagagctggtacctgtggattccaagtggctaggccacttctatgggggcgactgctacctgctgctctacacctacctcatcggcgagaagcagcattacctgctctacgtttggcagggcagccaggccagccaagatgaaattacagcatcagcttatcaagccgtcatcctggaccagaagtacaatggtgaaccagtccagatccgggtcccaatgggcaaggagccacctcatcttatgtccatcttcaagggacgcatggtggtctaccagggaggcacctcccgaactaacaacttggagaccgggccctccacacggctgttccaggtccagggaactggcgccaacaacaccaaggcctttgaggtcccagcgcgggccaatttcctcaattccaatgatgtctttgtcctcaagacccagtcttgctgctatctatggtgtgggaagggttgtagcggggacgagcgggagatggccaagatggttgctgacaccatctcccggacggagaagcaagtggtggtggaagggcaggagccagccaacttctggatggccctgggtgggaaggccccctatgccaacaccaagagactacaggaagaaaacctggtcatcaccccccggctctttgagtgttccaacaagactgggcgcttcctggccacagagatccctgacttcaatcaggatgacttggaagaggatgatgtgttcctactagatgtctgggaccaggtcttcttctggattgggaaacatgccaacgaggaggagaagaaggccgcagcaaccactgcacaggaatacctcaagacccatcccagcgggcgtgaccctgagacccccatcattgtggtgaagcagggacacgagccccccaccttcacaggctggttcctggcttgggatcccttcaagtggagtaacaccaaatcctatgaggacctgaaggcggagcttggcaactctagggactggagccagatcactgctgaacacctgtccattgaagatttcactcaggcctttgggatgactccagctgccttctctgctctgcctcgatggaagcaacaaaacctcaagaaagaaaaaggactattttgagaagagtagctgtggttgtaaagcagtaccctaccctgattgtagggtctcattttctcaccgatattagtcctacaccaattgaagtgaaattttgcagatgtgcctatgagcacaaacttctgtggcaaatgccagttttgtttaataatgtacctattccttcagaaagatgataccccaaaaggagcctatggtcctcatttcaacttctaaggtcgctagattgtttctatcctgaggtattgcatcaattttaatactcctatagttttctcttcttagaagagcacaaacactccatggaacattagagttctgaggcactaccctagcttgtcctctatcatgactcatttttatctatggcaggtaggctgaagcactttgcaggtttacatcttccccagagtaacagcttttccttttcacatatactttccttactgccttactcagtgggtaagttaaagggctgaaggagagttgaatggtccacaagactaccctcttaagaggtttcacaaattccaaacagtaccagtgagagcagcacttccactggggctaggcttgagacctaaaggcaagtatgaaatgcatatgctacttcactccctctcccaacccttaataatgaggcaaagcaagagcctagtgaaggccaatgctaggtttacaaacttacccagaagcctctgcaaagcttcacaggctcctcagatgaaaataacaggaatcaatggggactacggccagacactggtttgccattctgttccttttaagaagtaacagtgctgcaaggaagtccatgtcagaaagccaacagaaggtgatttccacaactttgaacaggttgttacaagtatcagcaagaatgtgtccttttcagaaataacagtcaaatcaaagaaggttaataaaggctttaatttcatacacacaaaaaaactctatgcataatttaaaaaggaaacaaaaacaaagaaaaaccgtaaaggatacagaggaacagttctgctaaaacacagataaaagtgccgctccatacaaaacataaagaatcagaatcaaaagtcactctgaacataaagaaaaaaaatcatctcacaaataatgtggccacagctgccagaaaacctggtagtggctcaattaggcaaagtgtaggaatctcatttttgtttttctctccttaagtttaaagaaacaacaatgacaataggccagagaagttagggagggaaagaaaagctcaaagggagggaaacctggggacaagaggtgtgcacacccacatgtggtctcactcttcacacaggcccactatttttgaagtagaccagtttagttgactgttcttctttgttctggcatctgactggaccaacctggaacctggtccagaccctcacccactctattcttatgccaatggacatacctatactttgaacctctgtacttttaagaaaagtccaatgttacaaaatcaaatgcttatattcagactggcacactttttaaataaaaactccatacacctcagacatatagcacacatggagacaacttactaattgtgtgtaagtatgatacaatgaatgagactgcctgaagtctagtaatcaaagcatgccataaggtgaatgattgtggttaaacacagcaaaataattgtcacaaaactttcaaggcctaacaaattagaattttccaataaaaaatatatattttttcagatgttaataagacatatcagtagagacaaaattaggattttgaagtaatgcaataaaaagatgttggagggcagaagtctatttagtttttgtatacacttgcaagagtgcattactcagtataaagcaaaatggggaggaaaaagacatccatccattttattggaacacttttatgtgacttgaatctggtgttaggttgttgatttttctaaaaatctcctatatatacaaaatccatatgtacttggagatccagctgttgccccctgtttaaaacaaaagaccacctcggggggtcaattaaattaaaaaggccctccaaccaccctaaatgggataactaagagtatctactgcagtcatttcagaggacagagaaggaaaatattttaatttgctttaatataacctcttttcagtagatcacaaatgagtttacaaactacttttttttctctttaatttaggtgtttgcagataattttcattatacaactatatccgtagctgtatgtgtgtatagttacataatggtaactacacacgatacagaagaatcagtaaattcatggattattttgctgaggttttaaattttaaagcctctgtttcagaattttacacttgatcaaggagaaaaataaatgtgtagtctaacatttgctttctggagttaattaactgatctgtaagaaccactgcatatgtcttaaaatgtaaacatatttacatttgttgtatttgttattgagcctttaaggttaggcccagaatgaacagaccatagcaagtaaacaaataatttttagaatcaaagtattaatagaagaccagttcatggatttgcttattctatcctgctgagacaaaactcatgagtgtgcacacacatgtgaatatatccctacgaaacagtctatcttctcataggcttaaattatagtcatggctattaaagaaattaacagcatccagccacatgcaactttccaaccttcagtactattaggtgattaaaatcaacaaatatgaagtttagttcatttttcccttaaaattccaacaaagatcaaaaggttgtatctagaactaattgccatcaagttccaattcaatgtcatttaaagtaatgtaaccacacatttggtattttcaataggaaggttaattaggtattgtgcaaactgcctgcaacggaagcactcagtccttatctaacttgtcccttcctggccccaacatgctaactgccccatccccaattctgggcaaactgatcacaatgtgcaaaaaataatatattatctatttataattttaaaatatatacagccagctcaaaaacaacaacaaaccccatcaacatagtccagctgaaatctccactgg

SEQ ID NO: 361456 - DNA, 3358 bp, Homo sapiens
  misc_feature (11)..(11): n is a, c, g, or t
gctgctccagngggaagatgggcagaggcccagaactgaggttgctgttagcattgaacacgtccactttggggctccccgagggtgtggaccccagcaggaaggaggaacacctgtccattgaagatttcactcaggcctttgggatgactccagctgccttctctgctctgcctcgatggaagcaacaaaacctcaagaaagaaaaaggactattttgagaagagtagctgtggttgtaaagcagtaccctaccctgattgtagggtctcattttctcaccgatattagtcctacaccaattgaagtgaaattttgcagatgtgcctatgagcacaaacttctgtggcaaatgccagttttgtttaataatgtacctattccttcagaaagatgataccccaaaaggagcctatggtcctcatttcaacttctaaggtcgctagattgtttctatcctgaggtattgcatcaattttaatactcctatagttttctcttcttagaagagcacaaacactccatggaacattagagttctgaggcactaccctagcttgtcctctatcatgactcatttttatctatggcaggtaggctgaagcactttgcaggtttacatcttccccagagtaacagcttttccttttcacatatactttccttactgccttactcagtgggtaagttaaagggctgaaggagagttgaatggtccacaagactaccctcttaagaggtttcacaaattccaaacagtaccagtgagagcagcacttccactggggctaggcttgagacctaaaggcaagtatgaaatgcatatgctacttcactccctctcccaacccttaataatgaggcaaagcaagagcctagtgaaggccaatgctaggtttacaaacttacccagaagcctctgcaaagcttcacaggctcctcagatgaaaataacaggaatcaatggggactacggccagacactggtttgccattctgttccttttaagaagtaacagtgctgcaaggaagtccatgtcagaaagccaacagaaggtgatttccacaactttgaacaggttgttacaagtatcagcaagaatgtgtccttttcagaaataacagtcaaatcaaagaaggttaataaaggctttaatttcatacacacaaaaaaactctatgcataatttaaaaaggaaacaaaaacaaagaaaaaccgtaaaggatacagaggaacagttctgctaaaacacagataaaagtgccgctccatacaaaacataaagaatcagaatcaaaagtcactctgaacataaagaaaaaaaatcatctcacaaataatgtggccacagctgccagaaaacctggtagtggctcaattaggcaaagtgtaggaatctcatttttgtttttctctccttaagtttaaagaaacaacaatgacaataggccagagaagttagggagggaaagaaaagctcaaagggagggaaacctggggacaagaggtgtgcacacccacatgtggtctcactcttcacacaggcccactatttttgaagtagaccagtttagttgactgttcttctttgttctggcatctgactggaccaacctggaacctggtccagaccctcacccactctattcttatgccaatggacatacctatactttgaacctctgtacttttaagaaaagtccaatgttacaaaatcaaatgcttatattcagactggcacactttttaaataaaaactccatacacctcagacatatagcacacatggagacaacttactaattgtgtgtaagtatgatacaatgaatgagactgcctgaagtctagtaatcaaagcatgccataaggtgaatgattgtggttaaacacagcaaaataattgtcacaaaactttcaaggcctaacaaattagaattttccaataaaaaatatatattttttcagatgttaataagacatatcagtagagacaaaattaggattttgaagtaatgcaataaaaagatgttggagggcagaagtctatttagtttttgtatacacttgcaagagtgcattactcagtataaagcaaaatggggaggaaaaagacatccatccattttattggaacacttttatgtgacttgaatctggtgttaggttgttgatttttctaaaaatctcctatatatacaaaatccatatgtacttggagatccagctgttgccccctgtttaaaacaaaagaccacctcggggggtcaattaaattaaaaaggccctccaaccaccctaaatgggataactaagagtatctactgcagtcatttcagaggacagagaaggaaaatattttaatttgctttaatataacctcttttcagtagatcacaaatgagtttacaaactacttttttttctctttaatttaggtgtttgcagataattttcattatacaactatatccgtagctgtatgtgtgtatagttacataatggtaactacacacgatacagaagaatcagtaaattcatggattattttgctgaggttttaaattttaaagcctctgtttcagaattttacacttgatcaaggagaaaaataaatgtgtagtctaacatttgctttctggagttaattaactgatctgtaagaaccactgcatatgtcttaaaatgtaaacatatttacatttgttgtatttgttattgagcctttaaggttaggcccagaatgaacagaccatagcaagtaaacaaataatttttagaatcaaagtattaatagaagaccagttcatggatttgcttattctatcctgctgagacaaaactcatgagtgtgcacacacatgtgaatatatccctacgaaacagtctatcttctcataggcttaaattatagtcatggctattaaagaaattaacagcatccagccacatgcaactttccaaccttcagtactattaggtgattaaaatcaacaaatatgaagtttagttcatttttcccttaaaattccaacaaagatcaaaaggttgtatctagaactaattgccatcaagttccaattcaatgtcatttaaagtaatgtaaccacacatttggtattttcaataggaaggttaattaggtattgtgcaaactgcctgcaacggaagcactcagtccttatctaacttgtcccttcctggccccaacatgctaactgccccatccccaattctgggcaaactgatcacaatgtgcaaaaaataatatattatctatttataattttaaaatatatacagccagctcaaaaacaacaacaaaccccatcaacatagtccagctgaaatctccactgg

SEQ ID NO: 361457 - DNA, 3441 bp, Homo sapiens
tgccacaattccctgagatctcccaggtggcagctgcctccccaagacaggctcactcaccatgaccaagctgagcgcccaagtcaaaggctctctcaacatcaccaccccggggctgcagatatggaggatcgaggccatgcagatggtgcctgttccttccagcacctttggaagcttcttcgatggtgactgctacatcatcctggctatccacaagacagccagcagcctgtcctatgacatccactactggattggccaggactcatccctggatgagcagggggcagctgccatctacaccacacagatggatgacttcctgaagggccgggctgtgcagcaccgcgaggtccagggcaacgagagcgaggccttccgaggctacttcaagcaaggccttgtgatccggaaagggggcgtggcttctggcatgaagcacgtggagaccaactcctatgacgtccagaggctgctgcatgtcaagggcaagaggaacgtggtagctggagaggtagagatgtcctggaagagtttcaaccgaggggatgttttcctcctggaccttgggaagcttatcatccagtggaatggaccggaaagcacccgtatggagagactcaggggcatgactctggccaaggagatccgagaccaggagcggggagggcgcacctatgtaggcgtggtggacggagagaatgaattggcatccccgaagctgatggaggtgatgaaccacgtgctgggcaagcgcagggagctgaaggcggccgtgcccgacacggtggtggagccggcactcaaggctgcactcaaactgtaccatgtgtctgactccgaggggaatctggtggtgagggaagtcgccacacggccactgacacaggacctgctcagtcacgaggactgttacatcctggaccaggggggcctgaagatctacgtgtggaaagggaagaaagccaatgctaggtttacaaacttacccagaagcctctgcaaagcttcacaggctcctcagatgaaaataacaggaatcaatggggactacggccagacactggtttgccattctgttccttttaagaagtaacagtgctgcaaggaagtccatgtcagaaagccaacagaaggtgatttccacaactttgaacaggttgttacaagtatcagcaagaatgtgtccttttcagaaataacagtcaaatcaaagaaggttaataaaggctttaatttcatacacacaaaaaaactctatgcataatttaaaaaggaaacaaaaacaaagaaaaaccgtaaaggatacagaggaacagttctgctaaaacacagataaaagtgccgctccatacaaaacataaagaatcagaatcaaaagtcactctgaacataaagaaaaaaaatcatctcacaaataatgtggccacagctgccagaaaacctggtagtggctcaattaggcaaagtgtaggaatctcatttttgtttttctctccttaagtttaaagaaacaacaatgacaataggccagagaagttagggagggaaagaaaagctcaaagggagggaaacctggggacaagaggtgtgcacacccacatgtggtctcactcttcacacaggcccactatttttgaagtagaccagtttagttgactgttcttctttgttctggcatctgactggaccaacctggaacctggtccagaccctcacccactctattcttatgccaatggacatacctatactttgaacctctgtacttttaagaaaagtccaatgttacaaaatcaaatgcttatattcagactggcacactttttaaataaaaactccatacacctcagacatatagcacacatggagacaacttactaattgtgtgtaagtatgatacaatgaatgagactgcctgaagtctagtaatcaaagcatgccataaggtgaatgattgtggttaaacacagcaaaataattgtcacaaaactttcaaggcctaacaaattagaattttccaataaaaaatatatattttttcagatgttaataagacatatcagtagagacaaaattaggattttgaagtaatgcaataaaaagatgttggagggcagaagtctatttagtttttgtatacacttgcaagagtgcattactcagtataaagcaaaatggggaggaaaaagacatccatccattttattggaacacttttatgtgacttgaatctggtgttaggttgttgatttttctaaaaatctcctatatatacaaaatccatatgtacttggagatccagctgttgccccctgtttaaaacaaaagaccacctcggggggtcaattaaattaaaaaggccctccaaccaccctaaatgggataactaagagtatctactgcagtcatttcagaggacagagaaggaaaatattttaatttgctttaatataacctcttttcagtagatcacaaatgagtttacaaactacttttttttctctttaatttaggtgtttgcagataattttcattatacaactatatccgtagctgtatgtgtgtatagttacataatggtaactacacacgatacagaagaatcagtaaattcatggattattttgctgaggttttaaattttaaagcctctgtttcagaattttacacttgatcaaggagaaaaataaatgtgtagtctaacatttgctttctggagttaattaactgatctgtaagaaccactgcatatgtcttaaaatgtaaacatatttacatttgttgtatttgttattgagcctttaaggttaggcccagaatgaacagaccatagcaagtaaacaaataatttttagaatcaaagtattaatagaagaccagttcatggatttgcttattctatcctgctgagacaaaactcatgagtgtgcacacacatgtgaatatatccctacgaaacagtctatcttctcataggcttaaattatagtcatggctattaaagaaattaacagcatccagccacatgcaactttccaaccttcagtactattaggtgattaaaatcaacaaatatgaagtttagttcatttttcccttaaaattccaacaaagatcaaaaggttgtatctagaactaattgccatcaagttccaattcaatgtcatttaaagtaatgtaaccacacatttggtattttcaataggaaggttaattaggtattgtgcaaactgcctgcaacggaagcactcagtccttatctaacttgtcccttcctggccccaacatgctaactgccccatccccaattctgggcaaactgatcacaatgtgcaaaaaataatatattatctatttataattttaaaatatatacagccagctcaaaaacaacaacaaaccccatcaacatagtccagctgaaatctccactgg

SEQ ID NO: 361458 - DNA, 1191 bp, Homo sapiens
tgccacaattccctgagatctcccaggtggcagctgcctccccaagacaggctcactcaccatgaccaagctgagcgcccaagtcaaaggctctctcaacatcaccaccccggggctgcagatatggaggatcgaggccatgcagatggtgcctgttccttccagcacctttggaagcttcttcgatggtgactgctacatcatcctggctatccacaagacagccagcagcctgtcctatgacatccactactggattggccaggactcatccctggatgagcagggggcagctgccatctacaccacacagatggatgacttcctgaagggccgggctgtgcagcaccgcgaggtccagggcaacgagagcgaggccttccgaggctacttcaagcaaggccttgtgatccggaaagggggcgtggcttctggcatgaagcacgtggagaccaactcctatgacgtccagaggctgctgcatgtcaagggcaagaggaacgtggtagctggagaggtagagatgtcctggaagagtttcaaccgaggggatgttttcctcctggaccttgggaagcttatcatccagtggaatggaccggaaagcacccgtatggagagactcaggggcatgactctggccaaggagatccgagaccaggagcggggagggcgcacctatgtaggcgtggtggacggagagaatgaattggcatccccgaagctgatggaggtgatgaaccacgtgctgggcaagcgcagggagctgaaggcggccgtgcccgacacggtggtggagccggcactcaaggctgcactcaaactgtaccatgtgtctgactccgaggggaatctggtggtgagggaagtcgccacacggccactgacacaggacctgctcagtcacgaggactgttacatcctggaccaggggggcctgaagatctacgtgtggaaagggaagaaagccaatgagcaggagaagaagggagccatgagccatgcgctgaacttcatcaaagccaagcagtacccaccaagcacacaggtggaggtgcagaatgatggggctgagtcggccgtctttcagcagctcttccagaagtggacagcgtccaaccggacctcaggcctaggcaaaacccacactgtgggctccgtgggtgagggccaggcgggggcagtgaggga

SEQ ID NO: 361459 - DNA, 396 bp, Homo sapiens
tccagggaactggcgccaacaacaccaaggcctttgaggtcccagcgcgggccaatttcctcaattccaatgatgtctttgtcctcaagacccagtcttgctgctatctatggtgtgggaaggtgtgttcagggtctagaggcctccccatccgcaagtgggtcctgggagtcccccagtttcgcagcagccctaggtcagggcaggaacccctggccaactaagttgtgcctgctcaattctcagccgcctctggagcccagtctctccctcctcagtagctctgggtctatccttctgcctcatcaatgaccatcctcagattctctgcctctctgtcggagtcagtctctcttgttctgtttctctggccacctccatctgtccctgtgttgg

SEQ ID NO: 361460 - DNA, 5628 bp, Homo sapiens
tgccacaattccctgagatctcccaggtggcagctgcctccccaagacaggctcactcaccatgaccaagctgagcgcccaagtcaaaggctctctcaacatcaccaccccggggctgcagatatggaggatcgaggccatgcagatggtgcctgttccttccagcacctttggaagcttcttcgatggtgactgctacatcatcctggctatccacaagacagccagcagcctgtcctatgacatccactactggattggccaggactcatccctggatgagcagggggcagctgccatctacaccacacagatggatgacttcctgaagggccgggctgtgcagcaccgcgaggtccagggcaacgagagcgaggccttccgaggctacttcaagcaaggccttgtgatccggaaagggggcgtggcttctggcatgaagcacgtggagaccaactcctatgacgtccagaggctgctgcatgtcaagggcaagaggaacgtggtagctggagaggtagagatgtcctggaagagtttcaaccgaggggatgttttcctcctggaccttgggaagcttatcatccagtggaatggaccggaaagcacccgtatggagagactcaggggcatgactctggccaaggagatccgagaccaggagcggggagggcgcacctatgtaggcgtggtggacggagagaatgaattggcatccccgaagctgatggaggtgatgaaccacgtgctgggcaagcgcagggagctgaaggcggccgtgcccgacacggtggtggagccggcactcaaggctgcactcaaactgtaccatgtgtctgactccgaggggaatctggtggtgagggaagtcgccacacggccactgacacaggacctgctcagtcacgaggactgttacatcctggaccaggggggcctgaagatctacgtgtggaaagggaagaaagccaatgagcaggagaagaagggagccatgagccatgcgctgaacttcatcaaagccaagcagtacccaccaagcacacaggtggaggtgcagaatgatggggctgagtcggccgtctttcagcagctcttccagaagtggacagcgtccaaccggacctcaggcctaggcaaaacccacactgtgggctccgtggccaaagtggaacaggtgaagttcgatgccacatccatgcatgtcaagcctcaggtggctgcccagcagaagatggtagatgatgggagtggggaagtgcaggtgtggcgcattgagaacctagagctggtacctgtggattccaagtggctaggccacttctatgggggcgactgctacctgctgctctacacctacctcatcggcgagaagcagcattacctgctctacgtttggcagggcagccaggccagccaagatgaaattacagcatcagcttatcaagccgtcatcctggaccagaagtacaatggtgaaccagtccagatccgggtcccaatgggcaaggagccacctcatcttatgtccatcttcaagggacgcatggtggtctaccagggaggcacctcccgaactaacaacttggagaccgggccctccacacggctgttccaggtccagggaactggcgccaacaacaccaaggcctttgaggtcccagcgcgggccaatttcctcaattccaatgatgtctttgtcctcaagacccagtcttgctgctatctatggtgtgggaagggttgtagcggggacgagcgggagatggccaagatggttgctgacaccatctcccggacggagaagcaagtggtggtggaagggcaggagccagccaacttctggatggccctgggtgggaaggccccctatgccaacaccaagagactacaggaagaaaacctggtcatcaccccccggctctttgagtgttccaacaagactgggcgcttcctggccacagagatccctgacttcaatcaggatgacttggaagaggatgatgtgttcctactagatgtctgggaccaggtcttcttctggattgggaaacatgccaacgaggaggagaagaaggccgcagcaaccactgcacaggaatacctcaagacccatcccagcgggcgtgaccctgagacccccatcattgtggtgaagcagggacacgagccccccaccttcacaggctggttcctggcttgggatcccttcaagtggagtaacaccaaatcctatgaggacctgaaggcggagcttggcaactctagggactggagccagatcactgctgaggtcacaagccccaaagtggacgtgttcaatgctaacagcaacctcagttctgggcctctgcccatcttccccctggagcagctagtgaacaagcctgtagaggagctccccgagggtgtggaccccagcaggaaggaggaacacctgtccattgaagatttcactcaggcctttgggatgactccagctgccttctctgctctgcctcgatggaagcaacaaaacctcaagaaagaaaaaggactattttgagaagagtagctgtggttgtaaagcagtaccctaccctgattgtagggtctcattttctcaccgatattagtcctacaccaattgaagtgaaattttgcagatgtgcctatgagcacaaacttctgtggcaaatgccagttttgtttaataatgtacctattccttcagaaagatgataccccaaaaggagcctatggtcctcatttcaacttctaaggtcgctagattgtttctatcctgaggtattgcatcaattttaatactcctatagttttctcttcttagaagagcacaaacactccatggaacattagagttctgaggcactaccctagcttgtcctctatcatgactcatttttatctatggcaggtaggctgaagcactttgcaggtttacatcttccccagagtaacagcttttccttttcacatatactttccttactgccttactcagtgggtaagttaaagggctgaaggagagttgaatggtccacaagactaccctcttaagaggtttcacaaattccaaacagtaccagtgagagcagcacttccactggggctaggcttgagacctaaaggcaagtatgaaatgcatatgctacttcactccctctcccaacccttaataatgaggcaaagcaagagcctagtgaaggccaatgctaggtttacaaacttacccagaagcctctgcaaagcttcacaggctcctcagatgaaaataacaggaatcaatggggactacggccagacactggtttgccattctgttccttttaagaagtaacagtgctgcaaggaagtccatgtcagaaagccaacagaaggtgatttccacaactttgaacaggttgttacaagtatcagcaagaatgtgtccttttcagaaataacagtcaaatcaaagaaggttaataaaggctttaatttcatacacacaaaaaaactctatgcataatttaaaaaggaaacaaaaacaaagaaaaaccgtaaaggatacagaggaacagttctgctaaaacacagataaaagtgccgctccatacaaaacataaagaatcagaatcaaaagtcactctgaacataaagaaaaaaaatcatctcacaaataatgtggccacagctgccagaaaacctggtagtggctcaattaggcaaagtgtaggaatctcatttttgtttttctctccttaagtttaaagaaacaacaatgacaataggccagagaagttagggagggaaagaaaagctcaaagggagggaaacctggggacaagaggtgtgcacacccacatgtggtctcactcttcacacaggcccactatttttgaagtagaccagtttagttgactgttcttctttgttctggcatctgactggaccaacctggaacctggtccagaccctcacccactctattcttatgccaatggacatacctatactttgaacctctgtacttttaagaaaagtccaatgttacaaaatcaaatgcttatattcagactggcacactttttaaataaaaactccatacacctcagacatatagcacacatggagacaacttactaattgtgtgtaagtatgatacaatgaatgagactgcctgaagtctagtaatcaaagcatgccataaggtgaatgattgtggttaaacacagcaaaataattgtcacaaaactttcaaggcctaacaaattagaattttccaataaaaaatatatattttttcagatgttaataagacatatcagtagagacaaaattaggattttgaagtaatgcaataaaaagatgttggagggcagaagtctatttagtttttgtatacacttgcaagagtgcattactcagtataaagcaaaatggggaggaaaaagacatccatccattttattggaacacttttatgtgacttgaatctggtgttaggttgttgatttttctaaaaatctcctatatatacaaaatccatatgtacttggagatccagctgttgccccctgtttaaaacaaaagaccacctcggggggtcaattaaattaaaaaggccctccaaccaccctaaatgggaaatttgctttaatataacctcttttcagtagatcacaaatgagtttacaaactacttttttttctctttaatttaggtgtttgcagataattttcattatacaactatatccgtagctgtatgtgtgtatagttacataatggtaactacacacgatacagaagaatcagtaaattcatggattattttgctgaggttttaaattttaaagcctctgtttcagaattttacacttgatcaaggagaaaaataaatgtgtagtctaacatttgctttctggagttaattaactgatctgtaagaaccactgcatatgtcttaaaatgtaaacatatttacatttgttgtatttgttattgagcctttaaggttaggcccagaatgaacagaccatagcaagtaaacaaataatttttagaatcaaagtattaatagaagaccagttcatggatttgcttattctatcctgctgagacaaaactcatgagtgtgcacacacatgtgaatatatccctacgaaacagtctatcttctcataggcttaaattatagtcatggctattaaagaaattaacagcatccagccacatgcaactttccaaccttcagtactattaggtgattaaaatcaacaaatatgaagtttagttcatttttcccttaaaattccaacaaagatcaaaaggttgtatctagaactaattgccatcaagttccaattcaatgtcatttaaagtaatgtaaccacacatttggtattttcaataggaaggttaattaggtattgtgcaaactgcctgcaacggaagcactcagtccttatctaacttgtcccttcctggccccaacatgctaactgccccatccccaattctgggcaaactgatcacaatgtgcaaaaaataatatattatctatttataattttaaaatatatacagccagctcaaaaacaacaacaaaccccatcaacatagtccagctgaaatctccactgg

SEQ ID NO: 361461 - DNA, 5628 bp, Homo sapiens
tgccacaattccctgagatctcccaggtggcagctgcctccccaagacaggctcactcaccatgaccaagctgagcgcccaagtcaaaggctctctcaacatcaccaccccggggctgcagatatggaggatcgaggccatgcagatggtgcctgttccttccagcacctttggaagcttcttcgatggtgactgctacatcatcctggctatccacaagacagccagcagcctgtcctatgacatccactactggattggccaggactcatccctggatgagcagggggcagctgccatctacaccacacagatggatgacttcctgaagggccgggctgtgcagcaccgcgaggtccagggcaacgagagcgaggccttccgaggctacttcaagcaaggccttgtgatccggaaagggggcgtggcttctggcatgaagcacgtggagaccaactcctatgacgtccagaggctgctgcatgtcaagggcaagaggaacgtggtagctggagaggtagagatgtcctggaagagtttcaaccgaggggatgttttcctcctggaccttgggaagcttatcatccagtggaatggaccggaaagcacccgtatggagagactcaggggcatgactctggccaaggagatccgagaccaggagcggggagggcgcacctatgtaggcgtggtggacggagagaatgaattggcatccccgaagctgatggaggtgatgaaccacgtgctgggcaagcgcagggagctgaaggcggccgtgcccgacacggtggtggagccggcactcaaggctgcactcaaactgtaccatgtgtctgactccgaggggaatctggtggtgagggaagtcgccacacggccactgacacaggacctgctcagtcacgaggactgttacatcctggaccaggggggcctgaagatctacgtgtggaaagggaagaaagccaatgagcaggagaagaagggagccatgagccatgcgctgaacttcatcaaagccaagcagtacccaccaagcacacaggtggaggtgcagaatgatggggctgagtcggccgtctttcagcagctcttccagaagtggacagcgtccaaccggacctcaggcctaggcaaaacccacactgtgggctccgtggccaaagtggaacaggtgaagttcgatgccacatccatgcatgtcaagcctcaggtggctgcccagcagaagatggtagatgatgggagtggggaagtgcaggtgtggcgcattgagaacctagagctggtacctgtggattccaagtggctaggccacttctatgggggcgactgctacctgctgctctacacctacctcatcggcgagaagcagcattacctgctctacgtttggcagggcagccaggccagccaagatgaaattacagcatcagcttatcaagccgtcatcctggaccagaagtacaatggtgaaccagtccagatccgggtcccaatgggcaaggagccacctcatcttatgtccatcttcaagggacgcatggtggtctaccagggaggcacctcccgaactaacaacttggagaccgggccctccacacggctgttccaggtccagggaactggcgccaacaacaccaaggcctttgaggtcccagcgcgggccaatttcctcaattccaatgatgtctttgtcctcaagacccagtcttgctgctatctatggtgtgggaagggttgtagcggggacgagcgggagatggccaagatggttgctgacaccatctcccggacggagaagcaagtggtggtggaagggcaggagccagccaacttctggatggccctgggtgggaaggccccctatgccaacaccaagagactacaggaagaaaacctggtcatcaccccccggctctttgagtgttccaacaagactgggcgcttcctggccacagagatccctgacttcaatcaggatgacttggaagaggatgatgtgttcctactagatgtctgggaccaggtcttcttctggattgggaaacatgccaacgaggaggagaagaaggccgcagcaaccactgcacaggaatacctcaagacccatcccagcgggcgtgaccctgagacccccatcattgtggtgaagcagggacacgagccccccaccttcacaggctggttcctggcttgggatcccttcaagtggagtaacaccaaatcctatgaggacctgaaggcggagcttggcaactctagggactggagccagatcactgctgaggtcacaagccccaaagtggacgtgttcaatgctaacagcaacctcagttctgggcctctgcccatcttccccctggagcagctagtgaacaagcctgtagaggagctccccgagggtgtggaccccagcaggaaggaggaacacctgtccattgaagatttcactcaggcctttgggatgactccagctgccttctctgctctgcctcgatggaagcaacaaaacctcaagaaagaattgtagggtctcattttctcaccgatattagtcctacaccaattgaagtgaaattttgcagatgtgcctatgagcacaaacttctgtggcaaatgccagttttgtttaataatgtacctattccttcagaaagatgataccccaaaaggagcctatggtcctcatttcaacttctaaggtcgctagattgtttctatcctgaggtattgcatcaattttaatactcctatagttttctcttcttagaagagcacaaacactccatggaacattagagttctgaggcactaccctagcttgtcctctatcatgactcatttttatctatggcaggtaggctgaagcactttgcaggtttacatcttccccagagtaacagcttttccttttcacatatactttccttactgccttactcagtgggtaagttaaagggctgaaggagagttgaatggtccacaagactaccctcttaagaggtttcacaaattccaaacagtaccagtgagagcagcacttccactggggctaggcttgagacctaaaggcaagtatgaaatgcatatgctacttcactccctctcccaacccttaataatgaggcaaagcaagagcctagtgaaggccaatgctaggtttacaaacttacccagaagcctctgcaaagcttcacaggctcctcagatgaaaataacaggaatcaatggggactacggccagacactggtttgccattctgttccttttaagaagtaacagtgctgcaaggaagtccatgtcagaaagccaacagaaggtgatttccacaactttgaacaggttgttacaagtatcagcaagaatgtgtccttttcagaaataacagtcaaatcaaagaaggttaataaaggctttaatttcatacacacaaaaaaactctatgcataatttaaaaaggaaacaaaaacaaagaaaaaccgtaaaggatacagaggaacagttctgctaaaacacagataaaagtgccgctccatacaaaacataaagaatcagaatcaaaagtcactctgaacataaagaaaaaaaatcatctcacaaataatgtggccacagctgccagaaaacctggtagtggctcaattaggcaaagtgtaggaatctcatttttgtttttctctccttaagtttaaagaaacaacaatgacaataggccagagaagttagggagggaaagaaaagctcaaagggagggaaacctggggacaagaggtgtgcacacccacatgtggtctcactcttcacacaggcccactatttttgaagtagaccagtttagttgactgttcttctttgttctggcatctgactggaccaacctggaacctggtccagaccctcacccactctattcttatgccaatggacatacctatactttgaacctctgtacttttaagaaaagtccaatgttacaaaatcaaatgcttatattcagactggcacactttttaaataaaaactccatacacctcagacatatagcacacatggagacaacttactaattgtgtgtaagtatgatacaatgaatgagactgcctgaagtctagtaatcaaagcatgccataaggtgaatgattgtggttaaacacagcaaaataattgtcacaaaactttcaaggcctaacaaattagaattttccaataaaaaatatatattttttcagatgttaataagacatatcagtagagacaaaattaggattttgaagtaatgcaataaaaagatgttggagggcagaagtctatttagtttttgtatacacttgcaagagtgcattactcagtataaagcaaaatggggaggaaaaagacatccatccattttattggaacacttttatgtgacttgaatctggtgttaggttgttgatttttctaaaaatctcctatatatacaaaatccatatgtacttggagatccagctgttgccccctgtttaaaacaaaagaccacctcggggggtcaattaaattaaaaaggccctccaaccaccctaaatgggataactaagagtatctactgcagtcatttcagaggacagagaaggaaaatattttaatttgctttaatataacctcttttcagtagatcacaaatgagtttacaaactacttttttttctctttaatttaggtgtttgcagataattttcattatacaactatatccgtagctgtatgtgtgtatagttacataatggtaactacacacgatacagaagaatcagtaaattcatggattattttgctgaggttttaaattttaaagcctctgtttcagaattttacacttgatcaaggagaaaaataaatgtgtagtctaacatttgctttctggagttaattaactgatctgtaagaaccactgcatatgtcttaaaatgtaaacatatttacatttgttgtatttgttattgagcctttaaggttaggcccagaatgaacagaccatagcaagtaaacaaataatttttagaatcaaagtattaatagaagaccagttcatggatttgcttattctatcctgctgagacaaaactcatgagtgtgcacacacatgtgaatatatccctacgaaacagtctatcttctcataggcttaaattatagtcatggctattaaagaaattaacagcatccagccacatgcaactttccaaccttcagtactattaggtgattaaaatcaacaaatatgaagtttagttcatttttcccttaaaattccaacaaagatcaaaaggttgtatctagaactaattgccatcaagttccaattcaatgtcatttaaagtaatgtaaccacacatttggtattttcaataggaaggttaattaggtattgtgcaaactgcctgcaacggaagcactcagtccttatctaacttgtcccttcctggccccaacatgctaactgccccatccccaattctgggcaaactgatcacaatgtgcaaaaaataatatattatctatttataattttaaaatatatacagccagctcaaaaacaacaacaaaccccatcaacatagtccagctgaaatctccactgg

SEQ ID NO: 361462 - DNA, 4086 bp, Homo sapiens
tgccacaattccctgagatctcccaggtggcagctgcctccccaagacaggctcactcaccatgaccaagctgagcgcccaagtcaaaggctctctcaacatcaccaccccggggctgcagatatggaggatcgaggccatgcagatggtgcctgttccttccagcacctttggaagcttcttcgatggtgactgctacatcatcctggctatccacaagacagccagcagcctgtcctatgacatccactactggattggccaggactcatccctggatgagcagggggcagctgccatctacaccacacagatggatgacttcctgaagggccgggctgtgcagcaccgcgaggtccagggcaacgagagcgaggccttccgaggctacttcaagcaaggccttgtgatccggaaagggggcgtggcttctggcatgaagcacgtggagaccaactcctatgacgtccagaggctgctgcatgtcaagggcaagaggaacgtggtagctggagaggtagagatgtcctggaagagtttcaaccgaggggatgttttcctcctggaccttgggaagcttatcatccagtggaatggaccggaaagcacccgtatggagagactcaggggcatgactctggccaaggagatccgagaccaggagcggggagggcgcacctatgtaggcgtggtggacggagagaatgaattggcatccccgaagctgatggaggtgatgaaccacgtgctgggcaagcgcagggagctgaaggcggccgtgcccgacacggtggtggagccggcactcaaggctgcactcaaactgtaccatgtgtctgactccgaggggaatctggtggtgagggaagtcgccacacggccactgacacaggacctgctcagtcacgaggactgttacatcctggaccaggggggcctgaagatctacgtgtggaaagggaagaaagccaatgagcaggagaagaagggagccatgagccatgcgctgaacttcatcaaagccaagcagtacccaccaagcacacaggtggaggtgcagaatgatggggctgagtcggccgtctttcagcagctcttccagaagtggacagcgtccaaccggacctcaggcctaggcaaaacccacactgtgggctccgtggccaaagtggaacaggtgaagttcgatgccacatccatgcatgtcaagcctcaggtggctgcccagcagaagatggtagatgatgggagtggggaagtgcaggtgtggcgcattgagaacctagagctggtacctgtggattccaagtggctaggccacttctatgggggcgactgctacctgctgctctacacctacctcatcggcgagaagcagcattacctgctctacgtttggcagggcagccaggccagccaagatgaaattacagcatcagcttatcaagccgtcatcctggaccagaagtacaatggtgaaccagtccagatccgggtcccaatgggcaaggagccacctcatcttatgtccatcttcaagggacgcatggtggtctaccagcactccctctcccaacccttaataatgaggcaaagcaagagcctagtgaaggccaatgctaggtttacaaacttacccagaagcctctgcaaagcttcacaggctcctcagatgaaaataacaggaatcaatggggactacggccagacactggtttgccattctgttccttttaagaagtaacagtgctgcaaggaagtccatgtcagaaagccaacagaaggtgatttccacaactttgaacaggttgttacaagtatcagcaagaatgtgtccttttcagaaataacagtcaaatcaaagaaggttaataaaggctttaatttcatacacacaaaaaaactctatgcataatttaaaaaggaaacaaaaacaaagaaaaaccgtaaaggatacagaggaacagttctgctaaaacacagataaaagtgccgctccatacaaaacataaagaatcagaatcaaaagtcactctgaacataaagaaaaaaaatcatctcacaaataatgtggccacagctgccagaaaacctggtagtggctcaattaggcaaagtgtaggaatctcatttttgtttttctctccttaagtttaaagaaacaacaatgacaataggccagagaagttagggagggaaagaaaagctcaaagggagggaaacctggggacaagaggtgtgcacacccacatgtggtctcactcttcacacaggcccactatttttgaagtagaccagtttagttgactgttcttctttgttctggcatctgactggaccaacctggaacctggtccagaccctcacccactctattcttatgccaatggacatacctatactttgaacctctgtacttttaagaaaagtccaatgttacaaaatcaaatgcttatattcagactggcacactttttaaataaaaactccatacacctcagacatatagcacacatggagacaacttactaattgtgtgtaagtatgatacaatgaatgagactgcctgaagtctagtaatcaaagcatgccataaggtgaatgattgtggttaaacacagcaaaataattgtcacaaaactttcaaggcctaacaaattagaattttccaataaaaaatatatattttttcagatgttaataagacatatcagtagagacaaaattaggattttgaagtaatgcaataaaaagatgttggagggcagaagtctatttagtttttgtatacacttgcaagagtgcattactcagtataaagcaaaatggggaggaaaaagacatccatccattttattggaacacttttatgtgacttgaatctggtgttaggttgttgatttttctaaaaatctcctatatatacaaaatccatatgtacttggagatccagctgttgccccctgtttaaaacaaaagaccacctcggggggtcaattaaattaaaaaggccctccaaccaccctaaatgggataactaagagtatctactgcagtcatttcagaggacagagaaggaaaatattttaatttgctttaatataacctcttttcagtagatcacaaatgagtttacaaactacttttttttctctttaatttaggtgtttgcagataattttcattatacaactatatccgtagctgtatgtgtgtatagttacataatggtaactacacacgatacagaagaatcagtaaattcatggattattttgctgaggttttaaattttaaagcctctgtttcagaattttacacttgatcaaggagaaaaataaatgtgtagtctaacatttgctttctggagttaattaactgatctgtaagaaccactgcatatgtcttaaaatgtaaacatatttacatttgttgtatttgttattgagcctttaaggttaggcccagaatgaacagaccatagcaagtaaacaaataatttttagaatcaaagtattaatagaagaccagttcatggatttgcttattctatcctgctgagacaaaactcatgagtgtgcacacacatgtgaatatatccctacgaaacagtctatcttctcataggcttaaattatagtcatggctattaaagaaattaacagcatccagccacatgcaactttccaaccttcagtactattaggtgattaaaatcaacaaatatgaagtttagttcatttttcccttaaaattccaacaaagatcaaaaggttgtatctagaactaattgccatcaagttccaattcaatgtcatttaaagtaatgtaaccacacatttggtattttcaataggaaggttaattaggtattgtgcaaactgcctgcaacggaagcactcagtccttatctaacttgtcccttcctggccccaacatgctaactgccccatccccaattctgggcaaactgatcacaatgtgcaaaaaataatatattatctatttataattttaaaatatatacagccagctcaaaaacaacaacaaaccccatcaacatagtccagctgaaatctccactgg

SEQ ID NO: 361463 - DNA, 2826 bp, Homo sapiens
tgccacaattccctgagatctcccaggtggcagctgcctccccaagacaggctcactcaccatgaccaagctgagcgcccaagtcaaaggctctctcaacatcaccaccccggggctgcagatatggaggatcgaggccatgcagatggtgcctgttccttccagcacctttggaagcttcttcgatggtgactgctacatcatcctggctatccacaagacagccagcagcctgtcctatgacatccactactggattggccaggactcatccctggatgagcagggggcagctgccatctacaccacacagatggatgacttcctgaagggccgggctgtgcagcaccgcgaggtccagggcaacgagagcgaggccttccgaggctacttcaagcaaggccttgtgatccggaaagggggcgtggcttctggcatgaagcacgtggagaccaactcctatgacgtccagaggctgctgcatgtcaagggcaagaggaacgtggtagctggagaggtagagatgtcctggaagagtttcaaccgaggggatgttttcctcctggaccttgggaagcttatcatccagtggaatggaccggaaagcacccgtatggagagactcaggggcatgactctggccaaggagatccgagaccaggagcggggagggcgcacctatgtaggcgtggtggacggagagaatgaattggcatccccgaagctgatggaggtgatgaaccacgtgctgggcaagcgcagggagctgaaggcggccgtgcccgacacggtggtggagccggcactcaaggctgcactcaaactgtaccatgtgtctgactccgaggggaatctggtggtgagggaagtcgccacacggccactgacacaggacctgctcagtcacgaggactgttacatcctggaccaggggggcctgaagatctacgtgtggaaagggaagaaagccaatgagcaggagaagaagggagccatgagccatgcgctgaacttcatcaaagccaagcagtacccaccaagcacacaggtggaggtgcagaatgatggggctgagtcggccgtctttcagcagctcttccagaagtggacagcgtccaaccggacctcaggcctaggcaaaacccacactgtgggctccgtggccaaagtggaacaggtgaagttcgatgccacatccatgcatgtcaagcctcaggtggctgcccagcagaagatggtagatgatgggagtggggaagtgcaggtgtggcgcattgagaacctagagctggtacctgtggattccaagtggctaggccacttctatgggggcgactgctacctgctgctctacacctacctcatcggcgagaagcagcattacctgctctacgtttggcagggcagccaggccagccaagatgaaattacagcatcagcttatcaagccgtcatcctggaccagaagtacaatggtgaaccagtccagatccgggtcccaatgggcaaggagccacctcatcttatgtccatcttcaagggacgcatggtggtctaccagggaggcacctcccgaactaacaacttggagaccgggccctccacacggctgttccaggtccagggaactggcgccaacaacaccaaggcctttgaggtcccagcgcgggccaatttcctcaattccaatgatgtctttgtcctcaagacccagtcttgctgctatctatggtgtgggaagggttgtagcggggacgagcgggagatggccaagatggttgctgacaccatctcccggacggagaagcaagtggtggtggaagggcaggagccagccaacttctggatggccctgggtgggaaggccccctatgccaacaccaagagactacaggaagaaaacctggtcatcaccccccggctctttgagtgttccaacaagactgggcgcttcctggccacagagatccctgacttcaatcaggatgacttggaagaggatgatgtgttcctactagatgtctgggaccaggtcttcttctggattgggaaacatgccaacgaggaggagaagaaggccgcagcaaccactgcacaggaatacctcaagacccatcccagcgggcgtgaccctgagacccccatcattgtggtgaagcagggacacgagccccccaccttcacaggctggttcctggcttgggatcccttcaagtggagtaacaccaaatcctatgaggacctgaaggcggagcttggcaactctagggactggagccagatcactgctgaacacctgtccattgaagatttcactcaggcctttgggatgactccagctgccttctctgctctgcctcgatggaagcaacaaaacctcaagaaagaaaaaggactattttgagaagagtagctgtggttgtaaagcagtaccctaccctgattgtagggtctcattttctcaccgatattagtcctacaccaattgaagtgaaattttgcagatgtgcctatgagcacaaacttctgtggcaaatgccagttttgtttaataatgtacctattccttcagaaagatgataccccaaaaggaaaaaaaaaaaaaaaaaaaaaaaaaaaaaaaaaaaaaaaaaaaaaaaaaaaaaaaaaaaaaaaaaaaaaaaaaaaaaaaagagggaaaagaaaaaaacaaaaaaaaaaaaaaaaaaaatttttggggggggggcccggcccccaatttccctttaagggggggtttttccccccccccccggccccttttttaaaaacgcggggggggagaaaaacttggggacacccaattat

SEQ ID NO: 361464 - DNA, 330 bp, Homo sapiens
ccaagatgaaattacagcatcagcttatcaagccgtcatcctggaccagaagtacaatggtgaaccagtccagatccgggtcccaatgggcaaggagccacctcatcttatgtccatcttcaagggacgcatggtggtctaccagtgtggctgctgaactgaggtgtctggcagtaaccactgtggcaagacaggcatccgggagatggagaaggggatgggtggtgggagcagggcttgaggtgaagcccattcttcataggagactaccctggaggttctatcacctatgtggaactggtaatagaaacaacccatttggttacttta

SEQ ID NO: 361465 - DNA, 295 bp, Homo sapiens
actacaggaagaaaacctggtcatcaccccccggctctttgagtgttccaacaagactgggcgcttcctggccacagagatccctgacttcaatcaggatgacttggaagaggatgatgtgttcctactagatgtctgggaccaggtaggaccaagggcctggggacccctcttcccagccacctcaatccccagggccaagaaagagtggctttaaggttaggtaagtgtcaatgttttcttggcccttacataatttctccctggaaatggtatgaacaccagaagtgtaaga

SEQ ID NO: 361466 - DNA, 1730 bp, Homo sapiens
gcggtgcgcgcgcctcgacatccgggcaacgcctctgttctgtcctcccccttcgtcgcctgtgacaaccggaagggaagtgaaaatgggtgtccctgctgcctcttagcaacaagaggggtcaagtgacacaaccagctgactcccgtagaggaagacactgtggaggccagttctggagctattgcagcctcggttgcccggccggggacccgagccgaaaagttatcgtcagaatgtcgggcaaagaccgaattgaaatctttccctcgcgaatggcacagaccatcatgaaggctcgtttaaagggagcacagacaggtcgaaacctcctgaagaaaaaatctgatgccttaactcttcgatttcgacagatcctaaagaagataatagagactaaaatgttgatgggcgaagtgatgagagaagctgccttttcactagctgaagccaagttcacagcaggtgacttcagcactacagttatccaaaatgtcaataaagcgcaagtgaagattcgagcgaagaaagataatgtagcaggtgttactttgccagtatttgaacattaccatgaaggaactgacagttatgaactgactggtttagccagaggtggggaacagttggctaaattaaagaggaattatgccaaagcagtggaactactggtggaactagcttctctgcagacttcttttgttactttggatgaagctattaagataaccaacaggcgtgtaaatgccattgaacatgtcatcattccccggattgaacgtactcttgcttatatcatcacagagctggatgagagagagcgagaagagttctataggttaaagaaaatacaagagaagaaaaagattctaaaggaaaaatctgagaaggacttggagcaaaggagagcagctggagaggtgttggagcctgctaatcttctggctgaagagaaggacgaggatcttctatttgaataatctttcctgttctggttctttgagaaaccctaacactggcttcattttaattcacagtgtgtaggtttgatttgtgtggctatttattttttggcctaagaatttcactggttgtaaaatttacctagatgtctatttatgggattacttttgcagaatcataatttagcaaccatttatcatggatgaaagagatctgtaaaacctgcccaggaacttacagaatttactttgcagaagcgttatcatactccatttacatctgtgttacacgtgatctgcttaccaagcatattaggaaatacctcttaggaagcattagcggtctcaggccaattactgtggagcagctttcattcctacccacttgcaaaccttggcgctgttgtctgagattgctgcagccattcttgttaccatggtacttctcaaactttgtgaaaacctgcacttttccttgcatgacaggttcctgtcttgtctgtcatgggagccattctgccaatttaaatgcgactgtggtataaacagtaaaatgatttaaaagtaagtcattccgtttttattaatttactgttaagtcatgttctcatgctcagatcagtagtgtcagccagagctttctctgcagacatgtaggaagtgggtagctatttttcccactccatgtattagagttttacaaaaaggcttacttttgagacaactgttgcattttggggtactaataaatgattgccgatgagttat

SEQ ID NO: 361467 - DNA, 2933 bp, Homo sapiens
gcggtgcgcgcgcctcgacatccgggcaacgcctctgttctgtcctcccccttcgtcgcctgtgacaaccggaagggaagtgaaaatgggtgtccctgctgcctcttagcaacaagaggggtcaagtgacacaaccagctgactcccgtagaggaagacactgtggaggccagttctggagctattgcagcctcggttgcccggccggggacccgagccgaaaagttatcgtcagaatgtcgggcaaagaccgaattgaaatctttccctcgcgaatggcacagaccatcatgaaggctcgtttaaagggagcacagacaggtcgaaacctcctgaagaaaaaatctgatgccttaactcttcgatttcgacagatcctaaagaagataatagagactaaaatgttgatgggcgaagtgatgagagaagctgccttttcactagctgaagccaagttcacagcaggtgacttcagcactacagttatccaaaatgtcaataaagcgcaagtgaagattcgagcgaagaaagataatgtagcaggtgttactttgccagtatttgaacattaccatgaaggaactgacagttatgaactgactggtttagccagaggtggggaacagttggctaaattaaagaggaattatgccaaagcagtggaactactggtggaactagcttctctgcagacttcttttgttactttggatgaagctattaagataaccaacaggcgtgtaaatgccattgaacatgtcatcattccccggattgaacgtactcttgcttatatcatcacagagctggatgagagagagcgagaagagttctataggttaaagaaaatacaagagaagaaaaagattctaaaggaaaaatctgagaaggacttggagcaaaggagagcagctggagaggtgttggagcctgctaatcttctggctgaagagaaggacgaggatcttctatttgaataatctttcctgttctggttctttgagaaaccctaacactggcttcattttaattcacagtgtgtaggtttgatttgtgtggctatttattttttggcctaagaatttcactggttgtaaaatttacctagatgtctatttatgggattacttttgcagaatcataatttagcaaccatttatcatggatgaaagagatctgtaaaacctgcccaggaacttacagaatttactttgcagaagcgttatcatactccatttacatctgtgttacacgtgatctgcttaccaagcatattaggaaatacctcttaggaagcattagcggtctcaggccaattactgtggagcagctttcattcctacccacttgcaaaccttggcgctgttgtctgagattgctgcagccattcttgttaccatggtacttctcaaactttgtgaaaacctgcacttttccttgcatgacaggttcctgtcttgtctgtcatgggagccattctgccaatttaaatgcgactgtggtataaacagtaaaatgatttaaaagtaagtcattccgtttttattaatttactgttaagtcatgttctcatgctcagatcagtagtgtcagccagagctttctctgcagacatgtaggaagtgggtagctatttttcccactccatgtattagagttttacaaaaaggcttacttttgagacaactgttgcattttggggtactaataaatgattgccgatgagttatgagggcattataatacttccttatttgctaattaagaaaataactagttcctattttagagtaagaaataaggtaactttttactatttataagtgataaaaacttgctttcatatatgaagatgaagcatttgagtggccacatcaggtgtctgaggtttttagtactgtttgatttggcatgagccatccatggggactcagtctttctcgcatccatttccaggcatttttgacatgattagccatggaataatgtttagttctgaaattgagactttgacaagtcaaagagcacagctggaatgcaagtcaagtatgatttgatttaatttgatctttatattttaagaattacgtactgcctttctaggaggcaaaaattagtttgaagtagggatccagattagtggttttccacatgtaggtaaattcaatgtaaagcaacaagccaaaggaccctagatttctcctgtggcttcttaaatacctggaatgtattggccttgttaaaatacttacaaaagtgcagatgactttatagtttagcatttgttaaaaagaaatcaagaaaacaatggacacataatttgttgtgtggagtcagttatctgaaacataggagaagaatatagatcaggaataggaatggaaagctgaactgtggtgacaggtgtatatatgtaagaaactttttgtttgttggtgtatgatttatgacctttgggagatgtacagcagaaaaaaaggagaaatgaagactggagaaacaaaatatgttatatatttgccaataattcacatgctgcctcagtgtcctcagatcccaggctgcacataaggtccatttgcctgagtattattacatacctccttctccagaaaactttcaagttcacagccttgcgttgtccatctttaatacacttagttgttggttttaataattaaggaaacaggacctacctatacctgtgccaacagggggcactatccctctgtaaagaacaaatcaaaaagtattttgtgttgtagctggaggatccaatggtcttgcttttggcaaaaacttgaagaggagggtggtctttacatgtgtggaaaccttgagtggccgagcaaatagcaagagaaattgcttagtggcttttaaaatttgaaatataattttactttttatttttacaatacagtgtacagtat

SEQ ID NO: 361468 - DNA, 2475 bp, Homo sapiens
gcggtgcgcgcgcctcgacatccgggcaacgcctctgttctgtcctcccccttcgtcgcctgtgacaaccggaagggaagtgaaaatgggtgtccctgctgcctcttagcaacaagaggggtcaagtgacacaaccagctgactcccgtagaggaagacactgtggaggccagttctggagctattgcagcctcggttgcccggccggggacccgagccgaaaagttatcgtcagaatgtcgggcaaagaccgaattgaaatctttccctcgcgaatggcacagaccatcatgaaggctcgtttaaagggagcacagacaggtcgaaacctcctgaagaaaaaatctgatgccttaactcttcgatttcgacagatcctaaagaagataatagagactaaaatgttgatgggcgaagtgatgagagaagctgccttttcactagctgaagccaagttcacagcaggtgacttcagcactacagttatccaaaatgtcaataaagcgcaagtgaagattcgagcgaagaaagataatgtagcaggtgttactttgccagtatttgaacattaccatgaaggaactgacagttatgaactgactggtttagccagaggtggggaacagttggctaaattaaagaggaattatgccaaagcagtggaactactggtggaactagcttctctgcagacttcttttgttactttggatgaagctattaagataaccaacaggcgtgtaaatgccattgaacatgtcatcattccccggattgaacgtactcttgcttatatcatcacagagctggatgagagagagcgagaagagttctataggttaaagaaaatacaagagaagaaaaagattctaaaggaaaaatctgagaaggacttggagcaaaggagagcagctggagaggtgttggagcctgctaatcttctggctgaagagaaggacgaggatcttctatttgaataatctttcctgttctggttctttgagaaaccctaacactggcttcattttaattcacagtgtgtaggtttgatttgtgtggctatttattttttggcctaagaatttcactggttgtaaaatttacctagatgtctatttatgggattacttttgcagaatcataatttagcaaccatttatcatggatgaaagagatctgtaaaacctgcccaggaacttacagaatttactttgcagaagcgttatcatactccatttacatctgtgttacacgtgatctgcttaccaagcatattaggaaatacctcttaggaagcattagcggtctcaggccaattactgtggagcagctttcattcctacccacttgcaaaccttggcgctgttgtctgagattgctgcagccattcttgttaccatggtacttctcaaactttgtgaaaacctgcacttttccttgcatgacaggttcctgtcttgtctgtcatgggagccattctgccaatttaaatgcgactgtggtataaacagtaaaatgatttaaaagtaagtcattccgtttttattaatttactgttaagtcatgttctcatgctcagatcagtagtgtcagccagagctttctctgcagacatgtaggaagtgggtagctatttttcccactccatgtattagagttttacaaaaaggcttacttttgagacaactgttgcattttggggtactaataaatgattgccgatgagttatgagggcattataatacttccttatttgctaattaagaaaataactagttcctattttagagtaagaaataaggtaactttttactatttataagtgataaaaacttgctttcatatatgaagatgaagcatttgagtggccacatcaggtgtctgaggtttttagtactgtttgatttggcatgagccatccatggggactcagtctttctcgcatccatttccaggcatttttgacatgattagccatggaataatgtttagttctgaaattgtgacactgtctttattaatactgtattttaatcaagtgacatcacagtccaggtagtttttctttcttttttttttttttgaaacagagtctcactcattctgtagcccaggctagagtgcagtggcagcaacatcagttcactgcaacgtccgcctcctcaattcaagagattctcctgcttcagtctcccgagtagctgggattacaggtttgcgccaccatgcccggctaatgtttatatttttagtggagatggggtttcaccatgttggccaggctggtcttgaactcctgacctcaagtaatctgcctgcctcggcctcccaaagtgctgggattacaggcataagccaccatgcccagccagtctaggcagttttaaagtactaaatgattttgcaagcatttaacatctcctataagatagcaggtcttagttatgtgccaggcactggtattaagtattttg

SEQ ID NO: 361469 - DNA, 2398 bp, Homo sapiens
  misc_feature (1744)..(1744): n is a, c, g, or t
  misc_feature (1750)..(1750): n is a, c, g, or t
  misc_feature (1758)..(1758): n is a, c, g, or t
  misc_feature (1760)..(1760): n is a, c, g, or t
  misc_feature (1762)..(1762): n is a, c, g, or t
gcggtgcgcgcgcctcgacatccgggcaacgcctctgttctgtcctcccccttcgtcgcctgtgacaaccggaagggaagtgaaaatgggtgtccctgctgcctcttagcaacaagaggggtcaagtgacacaaccagctgactcccgtagaggaagacactgtggaggccagttctggagctattgcagcctcggttgcccggccggggacccgagccgaaaagttatcgtcagaatgtcgggcaaagaccgaattgaaatctttccctcgcgaatggcacagaccatcatgaaggctcgtttaaagggagcacagacaggtcgaaacctcctgaagaaaaaatctgatgccttaactcttcgatttcgacagatcctaaagaagataatagagactaaaatgttgatgggcgaagtgatgagagaagctgccttttcactagctgaagccaagttcacagcaggtgacttcagcactacagttatccaaaatgtcaataaagcgcaagtgaagattcgagcgaagaaagataatgtagcaggtgttactttgccagtatttgaacattaccatgaaggaactgacagttatgaactgactggtttagccagaggtggggaacagttggctaaattaaagaggaattatgccaaagcagtggaactactggtggaactagcttctctgcagacttcttttgttactttggatgaagctattaagataaccaacaggcgtgtaaatgccattgaacatgtcatcattccccggattgaacgtactcttgcttatatcatcacagagctggatgagagagagcgagaagagttctataggttaaagaaaatacaagagaagaaaaagattctaaaggaaaaatctgagaaggacttggagcaaaggagagcagctggagaggtgttggagcctgctaatcttctggctgaagagaaggacgaggatcttctatttgaataatctttcctgttctggttctttgagaaaccctaacactggcttcattttaattcacagtgtgtaggtttgatttgtgtggctatttattttttggcctaagaatttcactggttgtaaaatttacctagatgtctatttatgggattacttttgcagaatcataatttagcaaccatttatcatggatgaaagagatctgtaaaacctgcccaggaacttacagaatttactttgcagaagcgttatcatactccatttacatctgtgttacacgtgatctgcttaccaagcatattaggaaatacctcttaggaagcattagcggtctcaggccaattactgtggagcagctttcattcctacccacttgcaaaccttggcgctgttgtctgagattgctgcagccattcttgttaccatggtacttctcaaactttgtgaaaacctgcacttttccttgcatgacaggttcctgtcttgtctgtcatgggagccattctgccaatttaaatgcgactgtggtataaacagtaaaatgatttaaaagtaagtcattccgtttttattaatttactgttaagtcatgttctcatgctcagatcagtagtgtcagccagagctttctctgcagacatgtaggaagtgggtagctatttttcccactccatgtattagagttttacaaaaaggcttacttttgagacaactgttgcattttggggtactaataaatgattgccgatgagttataaaaaaaaaaaaanaaaaanaaaaaaanananaaaaaaggggcggggcgcgcctaaaaagtaccccctcaggggccccaaggttataccagtccccaggtttcttggttacaaagggggcgccccaatatagggaggccggtatatataataagcgcaagggaccacgggcgccgcgcgtttaacacaccgttcgggagcatgggggaaaacaacggcgcctacgcgtggggacacccttggggaagggacccctaactcttcgggcggtgggagcccatatttggcggaccaaccatccctcgacaggaagattataacggctccaagggagaacatatttaacactttcaccggggtgttcaaccgtgggtgtgttaacccccaccgggcggaaatattttgcgtggggcggttggaagagagttgcgggcccaaaccggagagttattgaattatctgcggacacctacattttttttctacccgcggggactttttctggatcatatatacgggctataggccagagatgcaccgacacataccagcacccagacgcacaattaacaacacgtgctagcgacacgatctgtattccgtcacaagacacacccacggcatatgccagctgcgttgctaaagcgaccacctcgagagacgcagcta

SEQ ID NO: 361470 - DNA, 1676 bp, Homo sapiens
gcggtgcgcgcgcctcgacatccgggcaacgcctctgttctgtcctcccccttcgtcgcctgtgacaaccggaagggaagtgaaaatgggtgtccctgctgcctcttagcaacaagaggggtcaagtgacacaaccagctgactcccgtagaggaagacactgtggaggccagttctggagctattgcagcctcggttgcccggccggggacccgagccgaaaagttatcgtcagaatgtcgggcaaagaccgaattgaaatctttccctcgcgaatggcacagaccatcatgaaggctcgtttaaagggagcacagacaggtcgaaacctcctgaagaaaaaatctgatgccttaactcttcgatttcgacagatcctaaagaagataatagagactaaaatgttgatgggcgaagtgatgagagaagctgccttttcactagctgaagccaagttcacagcaggtgacttcagcactacagttatccaaaatgtcaataaagcgcaagtgaagattcgagcgaagaaagataatgtagcaggtgttactttgccagtatttgaacattaccatgaaggaactgacagttatgaactgactggtttagccagaggtggggaacagttggctaaattaaagaggaattatgccaaagcagtggaactactggtggaactagcttctctgcagacttcttttgttactttggatgaagctattaagataaccaacaggcgtgtaaatgccattgaacatgtcatcattccccggattgaacgtactcttgcttatatcatcacagagctggatgagagagagcgagaagagttctataggttaaagaaaatacaagagaagaaaaagattctaaaggatgctaatcttctggctgaagagaaggacgaggatcttctatttgaataatctttcctgttctggttctttgagaaaccctaacactggcttcattttaattcacagtgtgtaggtttgatttgtgtggctatttattttttggcctaagaatttcactggttgtaaaatttacctagatgtctatttatgggattacttttgcagaatcataatttagcaaccatttatcatggatgaaagagatctgtaaaacctgcccaggaacttacagaatttactttgcagaagcgttatcatactccatttacatctgtgttacacgtgatctgcttaccaagcatattaggaaatacctcttaggaagcattagcggtctcaggccaattactgtggagcagctttcattcctacccacttgcaaaccttggcgctgttgtctgagattgctgcagccattcttgttaccatggtacttctcaaactttgtgaaaacctgcacttttccttgcatgacaggttcctgtcttgtctgtcatgggagccattctgccaatttaaatgcgactgtggtataaacagtaaaatgatttaaaagtaagtcattccgtttttattaatttactgttaagtcatgttctcatgctcagatcagtagtgtcagccagagctttctctgcagacatgtaggaagtgggtagctatttttcccactccatgtattagagttttacaaaaaggcttacttttgagacaactgttgcattttggggtactaataaatgattgccgatgagttat

SEQ ID NO: 361471 - DNA, 1513 bp, Homo sapiens
gtatcaacgcagagtggccattacggggccgggccgaattgaaatctttccctcgcgaatggcacagaccatcatgaaggctcgtttaaagggagcacagacaggtcgaaacctcctgaagaaaaaatctgatgccttaactcttcgatttcgacagatcctaaagaagataatagagactaaaatgttgatgggcgaagtgatgagagaagctgccttttcactagctgaagccaagttcacagcaggtgacttcagcactacagttatccaaaatgtcaataaagcgcaagtgaagattcgagcgaagaaagataatgtagcaggtgttactttgccagtatttgaacattaccatgaaggaactgacagttatgaactgactggtttagccagaggtggggaacagttggctaaattaaagaggaattatgccaaagcagtggaactactggtggaactagcttctctgcagacttcttttgttactttggatgaagctattaagataaccaacaggcgtgtaaatgccattgaacatgtcatcattccccggattgaacgtactcttgcttatatcatcacagagctggatgagagagagcgagaagagttctataggttaaagaaaatacaagagaagaaaaagattctaaaggaaaaatctgagaaggacttggagcaaaggagagcagctggagaggtgttggagcctgctaatcttctggctgaagagaaggacgaggatcttctatttgaataatctttcctgttctggttctttgagaaaccctaacactggcttcattttaattcacagtgtgtaggtttgatttgtgtggctatttattttttggcctaagaatttcactggttgtaaaatttacctagatgtctatttatgggattacttttgcagaatcataatttagcaaccatttatcatggatgaaagagatctgtaaaacctgcccaggaacttacagaatttactttgcagaagcgttatcatactccatttacatctgtgttacacgtgatctgcttaccaagcatattaggaaatacctcttaggaagcattagcggtctcaggccaattactgtggagcagctttcattcctacccacttgcaaaccttggcgctgttgtctgagattgctgcagccattcttgttaccatggtacttctcaaactttgtgaaaacctgcacttttccttgcatgacaggttcctgtcttgtctgtcatgggagccattctgccaatttaaatgcgactgtggtataaacagtaaaatgatttaaaagtaagtcattccgtttttattaatttactgttaagtcatgttctcatgctcagatcagtagtgtcagccagagctttctctgcagacatgtaggaagtgggtagctatttttcccactccatgtattagagttttacaaaaaggcttacttttgagacaactgttgcattttggggtactaataaatgattgccgatgagttat

SEQ ID NO: 361472 - DNA, 1662 bp, Homo sapiens
gcggtgcgcgcgcctcgacatccgggcaacgcctctgttctgtcctcccccttcgtcgcctgtgacaaccggaagggaagtgaaaatgggtgtccctgctgcctcttagcaacaagaggggtcaagtgacacaaccagctgactcccgtagaggaagacactgtggaggccagttctggagctattgcagcctcggttgcccggccggggacccgagccgaaaagttatcgtcagaatgtcgggcaaagaccgaattgaaatctttccctcgcgaatggcacagaccatcatgaaggctcgtttaaagggagcacagacaggtcgaaacctcctgaagaaaaaatctgatgccttaactcttcgatttcgacagatcctaaagaagataatagagactaaaatgttgatgggcgaagtgatgagagaagctgccttttcactagctgaagccaagttcacagcaggtgacttcaggtgttactttgccagtatttgaacattaccatgaaggaactgacagttatgaactgactggtttagccagaggtggggaacagttggctaaattaaagaggaattatgccaaagcagtggaactactggtggaactagcttctctgcagacttcttttgttactttggatgaagctattaagataaccaacaggcgtgtaaatgccattgaacatgtcatcattccccggattgaacgtactcttgcttatatcatcacagagctggatgagagagagcgagaagagttctataggttaaagaaaatacaagagaagaaaaagattctaaaggaaaaatctgagaaggacttggagcaaaggagagcagctggagaggtgttggagcctgctaatcttctggctgaagagaaggacgaggatcttctatttgaataatctttcctgttctggttctttgagaaaccctaacactggcttcattttaattcacagtgtgtaggtttgatttgtgtggctatttattttttggcctaagaatttcactggttgtaaaatttacctagatgtctatttatgggattacttttgcagaatcataatttagcaaccatttatcatggatgaaagagatctgtaaaacctgcccaggaacttacagaatttactttgcagaagcgttatcatactccatttacatctgtgttacacgtgatctgcttaccaagcatattaggaaatacctcttaggaagcattagcggtctcaggccaattactgtggagcagctttcattcctacccacttgcaaaccttggcgctgttgtctgagattgctgcagccattcttgttaccatggtacttctcaaactttgtgaaaacctgcacttttccttgcatgacaggttcctgtcttgtctgtcatgggagccattctgccaatttaaatgcgactgtggtataaacagtaaaatgatttaaaagtaagtcattccgtttttattaatttactgttaagtcatgttctcatgctcagatcagtagtgtcagccagagctttctctgcagacatgtaggaagtgggtagctatttttcccactccatgtattagagttttacaaaaaggcttacttttgagacaactgttgcattttggggtactaataaatgattgccgatgagttat

SEQ ID NO: 361473 - DNA, 923 bp, Homo sapiens
gcggtgcgcgcgcctcgacatccgggcaacgcctctgttctgtcctcccccttcgtcgcctgtgacaaccggaagggaagtgaaaatgggtgtccctgctgcctcttagcaacaagaggggtcaagtgacacaaccagctgactcccgtagaggaagacactgtggaggccagttctggagctattgcagcctcggttgcccggccggggacccgagccgaaaagttatcgtcagaatgtcgggcaaagaccgaattgaaatctttccctcgcgaatggcacagaccatcatgaaggctcgtttaaagggagcacagacaggtcgaaacctcctgaagaaaaaatctgatgccttaactcttcgatttcgacagatcctaaagaagataatagagactaaaatgttgatgggcgaagtgatgagagaagctgccttttcactagctgaagccaagttcacagcaggtgacttcagcactacagttatccaaaatgtcaataaagcgcaagtgaagattcgagcgaagaaagataatgtagcaggtgttactttgccagtatttgaacattaccatgaaggaactgacagttatgaactgactggtttagccagaggtggggaacagttggctaaattaaagaggaattatgccaaagcagtggaactactggtggaactagcttctctgcagacttcttttgttactttggatgaagctattaagataaccaacaggcgtgtaaatgccattgaacatgtcatcattccccggattgaacgtactcttgcttatatcatcacagagctggatgagagagagcgagaagagttctataggttaagaaaaccaagagaagaaaagttcttaaggattctgctgaaagaagagagggactcttttgataactttctgtcctggcct

SEQ ID NO: 361474 - DNA, 1596 bp, Homo sapiens
gcggtgcgcgcgcctcgacatccgggcaacgcctctgttctgtcctcccccttcgtcgcctgtgacaaccggaagggaagtgaaaatgggtgtccctgctgcctcttagcaacaagaggggtcaagtgacacaaccagctgactcccgtagaggaagacactgtggaggccagttctggagctattgcagcctcggttgcccggccggggacccgagccgaaaagttatcgtcagaatgtcgggcaaagaccgaattgaaatctttccctcgcgaatggcacagaccatcatgaaggctcgtttaaagggagcacagacaggtcgaaacctcctgaagaaaaaatctgatgccttaactcttcgatttcgacagatcctaaagaagataatagagactaaaatgttgatgggcgaagtgatgagagaagctgccttttcactagctgaagccaagttcacagcaggtgacttcagcactacagttatccaaaatgtcaataaagcgcaagtgaagattcgagcgaagaaagataatgtagcaggtgttactttgccagtatttgaacattaccatgaaggaactgacacaaagcagtggaactactggtggaactagcttctctgcagacttcttttgttactttggatgaagctattaagataaccaacaggcgtgtaaatgccattgaacatgtcatcattccccggattgaacgtactcttgcttatatcatcacagagctggatgagagagagcgagaagagttctataggttaaagaaaatacaagagaagaaaaagattctaaaggaaaaatctgagaaggacttggagcaaaggagagcagctggagaggtgttggagcctgctaatcttctggctgaagagaaggacgaggatcttctatttgaataatctttcctgttctggttctttgagaaaccctaacactggcttcattttaattcacagtgtgtaggtttgatttgtgtggctatttattttttggcctaagaatttcactggttgtaaaatttacctagatgtctatttatgggattacttttgcagaatcataatttagcaaccatttatcatggatgaaagagatacctttgggagatgtacagcagaaaaaaaggagaaatgaagactggagaaacaaaatatgttatatatttgccaataattcacatgctgcctcagtgtcctcagatcccaggctgcacataaggtccatttgcctgagtattattacatacctccttctccagaaaactttcaagttcacagccttgcgttgtccatctttaatacacttagttgttggttttaataattaaggaaacaggacctacctatacctgtgccaacagggggcactatccctctgtaaagaacaaatcaaaaagtattttgtgttgtagctggaggatccaatggtcttgcttttggcaaaaacttgaagaggagggtggtctttacatgtgtggaaaccttgagtggccgagcaaatagcaagagaaattgcttagtggcttttaaaatttgaaatataattttactttttatttttacaatacagtgtacagtat

SEQ ID NO: 361475 - DNA, 1290 bp, Homo sapiens
gacacaggaaacttgagtagtcttaagttaaaaagctagaaagtagcaaatccagaatttaagtctaagcagtctaccttcagaatttttacaccctaacttttcctttctgtttcatctatatttcaaactttgggtatttaaagacattgggactgttctggagaagctgatatttaggaaatctggttgctgctcacagaataaaatcttaggttcagtgtaaattcagtaatgactggaaaaccaacaactcagttcacaagtactttaaaaataggtaactgtttaacatttcgtcttcccaacagcctgctgaactgtaaattctaccatctccactttgcagatgaggaaattgagactttgacaagtcaaagagcacagctggaatgcaagtcaagtatgatttgatttaatttgatctttatattttaagaattacgtactgcctttctaggaggcaaaaattagtttgaagtagggatccagattagtggttttccacatgtaggtaaattcaatgtaaagcaacaagccaaaggaccctagatttctcctgtggcttcttaaatacctggaatgtattggccttgttaaaatacttacaaaagtgcagatgactttatagtttagcatttgttaaaaagaaatcaagaaaacaatggacacataatttgttgtgtggagtcagttatctgaaacataggagaagaatatagatcaggaataggaatggaaagctgaactgtggtgacaggtgtatatatgtaagaaactttttgtttgttggtgtatgatttatgacctttgggagatgtacagcagaaaaaaaggagaaatgaagactggagaaacaaaatatgttatatatttgccaataattcacatgctgcctcagtgtcctcagatcccaggctgcacataaggtccatttgcctgagtattattacatacctccttctccagaaaactttcaagttcacagccttgcgttgtccatctttaatacacttagttgttggttttaataattaaggaaacaggacctacctatacctgtgccaacagggggcactatccctctgtaaagaacaaatcaaaaagtattttgtgttgtagctggaggatccaatggtcttgcttttggcaaaaacttgaagaggagggtggtctttacatgtgtggaaaccttgagtggccgagcaaatagcaagagaaattgcttagtggcttttaaaatttgaaatataattttactttttatttttacaatacagtgtacagtat

SEQ ID NO: 361476 - DNA, 586 bp, Homo sapiens
gcggtgcgcgcgcctcgacatccgggcaacgcctctgttctgtcctcccccttcgtcgcctgtgacaaccggaagggaagtgaaaatgggtgtccctgctgcctcttagcaacaagaggggtcaagtgacacaaccagctgactcccgtagaggaagacactgtggaggccagttctggagctattgcagcctcggttgcccggccggggacccgagccgaaaagttatcgtcagaatgtcgggcaaagaccgaattgaaatctttccctcgcgaatggcacagaccatcatgaaggctcgtttaaagggagcacagacaggtcgaaacctcctgaagaaaaaatctgatgccttaactcttcgatttcgacagatcctaaagaagataatagaggtagaatgaacttttcttagaatagtatttattttagaaaaatccagcatggcccttggcattttttttttgttgttgttattttaattaatttttttctttcaaaagtaaaaataccattataagtttaacaagtgtcaaatatcaaatagttcatttaataaaatccaaactctttaatcttgcctgca

SEQ ID NO: 361477 - DNA, 328 bp, Homo sapiens
ttgtcttggttctcaaatgttttctacaagtgcagtcttagtggagtcaagtgatcagggaatgattaggaagactttgtgcttacattattaatttgttcttattttagacttcttttgttactttggatgaagctattaagataaccaacaggcgtgtaaatgccattgaacatggtgagtattaggtactgtgaggtgctttgtcacttgtccataccctccacttgtcgtgaaactgctagaattcagggactgtactgaagactgaaagatgaataagatgcttcccttgcccacagtgcaaagagagaagtgtgtccatagt

SEQ ID NO: 361478 - DNA, 3193 bp, Homo sapiens
gcggtgcgcgcgcctcgacatccgggcaacgcctctgttctgtcctcccccttcgtcgcctgtgacaaccggaagggaagtgaaaatgggtgtccctgctgcctcttagcaacaagaggggtcaagtgacacaaccagctgactcccgtagaggaagacactgtggaggccagttctggagctattgcagcctcggttgcccggccggggacccgagccgaaaagttatcgtcagaatgtcgggcaaagaccgaattgaaatctttccctcgcgaatggcacagaccatcatgaaggctcgtttaaagggagcacagacaggtcgaaacctcctgaagaaaaaatctgatgccttaactcttcgatttcgacagatcctaaagaagataatagagactaaaatgttgatgggcgaagtgatgagagaagctgccttttcactagctgaagccaagttcacagcaggtgacttcagcactacagttatccaaaatgtcaataaagcgcaagtgaagattcgagcgaagaaagataatgtagcaggtgttactttgccagtatttgaacattaccatgaaggaactgacagttatgaactgactggtttagccagaggtggggaacagttggctaaattaaagaggaattatgccaaagcagtggaactactggtggaactagcttctctgcagacttcttttgttactttggatgaagctattaagataaccaacaggcgtgtaaatgccattgaacatgtcatcattccccggattgaacgtactcttgcttatatcatcacagagctggatgagagagagcgagaagagttctataggttaaagaaaatacaagagaagaaaaagattctaaaggaaaaatctgagaaggacttggagcaaaggagagcagctggagaggtgttggagcctgctaatcttctggctgaagagaaggacgaggatcttctatttgaataatctttcctgttctggttctttgagaaaccctaacactggcttcattttaattcacagtgtgtaggtttgatttgtgtggctatttattttttggcctaagaatttcactggttgtaaaatttacctagatgtctatttatgggattacttttgcagaatcataatttagcaaccatttatcatggatgaaagagatctgtaaaacctgcccaggaacttacagaatttactttgcagaagcgttatcatactccatttacatctgtgttacacgtgatctgcttaccaagcatattaggaaatacctcttaggaagcattagcggtctcaggccaattactgtggagcagctttcattcctacccacttgcaaaccttggcgctgttgtctgagattgctgcagccattcttgttaccatggtacttctcaaactttgtgaaaacctgcacttttccttgcatgacaggttcctgtcttgtctgtcatgggagccattctgccaatttaaatgcgactgtggtataaacagtaaaatgatttaaaagtaagtcattccgtttttattaatttactgttaagtcatgttctcatgctcagatcagtagtgtcagccagagctttctctgcagacatgtaggaagtgggtagctatttttcccactccatgtattagagttttacaaaaaggcttacttttgagacaactgttgcattttggggtactaataaatgattgccgatgagttatgagggcattataatacttccttatttgctaattaagaaaataactagttcctattttagagtaagaaataaggtaactttttactatttataagtgataaaaacttgctttcatatatgaagatgaagcatttgagtggccacatcaggtgtctgaggtttttagtactgtttgatttggcatgagccatccatggggactcagtctttctcgcatccatttccaggcatttttgacatgattagccatggaataatgtttagttctgaaattgtgacactgtctttattaatactgtattttaatcaagtgacatcacagtccaggtagtttttctttcttttttttttttttgaaacagagtctcactcattctgtagcccaggctagagtgcagtggcagcaacatcagttcactgcaacgtccgcctcctcaattcaagagattctcctgcttcagtctcccgagtagctgggattacagcctgctgaactgtaaattctaccatctccactttgcagatgaggaaattgagactttgacaagtcaaagagcacagctggaatgcaagtcaagtatgatttgatttaatttgatctttatattttaagaattacgtactgcctttctaggaggcaaaaattagtttgaagtagggatccagattagtggttttccacatgtaggtaaattcaatgtaaagcaacaagccaaaggaccctagatttctcctgtggcttcttaaatacctggaatgtattggccttgttaaaatacttacaaaagtgcagatgactttatagtttagcatttgttaaaaagaaatcaagaaaacaatggacacataatttgttgtgtggagtcagttatctgaaacataggagaagaatatagatcaggaataggaatggaaagctgaactgtggtgacaggtgtatatatgtaagaaactttttgtttgttggtgtatgatttatgacctttgggagatgtacagcagaaaaaaaggagaaatgaagactggagaaacaaaatatgttatatatttgccaataattcacatgctgcctcagtgtcctcagatcccaggctgcacataaggtccatttgcctgagtattattacatacctccttctccagaaaactttcaagttcacagccttgcgttgtccatctttaatacacttagttgttggttttaataattaaggaaacaggacctacctatacctgtgccaacagggggcactatccctctgtaaagaacaaatcaaaaagtattttgtgttgtagctggaggatccaatggtcttgcttttggcaaaaacttgaagaggagggtggtctttacatgtgtggaaaccttgagtggccgagcaaatagcaagagaaattgcttagtggcttttaaaatttgaaatataattttactttttatttttacaatacagtgtacagtat

SEQ ID NO: 361479 - DNA, 2487 bp, Homo sapiens
gcggtgcgcgcgcctcgacatccgggcaacgcctctgttctgtcctcccccttcgtcgcctgtgacaaccggaagggaagtgaaaatgggtgtccctgctgcctcttagcaacaagaggggtcaagtgacacaaccagctgactcccgtagaggaagacactgtggaggccagttctggagctattgcagcctcggttgcccggccggggacccgagccgaaaagttatcgtcagaatgtcgggcaaagaccgaattgaaatctttccctcgcgaatggcacagaccatcatgaaggctcgtttaaagggagcacagacaggtcgaaacctcctgaagaaaaaatctgatgccttaactcttcgatttcgacagatcctaaagaagataatagagactaaaatgttgatgggcgaagtgatgagagaagctgccttttcactagctgaagccaagttcacagcaggtgacttcagcactacagttatccaaaatgtcaataaagcgcaagtgaagattcgagcgaagaaagataatgtagcaggtgttactttgccagtatttgaacattaccatgaaggaactgacagttatgaactgactggtttagccagaggtggggaacagttggctaaattaaagaggaattatgccaaagcagtggaactactggtggaactagcttctctgcagacttcttttgttactttggatgaagctattaagataaccaacaggcgtgtaaatgccattgaacatgtcatcattccccggattgaacgtactcttgcttatatcatcacagagctggatgagagagagcgagaagagttctataggttaaagaaaatacaagagaagaaaaagattctaaaggaaaaatctgagaaggacttggagcaaaggagagcagctggagaggtgttggagcctgctaatcttctggctgaagagaaggacgaggatcttctatttgaataatctttcctgttctggttctttgagaaaccctaacactggcttcattttaattcacagtgtgtaggtttgatttgtgtggctatttattttttggcctaagaatttcactggttgtaaaatttacctagatgtctatttatgggattacttttgcagaatcataatttagcaaccatttatcatggatgaaagagatctgtaaaacctgcccaggaacttacagaatttactttgcagaagcgttatcatactccatttacatctgtgttacacgtgatctgcttaccaagcatattaggaaatacctcttaggaagcattagcggtctcaggccaattactgtggagcagctttcattcctacccacttgcaaaccttggcgctgttgtctgagattgctgcagccattcttgttaccatggtacttctcaaactttgtgaaaacctgcacttttccttgcatgacaggttcctgtcttgtctgtcatgggagccattctgccaatttaaatgcgactgtggtataaacagtaaaatgatttaaaagtaagtcattccgtttttattaatttactgttaagtcatgttctcatgctcagatcagtagtgtcagccagagctttctctgcagacatgtaggaagtgggtagctatttttcccactccatgtattagagttttacaaaaaggcttacttttgagacaactgttgcattttggggtactaataaatgattgccgatgagttatgagggcattataatacttccttatttgctaattaagaaaataactagttcctattttagagtaagaaataaggtaactttttactatttataagtgataaaaacttgctttcatatatgaagatgaagcatttgagtggccacatcaggtgtctgaggtttttagtactgtttgatttggcatgagccatccatggggactcagtctttctcgcatccatttccaggcatttttgacatgattagccatggaataatgtttagttctgaaattgtgacactgtctttattaatactgtattttaatcaagtgacatcacagtccaggtagtttttctttcttttttttttttttgaaacagagtctcactcattctgtagcccaggctagagtgcagtggcagcaacatcagttcactgcaacgtccgcctcctcaattcaagagattctcctgcttcagtctcccgagtagctgggattacagcctgctgaactgtaaattctaccatctccactttgcagatgaggaaattgagactttgacaagtcaaagagcacagctggaatgcaagtcaaatatgtacaaggatatccacaacactgttcgcagctacaagctgaggtacaaggtgcctcaaaagcttgagagaagcagaaatagaatagaatcctgacctgtgaaaacaatgactctgcaataaggtatgcaatttccaaaccacagctactagaaaaggtacactttaccttaccacat

SEQ ID NO: 361480 - DNA, 1900 bp, Homo sapiens
  misc_feature (1563)..(1563): n is a, c, g, or t
  misc_feature (1569)..(1569): n is a, c, g, or t
  misc_feature (1577)..(1577): n is a, c, g, or t
  misc_feature (1579)..(1579): n is a, c, g, or t
  misc_feature (1581)..(1581): n is a, c, g, or t
gcggtgcgcgcgcctcgacatccgggcaacgcctctgttctgtcctcccccttcgtcgcctgtgacaaccggaagggaagtgaaaatgggtgtccctgctgcctcttagcaacaagaggggtcaagtgacacaaccagctgactcccgtagaggaagacactgtggaggccagttctggagctattgcagcctcggttgcccggccggggacccgagccgaaaagttatcgtcagaatgtcgggcaaagaccgaattgaaatctttccctcgcgaatggcacagaccatcatgaaggctcgtttaaagggagcacagacaggtcgaaacctcctgaagaaaaaatctgatgccttaactcttcgatttcgacagatcctaaagaagataatagagactaaaatgttgatgggcgaagtgatgagagaagctgccttttcactagctgaagccaagttcacagcaggtgacttcagcactacagttatccaaaatgtcaataaagcgcaagtgaagattcgagcgaagaaagataatgtagcaggtgttactttgccagtatttgaacattaccatgaaggaactgacagttatgaactgactggtttagccagaggtggggaacagttggctaaattaaagaggaattatgccaaagcagtggaactactggtggaactagcttctctgcagacttcttttgttactttggatgaagctattaagataaccaacaggcgtgtaaatgccattgaacatgtcatcattccccggattgaacgtactcttgcttatatcatcacagagctggatgagagagagcgagaagagttctataggttaaagaaaatacaagagaagaaaaagattctaaaggaaaaatctgagaaggacttggagcaaaggagagcagctggagaggtgttggagcctgctaatcttctggctgaagagaaggacgaggatcttctatttgaataatctttcctgttctggttctttgagaaaccctaacactggcttcattttaattcacagtgtgtaggtttgatttgtgtggctatttattttttggcctaagaatttcactggttgtaaaatttacctagatgtctatttatgggattacttttgcagaatcataatttagcaaccatttatcatggatgaaagagatctgtaaaacctgcccaggaacttacagaatttactttgcagaagcgttatcatactccatttacatctgtgttacacgtgatctgcttaccaagcatattaggaaatacctcttaggaagcattagcggtctcaggccaattactgtggagcagctttcattcctacccacttgcaaaccttggcgctgttgtctgagattgctgcagccattcttgttaccatggtacttctcaaactttgtgaaaacctgcacttttccttgcatgacaggttcctgtcttgtctgtcatgggagccattctgccaatttaaatgcgactgtggtataaacagtaaaatgatttaaaagtaagtcattccgtttttattaaaaaaaaaaaaaaanaaaaanaaaaaaanananaaaaaaaaaaaaaaaaaaaaaaaaaaaaaaaaaaaaggggggggggggaaaaaaaccccggggggggcttggcccccagttttttgtggaaaaggggccgccccatagaaggaggacttaatataagaaaagcgacggagggcgcccggataaaaccaagcgtgaggagggaaaaacacaacagagggatcctgggagggaccccctagttttgtgtgcggcacttatgggcaaaccacccaaagaagtacacgcgagggaaaaaaacaggggattgtgtcacacacaattcgcggaagaatgccggatagtaataggg

SEQ ID NO: 361481 - DNA, 1299 bp, Homo sapiens
gcggtgcgcgcgcctcgacatccgggcaacgcctctgttctgtcctcccccttcgtcgcctgtgacaaccggaagggaagtgaaaatgggtgtccctgctgcctcttagcaacaagaggggtcaagtgacacaaccagctgactcccgtagaggaagacactgtggaggccagttctggagctattgcagcctcggttgcccggccggggacccgagccgaaaagttatcgtcagaatgtcgggcaaagaccgaattgaaatctttccctcgcgaatggcacagaccatcatgaaggctcgtttaaagggagcacagacaggtcgaaacctcctgaagaaaaaatctgatgccttaactcttcgatttcgacagatcctaaagaagataatagagactaaaatgttgatgggcgaagtgatgagagaagctgccttttcactagctgaagccaagttcacagcaggtgacttcagcactacagttatccaaaatgtcaataaagcgcaagtgaagattcgagcgaagaaagataatgtagcaggtgttactttgccagtatttgaacattaccatgaaggaactgacagttatgaactgactggtttagccagaggtggggaacagttggctaaattaaagaggaattatgccaaagcagtggaactactggtggaactagcttctctgcagacttcttttgttactttggatgaagctattaagataaccaacaggcgtgtaaatgccattgaacatgtcatcattccccggattgaacgtactcttgcttatatcatcacagagctggatgagagagagcgagaagagttctataggttaaagaaaatacaagagaagaaaaagattctaaaggaaaaatctgagaaggacttggagcaaaggagagcagctggagaggtgttggagcctgctaatcttctggctgaagagaaggacgaggatcttctatttgaataatctttcctgttctggttctttgagaaaccctaacactggcttcattttaattcacagtgtgttcctgtcttgtctgtcatgggagccattctgccaatttaaatgcgactgtggtataaacagtaaaatgatttaaaaagtctcactcattctgtagcccaggctagagttgcagtgagccaagatcacaccactgcactctaccctgggcaacagatggagattccatcttccaccttccaaaaaaaaaggtgcagagtttactaatttaaaacattgatatttcatatttatttaaataaaaatgattgaatttatt

SEQ ID NO: 361482 - DNA, 791 bp, Homo sapiens
  misc_feature (766)..(766): n is a, c, g, or t
gcggtgcgcgcgcctcgacatccgggcaacgcctctgttctgtcctcccccttcgtcgcctgtgacaaccggaagggaagtgaaaatgggtgtccctgctgcctcttagcaacaagaggggtcaagtgacacaaccagctgactcccgtagaggaagacactgtggaggccagttctggagctattgcagcctcggttgcccggccggggacccgagccgaaaagttatcgtcagaatgtcgggcaaagaccgaattgaaatctttccctcgcgaatggcacagaccatcatgaaggctcgtttaaagggagcacagacaggtcgaaacctcctgaagaaaaaatctgatgccttaactcttcgatttcgacagatcctaaagaagataatagagactaaaatgttgatgggcgaagtgatgagagaagctgccttttcactagctgaagccaagttcacagcaggtgacttcagcactacagttatccaaaatgtcaataaagcgcaagtgaagattcgagcgaagaaagataatgtagcaggtgttactttgccagtatttgaacattaccatgaaggaactgacagttatgaactgactggtttagccagaggtggggaacagttggctaaattaaagaggaattatgccaaagcagtggaactactggtggaactagcttctctgcagacttcttttgttactttggatgaagctattaagataaccaacaggcgtgtaaatgccattgaacatgtcatcantcactttaacgggatgctctagacg

SEQ ID NO: 361483 - DNA, 806 bp, Homo sapiens
gcggtgcgcgcgcctcgacatccgggcaacgcctctgttctgtcctcccccttcgtcgcctgtgacaaccggaagggaagtgaaaatgggtgtccctgctgcctcttagcaacaagaggggtcaagtgacacaaccagctgactcccgtagaggaagacactgtggaggccagttctggagctattgcagcctcggttgcccggccggggacccgagccgaaaagttatcgtcagaatgtcgggcaaagaccgaattgaaatctttccctcgcgaatggcacagaccatcatgaaggctcgtttaaagggagcacagacaggtcgaaacctcctgaagaaaaaatctgatgccttaactcttcgatttcgacagatcctaaagaagataatagagactaaaatgttgatgggcgaagtgatgagagaagctgccttttcactagctgaagccaagttcacagcaggtgacttcagcactacagttatccaaaatgtcaataaagcgcaagtgaagattcgagcgaagaaagataatgtagcaggtgttactttgccagtatttgaacattaccatgaaggaactgacacaaagcagtggaactactggtggaactagcttctctgcagacttcttttgttactttggatgaagctattaagataaccaacaggcgtgtaaatgccattgaacatgtcatccattcccccgggattggaacgttactccttggcttattatcatccaccagaaactgggaatgaagaagaagaagccgaagaaaggggttcctattagggtttaaaa

SEQ ID NO: 361484 - DNA, 345 bp, Homo sapiens
tttgaagcagttcaattaaatcttgttaagtatgacaataaattacttagtgattcctataaattctctaaaatacaagaaggagaaaattgaatatagcccaagtaagcagcagggatttttacagaaatgatttcttcaatcttgtctccatggttctgttgttattcttttataaaaggtctcaagaggaggagaaaaaaatataggagacaaaatatatatatatatattataaataagaagtctgcaagaagatcagagatttttgtggaaaatggggacggttcaataagcaaaatgaatttccttacacaatagctctgtattttgtgtagaaaatcg

SEQ ID NO: 361485 - DNA, 285 bp, Homo sapiens
taatcaattgtacatttcaaaataactagaagagaataatttgaatgtttctagcacgaagaaaagataacggttgggcaccatggctcatgcctgtaatcccaacattttgggaggctgaagtgagaggatcacttgagcccaggagttcaagaccagtctgagcaacatagtgagaccccatctctacaaaaaatttaaaaatcagccaggtatagcgtcatgaacctgtggttctctctgctcaagacgttgaggcaggaggatcacttgagcccaggagtt

SEQ ID NO: 361486 - DNA, 404 bp, Homo sapiens
tccaaaatgctagctggcacaatatgctaaaaacagcagaaattcactagcaaaaagcagaatttatttgttcttaaaaataacttgatgctctaaaaatatgaatttaagaagtgtcatcatggttcaaaatattttacatttcagtatgtaaacaccttaaaatatgtgactaatcttctaaaatggcgtaatttccaaataacaggaaatattccaagagaaaaatagaaggcttttaaaatcaatttttttagttttgaggtatttactgaatgaaaagctacaatgtatatttacttttttttcccctactgctgccctgaatcactgtttaaaatgtgggcaaaaagacataggctttgttggaatttctcagagagtttactgtagaaaatgctaaa

SEQ ID NO: 361487 - DNA, 786 bp, Homo sapiens
ggacaagtagacccattacagagaagacgacgcgcagaaaaggaggaagcagtgtgctcatggaggcggagattggagtgatgtaaccgcaagccgaggaatgcttatagtcaccagaagctggaagagtcaaaggacacattctcccctcaagccccagtgggagcacggcccagctggattttggacttctggcctccagaactgtaagagaaatgtccattgtcttaagccaaccagtttgtggtagtttgttacagcagccccaggaaactactatgcagtcaaaagtcttcagtaaaccaaaaatctctaattatcgttgttttatatcatgtgctatgacgatcagagactaaacagctctttcgttagaattctaattctgagaaatatcagaggaagtgttttaataccctccagtctcaacaggaatcgattatatcttataagatacattttgttattttgcttgtatcgtttctttcttctcctaacttgctccttctttgctctttgtatactttttaagatgtagttgacatgggggaggggaatgagtaaaacactagtaggatagaccaacaggttttgtcttctttaaagtgtaatttctccatgatcccccttccaccttttctgtctcctttactggattcgcctcttctcccctacatcttaatgttgggatgctacagacctcattccctactctttaatatttactttttggtgatttcatctgtgttcacgattttacataccatccaaataacagcaactcca

SEQ ID NO: 361488 - DNA, 235 bp, Homo sapiens
gcggccgcctactactactactgctcgaattcaagcttctaacgatgtacggggaatgggctgcagtcttcttccatcacttttccctaccaggtccattaatatgcttataacactagtgccagttattttatttgataatgcttatggtatttgtatatttgtttgcattccaattttgtttaataatgagtgtgtaaactgcatacgttaaataaatgtaaatactaatgta

SEQ ID NO: 361489 - DNA, 4345 bp, Homo sapiens
aggtggtagttgcggcgctggttcccgggagcagccgtcgagccacaactgcggaggaggagttcgggaaagcggccgtcgggactcctcccctccgtcgtctccgccccggttgagaggcgcctcggcgcatcggagggaccctcccccgcgcttcctcaggctgctgtcgccgctgctgggagatgggcctactcgcccgccaccctgcgctgccgccgctctgaggagttaaagttttttcagaacatccatgatagcagtcttctgtaaatcgaacttttcaagaattctctgaaggaaccaagtaggatattcttacatcatgacttaatgtgaatgcaagaacaagaaataggttttatctctaaatataatgaagggctgtgtgtaaacactgaccctgtctcaattctaacaagcattttagacatgagtttacatcggcaaatgggttcagatcgagatcttcagtcctctgcttcatctgtgagcttgccttcagtcaaaaaggcacccaaaaaaagaagaatttcaataggctccctgtttcggaggaaaaaagataacaaacgtaaatcaagggagctaaatggcggggtggatggaattgcaagtattgaaagtatacattctgaaatgtgtactgataagaactccattttctctacaaatacctcttctgacaatggattaacttccatcagcaaacaaattggagacttcatagagtgccctttgtgccttttgcggcattctaaagacagatttcctgatataatgacttgtcatcacagatcttgtgtggattgcttacgacaatatttaaggatagaaatctctgaaagcagagttaatattagttgcccagaatgtactgaacggtttaatccccatgatattcgcttgatattaagtgatgatgtcttgatggaaaaatacgaagaatttatgcttagacggtggcttgttgcagatcctgattgtaggtggtgtccagctccagactgtggatatgctgtgatagcatttggatgtgccagctgtccaaaattaacttgtgggcgagagggctgtggaacagagttttgctaccactgtaaacagatttggcaccccaaccagacctgtgatgctgctcgacaagagagagcccagagcttacgtttgagaactatacgttcttcatccattagttatagtcaagagtctggagcagcagctgatgatataaagccatgtccacgatgtgctgcttatataataaagatgaatgatgggagctgcaatcacatgacatgtgctgtttgtggttgtgagttttgttggttgtgtatgaaagaaatctcagatttgcattatctaagtccatcaggatgtactttttgggggaagaaaccctggagccgaaagaagaaaatattgtggcaactgggaacactggttggtgctcctgtcggaatcgctttaatagctggcattgctattcctgcaatgattattggcattcctgtgtatgtgggccgcaagattcacaatcgctatgaaggcaaggatgtttcaaagcacaaacggaatttggccatagcaggtggtgtaacgttgtctgtaatcgtgtctccagtagtagctgcagtgactgtaggtatcggtgttcctattatgttagcttatgtctatggcgtagttccaatttctctttgtcgaagcggaggttgtggagtctcagcaggcaatggaaaaggagttaggattgaatttgatgatgaaaatgatataaatgttggtggaactaacacagctgtagacacaacatcagtagcagaagcaagacacaacccaagcataggggagggaagtgttggtgggctgactggcagtttgagtgcaagtggaagccacatggatcgaataggagccatccgagacaacctgagtgaaacggccagcaccatggcactagctggagccagtataacggggagtctgtcaggaagtgccatggtaaactgttttaacaggttggaagtacaagcagatgtacagaaagaacggtacagtctaagtggagaatctggcacagtcagcttgggaacagttagtgataatgccagcaccaaagcaatggcaggatccattctgaattcctacatcccattggacaaagaaggcaacagtatggaggtgcaagtagatattgagtcaaagccatccaaattcaggcacaacagtggaagcagtagtgtggatgatggcagtgccacccgaagtcatgctggcggttcatccagtggcttgcctgaaggtaaatctagtgccaccaagtggtccaaagaagcaacagcagggaaaaaatcaaaaagtggtaaactgaggaaaaagggtaacatgaagataaatgagacgagagaggacatggatgcacagttgttagaacaacaaagcacgaactcaagtgaatttgaggctccatccctcagtgacagtatgccttctgtagcagattctcactctagtcatttttctgaatttagttgttctgacctagaaagcatgaaaacttcttgtagtcatggttccagtgattatcacacccgctttgctactgttaacattcttcctgaggtagaaaatgaccgtctggaaaattccccacatcagtgtagcatttctgtggttacccaaactgcttcctgttcagaagtttcacagttgaatcatattgctgaagaacatggtaacaatggaataaaacctaatgttgatttatattttggcgatgcactaaaagaaacaaataacaaccactcacatcagacaatggaattaaaagttgcaattcagactgaaatttaggcccataaatgctgcagaataattaccactgtacaaccgtgtttggagctggttgaactacatgtgactacttaagtttcaggttaccagcaaaagccgggtttcattatcataatgcagatacattttctgtgttcagcaaggcattgtgtgtcatgtggatcttagttaccaaactatgaagtgaaggctttaaaagtgcattattttaaggataataaatttgaagagcaaagcatgttttgtgtgtttgccacaaaacattgcttgaagcacatacttagatagaaattggtcttaatttatataatcaatataaaatactaatgcaattctacagcattcaaatgaagaaaacttgaggctttagggataagtggttagtgatattttattgaaaccactaaagagataagtttaaaagaactgcataggttactctcagtatatgatactctgtaacatttctatttatatcggcataaatttcattttttttcttcatatgcaatgtggttatataaagcttaatgcagctcatttgctaccatttggatacttagacactttgagcaagattgtggcagtttttgcacaactttgaaatagaaatacctggtactctatcttgtttattgttgatgccatcttagaggaaaaaatgtaaaggtaagtaattaagcatatgacagcaacaaataagatacataaaactacaaaataaagtcccattaggttataagtattacaaaaaatccacctttctctaaggggaagtttgtaccccattgattcttggtgcctttgggatcgactgggttttaatggcctagttatttgaggattttgctgtgttgttttccatgtcttctctggtcaccttggattatatataaaaatacaggaaatagataaacatgaatgtgattaataatgctgaaaaagtattagcctaccaaagacacactcaggctttagtgaataactttacataacctcagtttttaacacatgcatatcttctccaaccatgaaatcaaagcacggtgcagaacttgtaccaagtacaaaaggtccatgtatgattagcattattttcttttgcttttgtttatggacaatgttcagctgacataagcagaagttggccaaaatactgcctgtactgttaatttcctgtataattcacttaaataaaagcaggttaacctcaatgatagcagttaaaatgttctatcttatgtatttcttttaagtattaccattatggtgctactgagcgttttcttttggtaaaaagaaaaatgccatgggctgcagtcttcttccatcacttttccctaccaggtccattaatatgcttataacactagtgccagttattttatttgataatgcttatggtatttgtatatttgtttgcattccaattttgtttaataatgagtgtgtaaactgcatacgttaaataaatgtaaatactaatgta

SEQ ID NO: 361490 - DNA, 4336 bp, Homo sapiens
tgcctgtctactgccgagggcatttgagtgtgggacccatgccctgcatttcttcgctaccccacagcttctgctcatgaatccagctcaaatgtcagaagaattgacgttagtttgagagaccaaactaagttacagcctctttggtttctgttactctggctggtcttgaactcctggactcaagtgatccaaccacctctgcttctcaaagtgctaggactacagttttttcagaacatccatgatagcagtcttctgtaaatcgaacttttcaagaattctctgaaggaaccaagtaggatattcttacatcatgacttaatgtgaatgcaagaacaagaaataggttttatctctaaatataatgaagggctgtgtgtaaacactgaccctgtctcaattctaacaagcattttagacatgagtttacatcggcaaatgggttcagatcgagatcttcagtcctctgcttcatctgtgagcttgccttcagtcaaaaaggcacccaaaaaaagaagaatttcaataggctccctgtttcggaggaaaaaagataacaaacgtaaatcaagggagctaaatggcggggtggatggaattgcaagtattgaaagtatacattctgaaatgtgtactgataagaactccattttctctacaaatacctcttctgacaatggattaacttccatcagcaaacaaattggagacttcatagagtgccctttgtgccttttgcggcattctaaagacagatttcctgatataatgacttgtcatcacagatcttgtgtggattgcttacgacaatatttaaggatagaaatctctgaaagcagagttaatattagttgcccagaatgtactgaacggtttaatccccatgatattcgcttgatattaagtgatgatgtcttgatggaaaaatacgaagaatttatgcttagacggtggcttgttgcagatcctgattgtaggtggtgtccagctccagactgtggatatgctgtgatagcatttggatgtgccagctgtccaaaattaacttgtgggcgagagggctgtggaacagagttttgctaccactgtaaacagatttggcaccccaaccagacctgtgatgctgctcgacaagagagagcccagagcttacgtttgagaactatacgttcttcatccattagttatagtcaagagtctggagcagcagctgatgatataaagccatgtccacgatgtgctgcttatataataaagatgaatgatgggagctgcaatcacatgacatgtgctgtttgtggttgtgagttttgttggttgtgtatgaaagaaatctcagatttgcattatctaagtccatcaggatgtactttttgggggaagaaaccctggagccgaaagaagaaaatattgtggcaactgggaacactggttggtgctcctgtcggaatcgctttaatagctggcattgctattcctgcaatgattattggcattcctgtgtatgtgggccgcaagattcacaatcgctatgaaggcaaggatgtttcaaagcacaaacggaatttggccatagcaggtggtgtaacgttgtctgtaatcgtgtctccagtagtagctgcagtgactgtaggtatcggtgttcctattatgttagcttatgtctatggcgtagttccaatttctctttgtcgaagcggaggttgtggagtctcagcaggcaatggaaaaggagttaggattgaatttgatgatgaaaatgatataaatgttggtggaactaacacagctgtagacacaacatcagtagcagaagcaagacacaacccaagcataggggagggaagtgttggtgggctgactggcagtttgagtgcaagtggaagccacatggatcgaataggagccatccgagacaacctgagtgaaacggccagcaccatggcactagctggagccagtataacggggagtctgtcaggaagtgccatggtaaactgttttaacaggttggaagtacaagcagatgtacagaaagaacggtacagtctaagtggagaatctggcacagtcagcttgggaacagttagtgataatgccagcaccaaagcaatggcaggatccattctgaattcctacatcccattggacaaagaaggcaacagtatggaggtgcaagtagatattgagtcaaagccatccaaattcaggcacaacagtggaagcagtagtgtggatgatggcagtgccacccgaagtcatgctggcggttcatccagtggcttgcctgaaggtaaatctagtgccaccaagtggtccaaagaagcaacagcagggaaaaaatcaaaaagtggtaaactgaggaaaaagggtaacatgaagataaatgagacgagagaggacatggatgcacagttgttagaacaacaaagcacgaactcaagtgaatttgaggctccatccctcagtgacagtatgccttctgtagcagattctcactctagtcatttttctgaatttagttgttctgacctagaaagcatgaaaacttcttgtagtcatggttccagtgattatcacacccgctttgctactgttaacattcttcctgaggtagaaaatgaccgtctggaaaattccccacatcagtgtagcatttctgtggttacccaaactgcttcctgttcagaagtttcacagttgaatcatattgctgaagaacatggtaacaatggaataaaacctaatgttgatttatattttggcgatgcactaaaagaaacaaataacaaccactcacatcagacaatggaattaaaagttgcaattcagactgaaatttaggcccataaatgctgcagaataattaccactgtacaaccgtgtttggagctggttgaactacatgtgactacttaagtttcaggttaccagcaaaagccgggtttcattatcataatgcagatacattttctgtgttcagcaaggcattgtgtgtcatgtggatcttagttaccaaactatgaagtgaaggctttaaaagtgcattattttaaggataataaatttgaagagcaaagcatgttttgtgtgtttgccacaaaacattgcttgaagcacatacttagatagaaattggtcttaatttatataatcaatataaaatactaatgcaattctacagcattcaaatgaagaaaacttgaggctttagggataagtggttagtgatattttattgaaaccactaaagagataagtttaaaagaactgcataggttactctcagtatatgatactctgtaacatttctatttatatcggcataaatttcattttttttcttcatatgcaatgtggttatataaagcttaatgcagctcatttgctaccatttggatacttagacactttgagcaagattgtggcagtttttgcacaactttgaaatagaaatacctggtactctatcttgtttattgttgatgccatcttagaggaaaaaatgtaaaggtaagtaattaagcatatgacagcaacaaataagatacataaaactacaaaataaagtcccattaggttataagtattacaaaaaatccacctttctctaaggggaagtttgtaccccattgattcttggtgcctttgggatcgactgggttttaatggcctagttatttgaggattttgctgtgttgttttccatgtcttctctggtcaccttggattatatataaaaatacaggaaatagataaacatgaatgtgattaataatgctgaaaaagtattagcctaccaaagacacactcaggctttagtgaataactttacataacctcagtttttaacacatgcatatcttctccaaccatgaaatcaaagcacggtgcagaacttgtaccaagtacaaaaggtccatgtatgattagcattattttcttttgcttttgtttatggacaatgttcagctgacataagcagaagttggccaaaatactgcctgtactgttaatttcctgtataattcacttaaataaaagcaggttaacctcaatgatagcagttaaaatgttctatcttatgtatttcttttaagtattaccattatggtgctactgagcgttttcttttggtaaaaagaaaaatgccatgggctgcagtcttcttccatcacttttccctaccaggtccattaatatgcttataacactagtgccagttattttatttgataatgcttatggtatttgtatatttgtttgcattccaattttgtttaataatgagtgtgtaaactgcatacgttaaataaatgtaaatactaatgta

SEQ ID NO: 361491 - DNA, 4315 bp, Homo sapiens
ccctcgagctgtctcctgcccctaaagcgggggagacccaagggcggttgccgcggggaggcggcgggggcggaacgcattcctgacgggtgaaatcggctctaacgggaccgatttccgggcctcgctgcaaatttggagccgggacatcgccccgcaagccgtgctgcctggggccttagggaggggagctgtgttcggaggaagttttttcagaacatccatgatagcagtcttctgtaaatcgaacttttcaagaattctctgaaggaaccaagtaggatattcttacatcatgacttaatgtgaatgcaagaacaagaaataggttttatctctaaatataatgaagggctgtgtgtaaacactgaccctgtctcaattctaacaagcattttagacatgagtttacatcggcaaatgggttcagatcgagatcttcagtcctctgcttcatctgtgagcttgccttcagtcaaaaaggcacccaaaaaaagaagaatttcaataggctccctgtttcggaggaaaaaagataacaaacgtaaatcaagggagctaaatggcggggtggatggaattgcaagtattgaaagtatacattctgaaatgtgtactgataagaactccattttctctacaaatacctcttctgacaatggattaacttccatcagcaaacaaattggagacttcatagagtgccctttgtgccttttgcggcattctaaagacagatttcctgatataatgacttgtcatcacagatcttgtgtggattgcttacgacaatatttaaggatagaaatctctgaaagcagagttaatattagttgcccagaatgtactgaacggtttaatccccatgatattcgcttgatattaagtgatgatgtcttgatggaaaaatacgaagaatttatgcttagacggtggcttgttgcagatcctgattgtaggtggtgtccagctccagactgtggatatgctgtgatagcatttggatgtgccagctgtccaaaattaacttgtgggcgagagggctgtggaacagagttttgctaccactgtaaacagatttggcaccccaaccagacctgtgatgctgctcgacaagagagagcccagagcttacgtttgagaactatacgttcttcatccattagttatagtcaagagtctggagcagcagctgatgatataaagccatgtccacgatgtgctgcttatataataaagatgaatgatgggagctgcaatcacatgacatgtgctgtttgtggttgtgagttttgttggttgtgtatgaaagaaatctcagatttgcattatctaagtccatcaggatgtactttttgggggaagaaaccctggagccgaaagaagaaaatattgtggcaactgggaacactggttggtgctcctgtcggaatcgctttaatagctggcattgctattcctgcaatgattattggcattcctgtgtatgtgggccgcaagattcacaatcgctatgaaggcaaggatgtttcaaagcacaaacggaatttggccatagcaggtggtgtaacgttgtctgtaatcgtgtctccagtagtagctgcagtgactgtaggtatcggtgttcctattatgttagcttatgtctatggcgtagttccaatttctctttgtcgaagcggaggttgtggagtctcagcaggcaatggaaaaggagttaggattgaatttgatgatgaaaatgatataaatgttggtggaactaacacagctgtagacacaacatcagtagcagaagcaagacacaacccaagcataggggagggaagtgttggtgggctgactggcagtttgagtgcaagtggaagccacatggatcgaataggagccatccgagacaacctgagtgaaacggccagcaccatggcactagctggagccagtataacggggagtctgtcaggaagtgccatggtaaactgttttaacaggttggaagtacaagcagatgtacagaaagaacggtacagtctaagtggagaatctggcacagtcagcttgggaacagttagtgataatgccagcaccaaagcaatggcaggatccattctgaattcctacatcccattggacaaagaaggcaacagtatggaggtgcaagtagatattgagtcaaagccatccaaattcaggcacaacagtggaagcagtagtgtggatgatggcagtgccacccgaagtcatgctggcggttcatccagtggcttgcctgaaggtaaatctagtgccaccaagtggtccaaagaagcaacagcagggaaaaaatcaaaaagtggtaaactgaggaaaaagggtaacatgaagataaatgagacgagagaggacatggatgcacagttgttagaacaacaaagcacgaactcaagtgaatttgaggctccatccctcagtgacagtatgccttctgtagcagattctcactctagtcatttttctgaatttagttgttctgacctagaaagcatgaaaacttcttgtagtcatggttccagtgattatcacacccgctttgctactgttaacattcttcctgaggtagaaaatgaccgtctggaaaattccccacatcagtgtagcatttctgtggttacccaaactgcttcctgttcagaagtttcacagttgaatcatattgctgaagaacatggtaacaatggaataaaacctaatgttgatttatattttggcgatgcactaaaagaaacaaataacaaccactcacatcagacaatggaattaaaagttgcaattcagactgaaatttaggcccataaatgctgcagaataattaccactgtacaaccgtgtttggagctggttgaactacatgtgactacttaagtttcaggttaccagcaaaagccgggtttcattatcataatgcagatacattttctgtgttcagcaaggcattgtgtgtcatgtggatcttagttaccaaactatgaagtgaaggctttaaaagtgcattattttaaggataataaatttgaagagcaaagcatgttttgtgtgtttgccacaaaacattgcttgaagcacatacttagatagaaattggtcttaatttatataatcaatataaaatactaatgcaattctacagcattcaaatgaagaaaacttgaggctttagggataagtggttagtgatattttattgaaaccactaaagagataagtttaaaagaactgcataggttactctcagtatatgatactctgtaacatttctatttatatcggcataaatttcattttttttcttcatatgcaatgtggttatataaagcttaatgcagctcatttgctaccatttggatacttagacactttgagcaagattgtggcagtttttgcacaactttgaaatagaaatacctggtactctatcttgtttattgttgatgccatcttagaggaaaaaatgtaaaggtaagtaattaagcatatgacagcaacaaataagatacataaaactacaaaataaagtcccattaggttataagtattacaaaaaatccacctttctctaaggggaagtttgtaccccattgattcttggtgcctttgggatcgactgggttttaatggcctagttatttgaggattttgctgtgttgttttccatgtcttctctggtcaccttggattatatataaaaatacaggaaatagataaacatgaatgtgattaataatgctgaaaaagtattagcctaccaaagacacactcaggctttagtgaataactttacataacctcagtttttaacacatgcatatcttctccaaccatgaaatcaaagcacggtgcagaacttgtaccaagtacaaaaggtccatgtatgattagcattattttcttttgcttttgtttatggacaatgttcagctgacataagcagaagttggccaaaatactgcctgtactgttaatttcctgtataattcacttaaataaaagcaggttaacctcaatgatagcagttaaaatgttctatcttatgtatttcttttaagtattaccattatggtgctactgagcgttttcttttggtaaaaagaaaaatgccatgggctgcagtcttcttccatcacttttccctaccaggtccattaatatgcttataacactagtgccagttattttatttgataatgcttatggtatttgtatatttgtttgcattccaattttgtttaataatgagtgtgtaaactgcatacgttaaataaatgtaaatactaatgta

SEQ ID NO: 361492 - DNA, 4166 bp, Homo sapiens
tgatgagtacacggagtccattttagttttatttgtgataataactttgtgagctctgttttttcagaacatccatgatagcagtcttctgtaaatcgaacttttcaagaattctctgaaggaaccaagtaggatattcttacatcatgacttaatgtgaatgcaagaacaagaaataggttttatctctaaatataatgaagggctgtgtgtaaacactgaccctgtctcaattctaacaagcattttagacatgagtttacatcggcaaatgggttcagatcgagatcttcagtcctctgcttcatctgtgagcttgccttcagtcaaaaaggcacccaaaaaaagaagaatttcaataggctccctgtttcggaggaaaaaagataacaaacgtaaatcaagggagctaaatggcggggtggatggaattgcaagtattgaaagtatacattctgaaatgtgtactgataagaactccattttctctacaaatacctcttctgacaatggattaacttccatcagcaaacaaattggagacttcatagagtgccctttgtgccttttgcggcattctaaagacagatttcctgatataatgacttgtcatcacagatcttgtgtggattgcttacgacaatatttaaggatagaaatctctgaaagcagagttaatattagttgcccagaatgtactgaacggtttaatccccatgatattcgcttgatattaagtgatgatgtcttgatggaaaaatacgaagaatttatgcttagacggtggcttgttgcagatcctgattgtaggtggtgtccagctccagactgtggatatgctgtgatagcatttggatgtgccagctgtccaaaattaacttgtgggcgagagggctgtggaacagagttttgctaccactgtaaacagatttggcaccccaaccagacctgtgatgctgctcgacaagagagagcccagagcttacgtttgagaactatacgttcttcatccattagttatagtcaagagtctggagcagcagctgatgatataaagccatgtccacgatgtgctgcttatataataaagatgaatgatgggagctgcaatcacatgacatgtgctgtttgtggttgtgagttttgttggttgtgtatgaaagaaatctcagatttgcattatctaagtccatcaggatgtactttttgggggaagaaaccctggagccgaaagaagaaaatattgtggcaactgggaacactggttggtgctcctgtcggaatcgctttaatagctggcattgctattcctgcaatgattattggcattcctgtgtatgtgggccgcaagattcacaatcgctatgaaggcaaggatgtttcaaagcacaaacggaatttggccatagcaggtggtgtaacgttgtctgtaatcgtgtctccagtagtagctgcagtgactgtaggtatcggtgttcctattatgttagcttatgtctatggcgtagttccaatttctctttgtcgaagcggaggttgtggagtctcagcaggcaatggaaaaggagttaggattgaatttgatgatgaaaatgatataaatgttggtggaactaacacagctgtagacacaacatcagtagcagaagcaagacacaacccaagcataggggagggaagtgttggtgggctgactggcagtttgagtgcaagtggaagccacatggatcgaataggagccatccgagacaacctgagtgaaacggccagcaccatggcactagctggagccagtataacggggagtctgtcaggaagtgccatggtaaactgttttaacaggttggaagtacaagcagatgtacagaaagaacggtacagtctaagtggagaatctggcacagtcagcttgggaacagttagtgataatgccagcaccaaagcaatggcaggatccattctgaattcctacatcccattggacaaagaaggcaacagtatggaggtgcaagtagatattgagtcaaagccatccaaattcaggcacaacagtggaagcagtagtgtggatgatggcagtgccacccgaagtcatgctggcggttcatccagtggcttgcctgaaggtaaatctagtgccaccaagtggtccaaagaagcaacagcagggaaaaaatcaaaaagtggtaaactgaggaaaaagggtaacatgaagataaatgagacgagagaggacatggatgcacagttgttagaacaacaaagcacgaactcaagtgaatttgaggctccatccctcagtgacagtatgccttctgtagcagattctcactctagtcatttttctgaatttagttgttctgacctagaaagcatgaaaacttcttgtagtcatggttccagtgattatcacacccgctttgctactgttaacattcttcctgaggtagaaaatgaccgtctggaaaattccccacatcagtgtagcatttctgtggttacccaaactgcttcctgttcagaagtttcacagttgaatcatattgctgaagaacatggtaacaatggaataaaacctaatgttgatttatattttggcgatgcactaaaagaaacaaataacaaccactcacatcagacaatggaattaaaagttgcaattcagactgaaatttaggcccataaatgctgcagaataattaccactgtacaaccgtgtttggagctggttgaactacatgtgactacttaagtttcaggttaccagcaaaagccgggtttcattatcataatgcagatacattttctgtgttcagcaaggcattgtgtgtcatgtggatcttagttaccaaactatgaagtgaaggctttaaaagtgcattattttaaggataataaatttgaagagcaaagcatgttttgtgtgtttgccacaaaacattgcttgaagcacatacttagatagaaattggtcttaatttatataatcaatataaaatactaatgcaattctacagcattcaaatgaagaaaacttgaggctttagggataagtggttagtgatattttattgaaaccactaaagagataagtttaaaagaactgcataggttactctcagtatatgatactctgtaacatttctatttatatcggcataaatttcattttttttcttcatatgcaatgtggttatataaagcttaatgcagctcatttgctaccatttggatacttagacactttgagcaagattgtggcagtttttgcacaactttgaaatagaaatacctggtactctatcttgtttattgttgatgccatcttagaggaaaaaatgtaaaggtaagtaattaagcatatgacagcaacaaataagatacataaaactacaaaataaagtcccattaggttataagtattacaaaaaatccacctttctctaaggggaagtttgtaccccattgattcttggtgcctttgggatcgactgggttttaatggcctagttatttgaggattttgctgtgttgttttccatgtcttctctggtcaccttggattatatataaaaatacaggaaatagataaacatgaatgtgattaataatgctgaaaaagtattagcctaccaaagacacactcaggctttagtgaataactttacataacctcagtttttaacacatgcatatcttctccaaccatgaaatcaaagcacggtgcagaacttgtaccaagtacaaaaggtccatgtatgattagcattattttcttttgcttttgtttatggacaatgttcagctgacataagcagaagttggccaaaatactgcctgtactgttaatttcctgtataattcacttaaataaaagcaggttaacctcaatgatagcagttaaaatgttctatcttatgtatttcttttaagtattaccattatggtgctactgagcgttttcttttggtaaaaagaaaaatgccatgggctgcagtcttcttccatcacttttccctaccaggtccattaatatgcttataacactagtgccagttattttatttgataatgcttatggtatttgtatatttgtttgcattccaattttgtttaataatgagtgtgtaaactgcatacgttaaataaatgtaaatactaatgta

SEQ ID NO: 361493 - DNA, 4763 bp, Homo sapiens
  misc_feature (221)..(221): n is a, c, g, or t
  misc_feature (4763)..(4763): n is a, c, g, or t
ggacaagtagacccattacagagaagacgacgcgcagaaaaggaggaagcagtgtgctcatggaggcggagattggagtgatgtaaccgcaagccgaggaatgcttatagtcaccagaagctggaagagtcaaaggacacattctcccctcaagccccagtgggagcacggcccagctggattttggacttctggcctccagaactagacagggcctcacngtgtcacccagggtggaatacagtggtgtgatcatagctcactgcagcctggaattcctgggctcaagcaaccctgccacctcagccttccaagtagctaggactacagttttttcagaacatccatgatagcagtcttctgtaaatcgaacttttcaagaattctctgaaggaaccaagtaggatattcttacatcatgacttaatgtgaatgcaagaacaagaaataggttttatctctaaatataatgaagggctgtgtgtaaacactgaccctgtctcaattctaacaagcattttagacatgagtttacatcggcaaatgggttcagatcgagatcttcagtcctctgcttcatctgtgagcttgccttcagtcaaaaaggcacccaaaaaaagaagaatttcaataggctccctgtttcggaggaaaaaagataacaaacgtaaatcaagggagctaaatggcggggtggatggaattgcaagtattgaaagtatacattctgaaatgtgtactgataagaactccattttctctacaaatacctcttctgacaatggattaacttccatcagcaaacaaattggagacttcatagagtgccctttgtgccttttgcggcattctaaagacagatttcctgatataatgacttgtcatcacagatcttgtgtggattgcttacgacaatatttaaggatagaaatctctgaaagcagagttaatattagttgcccagaatgtactgaacggtttaatccccatgatattcgcttgatattaagtgatgatgtcttgatggaaaaatacgaagaatttatgcttagacggtggcttgttgcagatcctgattgtaggtggtgtccagctccagactgtggatatgctgtgatagcatttggatgtgccagctgtccaaaattaacttgtgggcgagagggctgtggaacagagttttgctaccactgtaaacagatttggcaccccaaccagacctgtgatgctgctcgacaagagagagcccagagcttacgtttgagaactatacgttcttcatccattagttatagtcaagagtctggagcagcagctgatgatataaagccatgtccacgatgtgctgcttatataataaagatgaatgatgggagctgcaatcacatgacatgtgctgtttgtggttgtgagttttgttggttgtgtatgaaagaaatctcagatttgcattatctaagtccatcaggatgtactttttgggggaagaaaccctggagccgaaagaagaaaatattgtggcaactgggaacactggttggtgctcctgtcggaatcgctttaatagctggcattgctattcctgcaatgattattggcattcctgtgtatgtgggccgcaagattcacaatcgctatgaaggcaaggatgtttcaaagcacaaacggaatttggccatagcaggtggtgtaacgttgtctgtaatcgtgtctccagtagtagctgcagtgactgtaggtatcggtgttcctattatgttagcttatgtctatggcgtagttccaatttctctttgtcgaagcggaggttgtggagtctcagcaggcaatggaaaaggagttaggattgaatttgatgatgaaaatgatataaatgttggtggaactaacacagctgtagacacaacatcagtagcagaagcaagacacaacccaagcataggggagggaagtgttggtgggctgactggcagtttgagtgcaagtggaagccacatggatcgaataggagccatccgagacaacctgagtgaaacggccagcaccatggcactagctggagccagtataacggggagtctgtcaggaagtgccatggtaaactgttttaacaggttggaagtacaagcagatgtacagaaagaacggtacagtctaagtggagaatctggcacagtcagcttgggaacagttagtgataatgccagcaccaaagcaatggcaggatccattctgaattcctacatcccattggacaaagaaggcaacagtatggaggtgcaagtagatattgagtcaaagccatccaaattcaggcacaacagtggaagcagtagtgtggatgatggcagtgccacccgaagtcatgctggcggttcatccagtggcttgcctgaaggtaaatctagtgccaccaagtggtccaaagaagcaacagcagggaaaaaatcaaaaagtggtaaactgaggaaaaagggtaacatgaagataaatgagacgagagaggacatggatgcacagttgttagaacaacaaagcacgaactcaagtgaatttgaggctccatccctcagtgacagtatgccttctgtagcagattctcactctagtcatttttctgaatttagttgttctgacctagaaagcatgaaaacttcttgtagtcatggttccagtgattatcacacccgctttgctactgttaacattcttcctgaggtagaaaatgaccgtctggaaaattccccacatcagtgtagcatttctgtggttacccaaactgcttcctgttcagaagtttcacagttgaatcatattgctgaagaacatggtaacaatggaataaaacctaatgttgatttatattttggcgatgcactaaaagaaacaaataacaaccactcacatcagacaatggaattaaaagttgcaattcagactgaaatttaggcccataaatgctgcagaataattaccactgtacaaccgtgtttggagctggttgaactacatgtgactacttaagtttcaggttaccagcaaaagccgggtttcattatcataatgcagatacattttctgtgttcagcaaggcattgtgtgtcatgtggatcttagttaccaaactatgaagtgaaggctttaaaagtgcattattttaaggataataaatttgaagagcaaagcatgttttgtgtgtttgccacaaaacattgcttgaagcacatacttagatagaaattggtcttaatttatataatcaatataaaatactaatgcaattctacagcattcaaatgaagaaaacttgaggctttagggataagtggttagtgatattttattgaaaccactaaagagataagtttaaaagaactgcataggttactctcagtatatgatactctgtaacatttctatttatatcggcataaatttcattttttttcttcatatgcaatgtggttatataaagcttaatgcagctcatttgctaccatttggatacttagacactttgagcaagattgtggcagtttttgcacaactttgaaatagaaatacctggtactctatcttgtttattgttgatgccatcttagaggaaaaaatgtaaaggtaagtaattaagcatatgacagcaacaaataagatacataaaactacaaaataaagtcccattaggttataagtattacaaaaaatccacctttctctaaggggaagtttgtaccccattgattcttggtgcctttgggatcgactgggttttaatggcctagttatttgaggattttgctgtgttgttttccatgtcttctctggtcaccttggattatatataaaaatacaggaaatagataaacatgaatgtgattaataatgctgaaaaagtattagcctaccaaagacacactcaggctttagtgaataactttacataacctcagtttttaacacatgcatatcttctccaaccatgaaatcaaagcacggtgcagaacttgtaccaagtacaaaaggtccatgtatgattagcattattttcttttgcttttgtttatggacaatgttcagctgacataagcagaagttggccaaaatactgcctgtactgttaatttcctgtataattcacttaaataaaagcaggttaacctcaatgatagcagttaaaatgttctatcttatgtatttcttttaagtattaccattatggtgctactgagcgttttcttttggtaaaaagaaaaatgccatgggctgcagtcttcttccatcacttttccctaccaggtccattaatatgcttataacactagtgccagttattttatttgataatgcttatggtatttgtatatttgtttgcattccaattttgtttaataatgagtgtgtaaactgcatacgttaaataaatgtaaatactaatgtaaaaaaaaaaaaaaaaaaaaaaaaaaaaatttttgggcggcctgtggtgccctcagaaaaatgtgttttagaacccaattcggtttgtgaggcgcggcccacagtaggtgtaagtgacacacaggtgcaccataagggtgttccctacagaaagaactcctgggccatggacctagtggcgggggattctcacccaaattaaaaaaaaagcgcggggggggaaccacggaaggttctttggaaccaaatccagagggggtccgagaggcaacacggggctctacacggggggcccagcaagctgaatataatccgcggcggggagn

SEQ ID NO: 361494 - DNA, 4398 bp, Homo sapiens
  misc_feature (221)..(221): n is a, c, g, or t
ggacaagtagacccattacagagaagacgacgcgcagaaaaggaggaagcagtgtgctcatggaggcggagattggagtgatgtaaccgcaagccgaggaatgcttatagtcaccagaagctggaagagtcaaaggacacattctcccctcaagccccagtgggagcacggcccagctggattttggacttctggcctccagaactagacagggcctcacngtgtcacccagggtggaatacagtggtgtgatcatagctcactgcagcctggaattcctgggctcaagcaaccctgccacctcagccttccaagtagctaggactacagttttttcagaacatccatgatagcagtcttctgtaaatcgaacttttcaagaattctctgaaggaaccaagtaggatattcttacatcatgacttaatgtgaatgcaagaacaagaaataggttttatctctaaatataatgaagggctgtgtgtaaacactgaccctgtctcaattctaacaagcattttagacatgagtttacatcggcaaatgggttcagatcgagatcttcagtcctctgcttcatctgtgagcttgccttcagtcaaaaaggcacccaaaaaaagaagaatttcaataggctccctgtttcggaggaaaaaagataacaaacgtaaatcaagggagctaaatggcggggtggatggaattgcaagtattgaaagtatacattctgaaatgtgtactgataagaactccattttctctacaaatacctcttctgacaatggattaacttccatcagcaaacaaattggagacttcatagagtgccctttgtgccttttgcggcattctaaagacagatttcctgatataatgacttgtcatcacagatcttgtgtggattgcttacgacaatatttaaggatagaaatctctgaaagcagagttaatattagttgcccagaatgtactgaacggtttaatccccatgatattcgcttgatattaagtgatgatgtcttgatggaaaaatacgaagaatttatgcttagacggtggcttgttgcagatcctgattgtaggtggtgtccagctccagactgtggatatgctgtgatagcatttggatgtgccagctgtccaaaattaacttgtgggcgagagggctgtggaacagagttttgctaccactgtaaacagatttggcaccccaaccagacctgtgatgctgctcgacaagagagagcccagagcttacgtttgagaactatacgttcttcatccattagttatagtcaagagtctggagcagcagctgatgatataaagccatgtccacgatgtgctgcttatataataaagatgaatgatgggagctgcaatcacatgacatgtgctgtttgtggttgtgagttttgttggttgtgtatgaaagaaatctcagatttgcattatctaagtccatcaggatgtactttttgggggaagaaaccctggagccgaaagaagaaaatattgtggcaactgggaacactggttggtgctcctgtcggaatcgctttaatagctggcattgctattcctgcaatgattattggcattcctgtgtatgtgggccgcaagattcacaatcgctatgaaggcaaggatgtttcaaagcacaaacggaatttggccatagcaggtggtgtaacgttgtctgtaatcgtgtctccagtagtagctgcagtgactgtaggtatcggtgttcctattatgttagcttatgtctatggcgtagttccaatttctctttgtcgaagcggaggttgtggagtctcagcaggcaatggaaaaggagttaggattgaatttgatgatgaaaatgatataaatgttggtggaactaacacagctgtagacacaacatcagtagcagaagcaagacacaacccaagcataggggagggaagtgttggtgggctgactggcagtttgagtgcaagtggaagccacatggatcgaataggagccatccgagacaacctgagtgaaacggccagcaccatggcactagctggagccagtataacggggagtctgtcaggaagtgccatggtaaactgttttaacaggttggaagtacaagcagatgtacagaaagaacggtacagtctaagtggagaatctggcacagtcagcttgggaacagttagtgataatgccagcaccaaagcaatggcaggatccattctgaattcctacatcccattggacaaagaaggcaacagtatggaggtgcaagtagatattgagtcaaagccatccaaattcaggcacaacagtggaagcagtagtgtggatgatggcagtgccacccgaagtcatgctggcggttcatccagtggcttgcctgaaggtaaatctagtgccaccaagtggtccaaagaagcaacagcagggaaaaaatcaaaaagtggtaaactgaggaaaaagggtaacatgaagataaatgagacgagagaggacatggatgcacagttgttagaacaacaaagcacgaactcaagtgaatttgaggctccatccctcagtgacagtatgccttctgtagcagattctcactctagtcatttttctgaatttagttgttctgacctagaaagcatgaaaacttcttgtagtcatggttccagtgattatcacacccgctttgctactgttaacattcttcctgaggtagaaaatgaccgtctggaaaattccccacatcagtgtagcatttctgtggttacccaaactgcttcctgttcagaagtttcacagttgaatcatattgctgaagaacatggtaacaatggaataaaacctaatgttgatttatattttggcgatgcactaaaagaaacaaataacaaccactcacatcagacaatggaattaaaagttgcaattcagactgaaatttaggcccataaatgctgcagaataattaccactgtacaaccgtgtttggagctggttgaactacatgtgactacttaagtttcaggttaccagcaaaagccgggtttcattatcataatgcagatacattttctgtgttcagcaaggcattgtgtgtcatgtggatcttagttaccaaactatgaagtgaaggctttaaaagtgcattattttaaggataataaatttgaagagcaaagcatgttttgtgtgtttgccacaaaacattgcttgaagcacatacttagatagaaattggtcttaatttatataatcaatataaaatactaatgcaattctacagcattcaaatgaagaaaacttgaggctttagggataagtggttagtgatattttattgaaaccactaaagagataagtttaaaagaactgcataggttactctcagtatatgatactctgtaacatttctatttatatcggcataaatttcattttttttcttcatatgcaatgtggttatataaagcttaatgcagctcatttgctaccatttggatacttagacactttgagcaagattgtggcagtttttgcacaactttgaaatagaaatacctggtactctatcttgtttattgttgatgccatcttagaggaaaaaatgtaaaggtaagtaattaagcatatgacagcaacaaataagatacataaaactacaaaataaagtcccattaggttataagtattacaaaaaatccacctttctctaaggggaagtttgtaccccattgattcttggtgcctttgggatcgactgggttttaatggcctagttatttgaggattttgctgtgttgttttccatgtcttctctggtcaccttggattatatataaaaatacaggaaatagataaacatgaatgtgattaataatgctgaaaaagtattagcctaccaaagacacactcaggctttagtgaataactttacataacctcagtttttaacacatgcatatcttctccaaccatgaaatcaaagcacggtgcagaacttgtaccaagtacaaaaggtccatgtatgattagcattattttcttttgcttttgtttatggacaatgttcagctgacataagcagaagttggccaaaatactgcctgtactgttaatttcctgtataattcacttaaataaaagcaggttaacctcaatgatagcagttaaaatgttctatcttatgtatttcttttaagtattaccattatggtgctactgagcgttttcttttggtaaaaagaaaaatgccccattaatatgcttataacactagtgccagttattttatttgataatgcttatggtatttgtatatttgtttgcattccaattttgtttaataatgagtgtgtaaactgcatacgttaaataaatgtaaatactaatgta

SEQ ID NO: 361495 - DNA, 4161 bp, Homo sapiens
  misc_feature (221)..(221): n is a, c, g, or t
ggacaagtagacccattacagagaagacgacgcgcagaaaaggaggaagcagtgtgctcatggaggcggagattggagtgatgtaaccgcaagccgaggaatgcttatagtcaccagaagctggaagagtcaaaggacacattctcccctcaagccccagtgggagcacggcccagctggattttggacttctggcctccagaactagacagggcctcacngtgtcacccagggtggaatacagtggtgtgatcatagctcactgcagcctggaattcctgggctcaagcaaccctgccacctcagccttccaagtagctaggactacagttttttcagaacatccatgatagcagtcttctgtaaatcgaacttttcaagaattctctgaaggaaccaagtaggatattcttacatcatgacttaatgtgaatgcaagaacaagaaataggttttatctctaaatataatgaagggctgtgtgtaaacactgaccctgtctcaattctaacaagcattttagacatgagtttacatcggcaaatgggttcagatcgagatcttcagtcctctgcttcatctgtgagcttgccttcagtcaaaaaggcacccaaaaaaagaagaatttcaataggctccctgtttcggaggaaaaaagataacaaacgtaaatcaagggagctaaatggcggggtggatggaattgcaagtattgaaagtatacattctgaaatgtgtactgataagaactccattttctctacaaatacctcttctgacaatggattaacttccatcagcaaacaaattggagacttcatagagtgccctttgtgccttttgcggcattctaaagacagatttcctgatataatgacttgtcatcacagatcttgtgtggattgcttacgacaatatttaaggatagaaatctctgaaagcagagttaatattagttgcccagaatgtactgaacggtttaatccccatgatattcgcttgatattaagtgatgatgtcttgatggaaaaatacgaagaatttatgcttagacggtggcttgttgcagatcctgattgtaggtggtgtccagctccagactgtggatatgctgtgatagcatttggatgtgccagctgtccaaaattaacttgtgggcgagagggctgtggaacagagttttgctaccactgtaaacagatttggcaccccaaccagacctgtgatgctgctcgacaagagagagcccagagcttacgtttgagaactatacgttcttcatccattagttatagtcaagagtctggagcagcagctgatgatataaagccatgtccacgatgtgctgcttatataataaagatgaatgatgggagctgcaatcacatgacatgtgctgtttgtggttgtgagttttgttggttgtgtatgaaagaaatctcagatttgcattatctaagtccatcaggatgtactttttgggggaagaaaccctggagccgaaagaagaaaatattgtggcaactgggaacactggttggtgctcctgtcggaatcgctttaatagctggcattgctattcctgcaatgattattggcattcctgtgtatgtgggccgcaagattcacaatcgctatgaaggcaaggatgtttcaaagcacaaacggaatttggccatagcaggtggtgtaacgttgtctgtaatcgtgtctccagtagtagctgcagtgactgtaggtatcggtgttcctattatgttagcttatgtctatggcgtagttccaatttctctttgtcgaagcggaggttgtggagtctcagcaggcaatggaaaaggagttaggattgaatttgatgatgaaaatgatataaatgttggtggaactaacacagctgtagacacaacatcagtagcagaagcaagacacaacccaagcataggggagggaagtgttggtgggctgactggcagtttgagtgcaagtggaagccacatggatcgaataggagccatccgagacaacctgagtgaaacggccagcaccatggcactagctggagccagtataacggggagtctgtcaggaagtgccatggtaaactgttttaacaggttggaagtacaagcagatgtacagaaagaacggtacagtctaagtggagaatctggcacagtcagcttgggaacagttagtgataatgccagcaccaaagcaatggcaggatccattctgaattcctacatcccattggacaaagaaggcaacagtatggaggtgcaagtagatattgagtcaaagccatccaaattcaggcacaacagtggaagcagtagtgtggatgatggcagtgccacccgaagtcatgctggcggttcatccagtggcttgcctgaaggtaaatctagtgccaccaagtggtccaaagaagcaacagcagggaaaaaatcaaaaagtggtaaactgaggaaaaagggtaacatgaagataaatgagacgagagaggacatggatgcacagttgttagaacaacaaagcacgaactcaagtgaatttgaggctccatccctcagtgacagtatgccttctgtagcagattctcactctagtcatttttctgaatttagttgttctgacctagaaagcatgaaaacttcttgtagtcatggttccagtgattatcacacccgctttgctactgttaacattcttcctgaggtagaaaatgaccgtctggaaaattccccacatcagtgtagcatttctgtggttacccaaactgcttcctgttcagaagtttcacagttgaatcatattgctgaagaacatggtaacaatggaataaaacctaatgttgatttatattttggcgatgcactaaaagaaacaaataacaaccactcacatcagacaatggaattaaaagttgcaattcagactgaaatttaggcccataaatgctgcagaataattaccactgtacaaccgtgtttggagctggttgaactacatgtgactacttaagtttcaggttaccagcaaaagccgggtttcattatcataatgcagatacattttctgtgttcagcaaggcattgtgtgtcatgtggatcttagttaccaaactatgaagtgaaggctttaaaagtgcattattttaaggataataaatttgaagagcaaagcatgttttgtgtgtttgccacaaaacattgcttgaagcacatacttagatagaaattggtcttaatttatataatcaatataaaatactaatgcaattctacagcattcaaatgaagaaaacttgaggctttagggataagtggttagtgatattttattgaaaccactaaagagataagtttaaaagaactgcataggttactctcagtatatgatactctgtaacatttctatttatatcggcataaatttcattttttttcttcatatgcaatgtggttatataaagcttaatgcagctcatttgctaccatttggatacttagacactttgagcaagattgtggcagtttttgcacaactttgaaatagaaatacctggtactctatcttgtttattgttgatgccatcttagaggaaaaaatgtaaaggtaagtaattaagcatatgacagcaacaaataagatacataaaactacaaaataaagtcccattaggttataagtattacaaaaaatccacctttctctaaggggaagtttgtaccccattgattcttggtgcctttgggatcgactgggttttaatggcctagttatttgaggattttgctgtgttgttttccatgtcttctctggtcaccttggattatatataaaaatacaggaaatagataaacatgaatgtgattaataatgctgaaaaagtattagcctaccaaagacacactcaggctttagtgaataactttacataacctcagtttttaacacatgcatatcttctccaaccatgaaatcaaagcacggtgcagaacttgtaccaagtacaaaaggtccatgtatgattagcattattttcttttgcttttgtttatggacaatgttcagctgacataagcagaagttggccaaaatactgcctgtactgttaatttcctgtataattcacttaaataaaagcaggttaacctc

SEQ ID NO: 361496 - DNA, 894 bp, Homo sapiens
tcactgagcgacgcccatacgtcgatgctactgagtatgcaagatctatcgtccacggcgcatgaaatgtaaaggtaagtaattaagcatatgacagcaacaaataagatacataaaactacaaaataaagtcccattaggttataagtattacaaaaaatccacctttctctaaggggaagtttgtaccccattgattcttggtgcctttgggatcgactgggttttaatggcctagttatttgaggattttgctgtgttgttttccatgtcttctctggtcaccttggattatatataaaaatacaggaaatagataaacatgaatgtgattaataatgctgaaaaagtattagcctaccaaagacacactcaggctttagtgaataactttacataacctcagtttttaacacatgcatatcttctccaaccatgaaatcaaagcacggtgcagaacttgtaccaagtacaaaaggtccatgtatgattagcattattttcttttgcttttgtttatggacaatgttcagctgacataagcagaagttggccaaaatactgcctgtactgttaatttcctgtataattcacttaaataaaagcaggttaacctcaatgatagcagttaaaatgttctatcttatgtatttcttttaagtattaccattatggtgctactgagcgttttcttttggtaaaaagaaaaatgccatgggctgcagtcttcttccatcacttttccctaccaggtccattaatatgcttataacactagtgccagttattttatttgataatgcttatggtatttgtatatttgtttgcattccaattttgtttaataatgagtgtgtaaactgcatacgttaaataaatgtaaatactaatgta

SEQ ID NO: 361497 - DNA, 554 bp, Homo sapiens
ggctagaggatccccaagcagttaatacacactcaggctttagtgaataactttacataacctcagtttttaacacatgcatatcttctccaaccatgaaatcaaagcacggtgcagaacttgtaccaagtacaaaaggtccatgtatgattagcattattttcttttgcttttgtttatggacaatgttcagctgacataagcagaagttggccaaaatactgcctgtactgttaatttcctgtataattcacttaaataaaagcaggttaacctcaatgatagcagttaaaatgttctatcttatgtatttcttttaagtattaccattatggtgctactgagcgttttcttttggtaaaaagaaaaatgccatgggctgcagtcttcttccatcacttttccctaccaggtccattaatatgcttataacactagtgccagttattttatttgataatgcttatggtatttgtatatttgtttgcattccaattttgtttaataatgagtgtgtaaactgcatacgttaaataaatgtaaatactaatgta

SEQ ID NO: 361498 - DNA, 3657 bp, Homo sapiens
  misc_feature (221)..(221): n is a, c, g, or t
ggacaagtagacccattacagagaagacgacgcgcagaaaaggaggaagcagtgtgctcatggaggcggagattggagtgatgtaaccgcaagccgaggaatgcttatagtcaccagaagctggaagagtcaaaggacacattctcccctcaagccccagtgggagcacggcccagctggattttggacttctggcctccagaactagacagggcctcacngtgtcacccagggtggaatacagtggtgtgatcatagctcactgcagcctggaattcctgggctcaagcaaccctgccacctcagccttccaagtagctaggactacagttttttcagaacatccatgatagcagtcttctgtaaatcgaacttttcaagaattctctgaaggaaccaagtaggatattcttacatcatgacttaatgtgaatgcaagaacaagaaataggttttatctctaaatataatgaagggctgtgtgtaaacactgaccctgtctcaattctaacaagcattttagacatgagtttacatcggcaaatgggttcagatcgagatcttcagtcctctgcttcatctgtgagcttgccttcagtcaaaaaggcacccaaaaaaagaagaatttcaataggctccctgtttcggaggaaaaaagataacaaacgtaaatcaagggagctaaatggcggggtggatggaattgcaagtattgaaagtatacattctgaaatgtgtactgataagaactccattttctctacaaatacctcttctgacaatggattaacttccatcagcaaacaaattggagacttcatagagtgccctttgtgccttttgcggcattctaaagacagatttcctgatataatgacttgtcatcacagatcttgtgtggattgcttacgacaatatttaaggatagaaatctctgaaagcagagttaatattagttgcccagaatgtactgaacggtttaatccccatgatattcgcttgatattaagtgatgatgtcttgatggaaaaatacgaagaatttatgcttagacggtggcttgttgcagatcctgattgtaggtggtgtccagctccagactgtggatatgctgtgatagcatttggatgtgccagctgtccaaaattaacttgtgggcgagagggctgtggaacagagttttgctaccactgtaaacagatttggcaccccaaccagacctgtgatgctgctcgacaagagagagcccagagcttacgtttgagaactatacgttcttcatccattagttatagtcaagagtctggagcagcagctgatgatataaagccatgtccacgatgtgctgcttatataataaagatgaatgatgggagctgcaatcacatgacatgtgctgtttgtggttgtgagttttgttggttgtgtatgaaagaaatctcagatttgcattatctaagtccatcaggatgtactttttgggggaagaaaccctggagccgaaagaagaaaatattgtggcaactgggaacactggttggtgctcctgtcggaatcgctttaatagctggcattgctattcctgcaatgattattggcattcctgtgtatgtgggccgcaagattcacaatcgctatgaaggcaaggatgtttcaaagcacaaacggaatttggccatagcaggtggtgtaacgttgtctgtaatcgtgtctccagtagtagctgcagtgactgtaggtatcggtgttcctattatgttagcttatgtctatggcgtagttccaatttctctttgtcgaagcggaggttgtggagtctcagcaggcaatggaaaaggagttaggattgaatttgatgatgaaaatgatataaatgttggtggaactaacacagctgtagacacaacatcagtagcagaagcaagacacaacccaagcataggggagggaagtgttggtgggctgactggcagtttgagtgcaagtggaagccacatggatcgaataggagccatccgagacaacctgagtgaaacggccagcaccatggcactagctggagccagtataacggggagtctgtcaggaagtgccatggtaaactgttttaacaggttggaagtacaagcagatgtacagaaagaacggtacagtctaagtggagaatctggcacagtcagcttgggaacagttagtgataatgccagcaccaaagcaatggcaggatccattctgaattcctacatcccattggacaaagaaggcaacagtatggaggtgcaagtagatattgagtcaaagccatccaaattcaggcacaacagtggaagcagtagtgtggatgatggcagtgccacccgaagtcatgctggcggttcatccagtggcttgcctgaaggtaaatctagtgccaccaagtggtccaaagaagcaacagcagggaaaaaatcaaaaagtggtaaactgaggaaaaagggtaacatgaagataaatgagacgagagaggacatggatgcacagttgttagaacaacaaagcacgaactcaagtgaatttgaggctccatccctcagtgacagtatgccttctgtagcagattctcactctagtcatttttctgaatttagttgttctgacctagaaagcatgaaaacttcttgtagtcatggttccagtgattatcacacccgctttgctactgttaacattcttcctgaggtagaaaatgaccgtctggaaaattccccacatcagtgtagcatttctgtggttacccaaactgcttcctgttcagaagtttcacagttgaatcatattgctgaagaacatggtaacaatggaataaaacctaatgttgatttatattttggcgatgcactaaaagaaacaaataacaaccactcacatcagacaatggaattaaaagttgcaattcagactgaaatttaggcccataaatgctgcagaataattaccactgtacaaccgtgtttggagctggttgaactacatgtgactacttaagtttcaggttaccagcaaaagccgggtttcattatcataatgcagatacattttctgtgttcagcaaggcattgtgtgtcatgtggatcttagttaccaaactatgaagtgaaggctttaaaagtgcattattttaaggataataaatttgaagagcaaagcatgttttgtgtgtttgccacaaaacattgcttgaagcacatacttagatagaaattggtcttaatttatataatcaatataaaatactaatgcaattctacagcattcaaatgaagaaaacttgaggctttagggataagtggttagtgatattttattgaaaccactaaagagataagtttaaaagaactgcataggttactctcagtatatgatactctgtaacatttctatttatatcggcataaatttcattttttttcttcatatgcaatgtggttatataaagctatgggctgcagtcttcttccatcacttttccctaccaggtccattaatatgcttataacactagtgccagttattttatttgataatgcttatggtatttgtatatttgtttgcattccaattttgtttaataatgagtgtgtaaactgcatacgttaaataaatgtaaatactaatgta

SEQ ID NO: 361499 - DNA, 1808 bp, Homo sapiens
  misc_feature (221)..(221): n is a, c, g, or t
ggacaagtagacccattacagagaagacgacgcgcagaaaaggaggaagcagtgtgctcatggaggcggagattggagtgatgtaaccgcaagccgaggaatgcttatagtcaccagaagctggaagagtcaaaggacacattctcccctcaagccccagtgggagcacggcccagctggattttggacttctggcctccagaactagacagggcctcacngtgtcacccagggtggaatacagtggtgtgatcatagctcactgcagcctggaattcctgggctcaagcaaccctgccacctcagccttccaagtagctaggactacagttttttcagaacatccatgatagcagtcttctgtaaatcgaacttttcaagaattctctgaaggaaccaagtaggatattcttacatcatgacttaatgtgaatgcaagaacaagaaataggttttatctctaaatataatgaagggctgtgtgtaaacactgaccctgtctcaattctaacaagcattttagacatgagtttacatcggcaaatgggttcagatcgagatcttcagtcctctgcttcatctgtgagcttgccttcagtcaaaaaggcacccaaaaaaagaagaatttcaataggctccctgtttcggaggaaaaaagataacaaacgtaaatcaagggagctaaatggcggggtggatggaattgcaagtattgaaagtatacattctgaaatgtgtactgataagaactccattttctctacaaatacctcttctgacaatggattaacttccatcagcaaacaaattggagacttcatagagtgccctttgtgccttttgcggcattctaaagacagatttcctgatataatgacttgtcatcacagatcttgtgtggattgcttacgacaatatttaaggatagaaatctctgaaagcagagttaatattagttgcccagaatgtactgaacggtttaatccccatgatattcgcttgatattaagtgatgatgtcttgatggaaaaatacgaagaatttatgcttagacggtggcttgttgcagatcctgattgtaggtggtgtccagctccagactgtggatatgctgtgatagcatttggatgtgccagctgtccaaaattaacttgtgggcgagagggctgtggaacagagttttgctaccactgtaaacagatttggcaccccaaccagacctgtgatgctgctcgacaagagagagcccagagcttacgtttgagaactatacgttcttcatccattagttatagtcaagagtctggagcagcagctgatgatataaagccatgtccacgatgtgctgcttatataataaagatgaatgatgggagctgcaatcacatgacatgtgctgtttgtggttgtgagttttgttggttgtgtatgaaagaaatctcagatttgcattatctaagtccatcaggatgtactttttgggggaagaaaccctggagccgaaagaagaaaatattgtggcaactgggaacactggttggtgctcctgtcggaatcgctttaatagctggcattgctattcctgcaatgattattggcattcctgtgtatgtgggccgcaaggtaaaatgcatacttcttgttagtccattatcttattctaaatctttaggtgtattcttttagtattgatgatttttgggtttttttttttttttttttagacaaagggtatctttagtttcttcagtataaaacagttactcttttttcataaatttttagtgtttggcaagcatatataaata

SEQ ID NO: 361500 - DNA, 425 bp, Homo sapiens
  misc_feature (388)..(388): n is a, c, g, or t
  misc_feature (390)..(390): n is a, c, g, or t
  misc_feature (393)..(394): n is a, c, g, or t
taatggttaagaaacatacttgtttgaaatttcatatttataaaaatatacaaactaagaatacaattaaatgatcttgatttttttttttcagaacatccatgatagcagtcttctgtaaatcgaacttttcaagaattctctgaaggaaccaagtaggatattcttacatcatgacttaatgtgaatgcaagaacaagaaataggttttatctctaaatataatgaagggctgtgtgtaaacactgaccctgtctcaattctaacaagcattttagacatgagtttacatcggcaaatgggttcagatcgagatcttcagtcctctgcttcatctgtgagcttgccttcagtcaaaaaggcacccaaaaaaagaagaatttcaatnanggnnagtttttggggggggtgggtaggcagaatta

SEQ ID NO: 361501 - DNA, 448 bp, Homo sapiens
taatggttaagaaacatacttgtttgaaatttcatatttataaaaatatacaaactaagaatacaattaaatgatcttgatttttttttttcagaacatccatgatagcagtcttctgtaaatcgaacttttcaagaattctctgaaggaaccaagtaggatattcttacatcatgacttaatgtgaatgcaagaacaagaaataggttttatctctaaatataatgaagggctgtgtgtaaacactgaccctgtctcaattctaacaagcattttagacatgagtttacatcggcaaatgggttcagatcgagatcttcagtcctctgcttcatctgtgagcttgccttcagtcaaaaaggcacccaaaaaaagaagaatttcaattgtacccatcagggtgccgtggaaggcgggctttctcttttcttacttaggacatattata

SEQ ID NO: 361502 - DNA, 456 bp, Homo sapiens
  misc_feature (405)..(405): n is a, c, g, or t
taatggttaagaaacatacttgtttgaaatttcatatttataaaaatatacaaactaagaatacaattaaatgatcttgatttttttttttcagaacatccatgatagcagtcttctgtaaatcgaacttttcaagaattctctgaaggaaccaagtaggatattcttacatcatgacttaatgtgaatgcaagaacaagaaataggttttatctctaaatataatgaagggctgtgtgtaaacactgaccctgtctcaattctaacaagcattttagacatgagtttacatcggcaaatgggttcagatcgagatcttcagtcctctgcttcatctgtgagcttgccttcagtcaaaaaggcacccaaaaaaagaagaatttcaatctaaaggtcgcctcagancctttctctctcctgtggtggctggtcgggctgtgtgccgataatatccgt

SEQ ID NO: 361503 - DNA, 454 bp, Homo sapiens
  misc_feature (403)..(403): n is a, c, g, or t
taatggttaagaaacatacttgtttgaaatttcatatttataaaaatatacaaactaagaatacaattaaatgatcttgatttttttttttcagaacatccatgatagcagtcttctgtaaatcgaacttttcaagaattctctgaaggaaccaagtaggatattcttacatcatgacttaatgtgaatgcaagaacaagaaataggttttatctctaaatataatgaagggctgtgtgtaaacactgaccctgtctcaattctaacaagcattttagacatgagtttacatcggcaaatgggttcagatcgagatcttcagtcctctgcttcatctgtgagcttgccttcagtcaaaaaggcacccaaaaaaagaagaatttcaatgtccaacccaaaaagntcttcgtgagtcacaaacagggtttgttggtgtttgggattgttactggcg

SEQ ID NO: 361504 - DNA, 438 bp, Homo sapiens
  misc_feature (397)..(397): n is a, c, g, or t
  misc_feature (401)..(401): n is a, c, g, or t
taatggttaagaaacatacttgtttgaaatttcatatttataaaaatatacaaactaagaatacaattaaatgatcttgatttttttttttcagaacatccatgatagcagtcttctgtaaatcgaacttttcaagaattctctgaaggaaccaagtaggatattcttacatcatgacttaatgtgaatgcaagaacaagaaataggttttatctctaaatataatgaagggctgtgtgtaaacactgaccctgtctcaattctaacaagcattttagacatgagtttacatcggcaaatgggttcagatcgagatcttcagtcctctgcttcatctgtgagcttgccttcagtcaaaaaggcacccaaaaaaagaagaatttcaatggtattgttntccnttgagagggttctttggctgcaaggtaataagtggta

SEQ ID NO: 361505 - DNA, 385 bp, Homo sapiens
cccagagcttacgtttgagaactatacgttcttcatccattagttatagtcaagagtctggagcagcaggtatttatgtctaattttttctaataaaatatttgacacaaaacactagttattttaactttttaaagttaagtattcctgttttcctttcacttgccgaaagtgtttttaagtgcatttctatcccagaagcactcattctttcctatggaagaaagtggttctgaaattagaaagattatactgtccaggaaaaaaggaagtgttgtgatgatttatataactgatagccaaagatagtctgaaactgttgattataaaggtatctgtccaggtatggtagctcactcctgtaatcccagtactttgggaggct

SEQ ID NO: 361506 - DNA, 4438 bp, Homo sapiens
  misc_feature (221)..(221): n is a, c, g, or t
ggacaagtagacccattacagagaagacgacgcgcagaaaaggaggaagcagtgtgctcatggaggcggagattggagtgatgtaaccgcaagccgaggaatgcttatagtcaccagaagctggaagagtcaaaggacacattctcccctcaagccccagtgggagcacggcccagctggattttggacttctggcctccagaactagacagggcctcacngtgtcacccagggtggaatacagtggtgtgatcatagctcactgcagcctggaattcctgggctcaagcaaccctgccacctcagccttccaagtagctaggactacagttttttcagaacatccatgatagcagtcttctgtaaatcgaacttttcaagaattctctgaaggaaccaagtaggatattcttacatcatgacttaatgtgaatgcaagaacaagaaataggttttatctctaaatataatgaagggctgtgtgtaaacactgaccctgtctcaattctaacaagcattttagacatgagtttacatcggcaaatgggttcagatcgagatcttcagtcctctgcttcatctgtgagcttgccttcagtcaaaaaggcacccaaaaaaagaagaatttcaataggctccctgtttcggaggaaaaaagataacaaacgtaaatcaagggagctaaatggcggggtggatggaattgcaagtattgaaagtatacattctgaaatgtgtactgataagaactccattttctctacaaatacctcttctgacaatggattaacttccatcagcaaacaaattggagacttcatagagtgccctttgtgccttttgcggcattctaaagacagatttcctgatataatgacttgtcatcacagatcttgtgtggattgcttacgacaatatttaaggatagaaatctctgaaagcagagttaatattagttgcccagaatgtactgaacggtttaatccccatgatattcgcttgatattaagtgatgatgtcttgatggaaaaatacgaagaatttatgcttagacggtggcttgttgcagatcctgattgtaggtggtgtccagctccagactgtggatatgctgtgatagcatttggatgtgccagctgtccaaaattaacttgtgggcgagagggctgtggaacagagttttgctaccactgtaaacagatttggcaccccaaccagacctgtgatgctgctcgacaagagagagcccagagcttacgtttgagaactatacgttcttcatccattagttatagtcaagagtctggagcagcagctgatgatataaagccatgtccacgatgtgctgcttatataataaagatgaatgatgggagctgcaatcacatgacatgtgctgtttgtggttgtgagttttgttggttgtgtatgaaagaaatctcagatttgcattatctaagtccatcaggatgtactttttgggggaagaaaccctggagccgaaagaagaaaatattgtggcaactgggaacactggttggtgctcctgtcggaatcgctttaatagctggcattgctattcctgcaatgattattggcattcctgtgtatgtgggccgcaagattcacaatcgctatgaaggcaaggatgtttcaaagcacaaacggaatttggccatagcaggtggtgtaacgttgtctgtaatcgtgtctccagtagtagctgcagtgactgtaggtatcggtgttcctattatgttagcttatgtctatggcgtagttccaatttctctttgtcgaagcggaggttgtggagtctcagcaggcaatggaaaaggagttaggattgaatttgatgatgaaaatgatataaatgttggtggaactaacacagctgtagacacaacatcagtagcagaagcaagacacaacccaagcataggggagggaagtgttggtgggctgactggcagtttgagtgcaagtggaagccacatggatcgaataggagccatccgagacaacctgagtgaaacggccagcaccatggcactagctggagccagtataacggggagtctgtcaggaagtgccatggtaaactgttttaacaggttggaagtacaagcagatgtacagaaagaacggtacagtctaagtggagaatctggcacagtcagcttgggaacagttagtgataatgccagcaccaaagcaatggcaggatccattctgaattcctacatcccattggacaaagaaggcaacagtatggaggtgcaagtagatattgagtcaaagccatccaaattcaggcacaacagtggaagcagtagtgtggatgatggcagtgccacccgaagtcatgctggcggttcatccagtggcttgcctgaaggtaaatctagtgccaccaagtggtccaaagaagcaacagcagggaaaaaatcaaaaagtggtaaactgaggaaaaagggtaacatgaagataaatgagacgagagaggacatggatgcacagttgttagaacaacaaagcacgaactcaagtgaatttgaggctccatccctcagtgacagtatgccttctgtagcagattctcactctagtcatttttctgaatttagttgttctgacctagaaagcatgaaaacttcttgtagtcatggttccagtgattatcacacccgctttgctactgttaacattcttcctgaggtagaaaatgaccgtctggaaaattccccacatcagtgtagcatttctgtggttacccaaactgcttcctgttcagaagtttcacagttgaatcatattgctgaagaacatggtaacaatggaataaaacctaatgttgatttatattttggcgatgcactaaaagaaacaaataacaaccactcacatcagacaatggaattaaaagttgcaattcagactgaaatttaggcccataaatgctgcagaataattaccactgtacaaccgtgtttggagctggttgaactacatgtgactacttaagtttcaggttaccagcaaaagccgggtttcattatcataatgcagatacattttctgtgttcagcaaggcattgtgtgtcatgtggatcttagttaccaaactatgaagtgaaggctttaaaagtgcattattttaaggataataaatttgaagagcaaagcatgttttgtgtgtttgccacaaaacattgcttgaagcacatacttagatagaaattggtcttaatttatataatcaatataaaatactaatgcaattctacagcattcaaatgaagaaaacttgaggctttagggataagtggttagtgatattttattgaaaccactaaagagataagtttaaaagaactgcataggttactctcagtatatgatactctgtaacatttctatttatatcggcataaatttcattttttttcttcatatgcaatgtggttatataaagcttaatgcagctcatttgctaccatttggatacttagacactttgagcaagattgtggcagtttttgcacaactttgaaatagaaatacctggtactctatcttgtttattgttgatgccatcttagaggaaaaaatgtaaaggtaagtaattaagcatatgacagcaacaaataagatacataaaactacaaaataaagtcccattaggttataagtattacaaaaaatccacctttctctaaggggaagtttgtaccccattgattcttggtgcctttgggatcgactgggttttaatggcctagttatttgaggattttgctgtgttgttttccatgtcttctctggtcaccttggattatatataaaaatacaggaaatagataaacatgaatgtgattaataatgctgaaaaagtattagcctaccaaagacacactcaggctttagtgaataactttacataacctcagtttttaacacatgcatatcttctccaaccatgaaatcaaagcacggtgcagaacttgtaccaagtacaaaaggtccatgtatgattagcattattttcttttgcttttgtttatggacaatgttcagctgacataagcagaagttggccaaaatactgcctgtactgttaatttcctgtataattcacttaaataaaagcaggttaacctcaatgatagcagttaaaatgttctatcttatgtatttcttttaagtattaccattatggtgctactgagcgttttcttttggtaaaaagaaaaatgccatgggctgcagtcttcttccatcacttttccctaccaggtccattaatatgcttataacactagtgccagttattttatttgataatgcttatggtatttgtatatttgtttgcattccaattttgtttaataatgagtgtgtaaactgcatacgttaaataaatgtaaatactaatgta

SEQ ID NO: 361507 - DNA, 4193 bp, Homo sapiens
taatggttaagaaacatacttgtttgaaatttcatatttataaaaatatacaaactaagaatacaattaaatgatcttgatttttttttttcagaacatccatgatagcagtcttctgtaaatcgaacttttcaagaattctctgaaggaaccaagtaggatattcttacatcatgacttaatgtgaatgcaagaacaagaaataggttttatctctaaatataatgaagggctgtgtgtaaacactgaccctgtctcaattctaacaagcattttagacatgagtttacatcggcaaatgggttcagatcgagatcttcagtcctctgcttcatctgtgagcttgccttcagtcaaaaaggcacccaaaaaaagaagaatttcaataggctccctgtttcggaggaaaaaagataacaaacgtaaatcaagggagctaaatggcggggtggatggaattgcaagtattgaaagtatacattctgaaatgtgtactgataagaactccattttctctacaaatacctcttctgacaatggattaacttccatcagcaaacaaattggagacttcatagagtgccctttgtgccttttgcggcattctaaagacagatttcctgatataatgacttgtcatcacagatcttgtgtggattgcttacgacaatatttaaggatagaaatctctgaaagcagagttaatattagttgcccagaatgtactgaacggtttaatccccatgatattcgcttgatattaagtgatgatgtcttgatggaaaaatacgaagaatttatgcttagacggtggcttgttgcagatcctgattgtaggtggtgtccagctccagactgtggatatgctgtgatagcatttggatgtgccagctgtccaaaattaacttgtgggcgagagggctgtggaacagagttttgctaccactgtaaacagatttggcaccccaaccagacctgtgatgctgctcgacaagagagagcccagagcttacgtttgagaactatacgttcttcatccattagttatagtcaagagtctggagcagcagctgatgatataaagccatgtccacgatgtgctgcttatataataaagatgaatgatgggagctgcaatcacatgacatgtgctgtttgtggttgtgagttttgttggttgtgtatgaaagaaatctcagatttgcattatctaagtccatcaggatgtactttttgggggaagaaaccctggagccgaaagaagaaaatattgtggcaactgggaacactggttggtgctcctgtcggaatcgctttaatagctggcattgctattcctgcaatgattattggcattcctgtgtatgtgggccgcaagattcacaatcgctatgaaggcaaggatgtttcaaagcacaaacggaatttggccatagcaggtggtgtaacgttgtctgtaatcgtgtctccagtagtagctgcagtgactgtaggtatcggtgttcctattatgttagcttatgtctatggcgtagttccaatttctctttgtcgaagcggaggttgtggagtctcagcaggcaatggaaaaggagttaggattgaatttgatgatgaaaatgatataaatgttggtggaactaacacagctgtagacacaacatcagtagcagaagcaagacacaacccaagcataggggagggaagtgttggtgggctgactggcagtttgagtgcaagtggaagccacatggatcgaataggagccatccgagacaacctgagtgaaacggccagcaccatggcactagctggagccagtataacggggagtctgtcaggaagtgccatggtaaactgttttaacaggttggaagtacaagcagatgtacagaaagaacggtacagtctaagtggagaatctggcacagtcagcttgggaacagttagtgataatgccagcaccaaagcaatggcaggatccattctgaattcctacatcccattggacaaagaaggcaacagtatggaggtgcaagtagatattgagtcaaagccatccaaattcaggcacaacagtggaagcagtagtgtggatgatggcagtgccacccgaagtcatgctggcggttcatccagtggcttgcctgaaggtaaatctagtgccaccaagtggtccaaagaagcaacagcagggaaaaaatcaaaaagtggtaaactgaggaaaaagggtaacatgaagataaatgagacgagagaggacatggatgcacagttgttagaacaacaaagcacgaactcaagtgaatttgaggctccatccctcagtgacagtatgccttctgtagcagattctcactctagtcatttttctgaatttagttgttctgacctagaaagcatgaaaacttcttgtagtcatggttccagtgattatcacacccgctttgctactgttaacattcttcctgaggtagaaaatgaccgtctggaaaattccccacatcagtgtagcatttctgtggttacccaaactgcttcctgttcagaagtttcacagttgaatcatattgctgaagaacatggtaacaatggaataaaacctaatgttgatttatattttggcgatgcactaaaagaaacaaataacaaccactcacatcagacaatggaattaaaagttgcaattcagactgaaatttaggcccataaatgctgcagaataattaccactgtacaaccgtgtttggagctggttgaactacatgtgactacttaagtttcaggttaccagcaaaagccgggtttcattatcataatgcagatacattttctgtgttcagcaaggcattgtgtgtcatgtggatcttagttaccaaactatgaagtgaaggctttaaaagtgcattattttaaggataataaatttgaagagcaaagcatgttttgtgtgtttgccacaaaacattgcttgaagcacatacttagatagaaattggtcttaatttatataatcaatataaaatactaatgcaattctacagcattcaaatgaagaaaacttgaggctttagggataagtggttagtgatattttattgaaaccactaaagagataagtttaaaagaactgcataggttactctcagtatatgatactctgtaacatttctatttatatcggcataaatttcattttttttcttcatatgcaatgtggttatataaagcttaatgcagctcatttgctaccatttggatacttagacactttgagcaagattgtggcagtttttgcacaactttgaaatagaaatacctggtactctatcttgtttattgttgatgccatcttagaggaaaaaatgtaaaggtaagtaattaagcatatgacagcaacaaataagatacataaaactacaaaataaagtcccattaggttataagtattacaaaaaatccacctttctctaaggggaagtttgtaccccattgattcttggtgcctttgggatcgactgggttttaatggcctagttatttgaggattttgctgtgttgttttccatgtcttctctggtcaccttggattatatataaaaatacaggaaatagataaacatgaatgtgattaataatgctgaaaaagtattagcctaccaaagacacactcaggctttagtgaataactttacataacctcagtttttaacacatgcatatcttctccaaccatgaaatcaaagcacggtgcagaacttgtaccaagtacaaaaggtccatgtatgattagcattattttcttttgcttttgtttatggacaatgttcagctgacataagcagaagttggccaaaatactgcctgtactgttaatttcctgtataattcacttaaataaaagcaggttaacctcaatgatagcagttaaaatgttctatcttatgtatttcttttaagtattaccattatggtgctactgagcgttttcttttggtaaaaagaaaaatgccatgggctgcagtcttcttccatcacttttccctaccaggtccattaatatgcttataacactagtgccagttattttatttgataatgcttatggtatttgtatatttgtttgcattccaattttgtttaataatgagtgtgtaaactgcatacgttaaataaatgtaaatactaatgta

SEQ ID NO: 361508 - DNA, 4314 bp, Homo sapiens
ggacaagtagacccattacagagaagacgacgcgcagaaaaggaggaagcagtgtgctcatggaggcggagattggagtgatgtaaccgcaagccgaggaatgcttatagtcaccagaagctggaagagtcaaaggacacattctcccctcaagccccagtgggagcacggcccagctggattttggacttctggcctccagaactttttttcagaacatccatgatagcagtcttctgtaaatcgaacttttcaagaattctctgaaggaaccaagtaggatattcttacatcatgacttaatgtgaatgcaagaacaagaaataggttttatctctaaatataatgaagggctgtgtgtaaacactgaccctgtctcaattctaacaagcattttagacatgagtttacatcggcaaatgggttcagatcgagatcttcagtcctctgcttcatctgtgagcttgccttcagtcaaaaaggcacccaaaaaaagaagaatttcaataggctccctgtttcggaggaaaaaagataacaaacgtaaatcaagggagctaaatggcggggtggatggaattgcaagtattgaaagtatacattctgaaatgtgtactgataagaactccattttctctacaaatacctcttctgacaatggattaacttccatcagcaaacaaattggagacttcatagagtgccctttgtgccttttgcggcattctaaagacagatttcctgatataatgacttgtcatcacagatcttgtgtggattgcttacgacaatatttaaggatagaaatctctgaaagcagagttaatattagttgcccagaatgtactgaacggtttaatccccatgatattcgcttgatattaagtgatgatgtcttgatggaaaaatacgaagaatttatgcttagacggtggcttgttgcagatcctgattgtaggtggtgtccagctccagactgtggatatgctgtgatagcatttggatgtgccagctgtccaaaattaacttgtgggcgagagggctgtggaacagagttttgctaccactgtaaacagatttggcaccccaaccagacctgtgatgctgctcgacaagagagagcccagagcttacgtttgagaactatacgttcttcatccattagttatagtcaagagtctggagcagcagctgatgatataaagccatgtccacgatgtgctgcttatataataaagatgaatgatgggagctgcaatcacatgacatgtgctgtttgtggttgtgagttttgttggttgtgtatgaaagaaatctcagatttgcattatctaagtccatcaggatgtactttttgggggaagaaaccctggagccgaaagaagaaaatattgtggcaactgggaacactggttggtgctcctgtcggaatcgctttaatagctggcattgctattcctgcaatgattattggcattcctgtgtatgtgggccgcaagattcacaatcgctatgaaggcaaggatgtttcaaagcacaaacggaatttggccatagcaggtggtgtaacgttgtctgtaatcgtgtctccagtagtagctgcagtgactgtaggtatcggtgttcctattatgttagcttatgtctatggcgtagttccaatttctctttgtcgaagcggaggttgtggagtctcagcaggcaatggaaaaggagttaggattgaatttgatgatgaaaatgatataaatgttggtggaactaacacagctgtagacacaacatcagtagcagaagcaagacacaacccaagcataggggagggaagtgttggtgggctgactggcagtttgagtgcaagtggaagccacatggatcgaataggagccatccgagacaacctgagtgaaacggccagcaccatggcactagctggagccagtataacggggagtctgtcaggaagtgccatggtaaactgttttaacaggttggaagtacaagcagatgtacagaaagaacggtacagtctaagtggagaatctggcacagtcagcttgggaacagttagtgataatgccagcaccaaagcaatggcaggatccattctgaattcctacatcccattggacaaagaaggcaacagtatggaggtgcaagtagatattgagtcaaagccatccaaattcaggcacaacagtggaagcagtagtgtggatgatggcagtgccacccgaagtcatgctggcggttcatccagtggcttgcctgaaggtaaatctagtgccaccaagtggtccaaagaagcaacagcagggaaaaaatcaaaaagtggtaaactgaggaaaaagggtaacatgaagataaatgagacgagagaggacatggatgcacagttgttagaacaacaaagcacgaactcaagtgaatttgaggctccatccctcagtgacagtatgccttctgtagcagattctcactctagtcatttttctgaatttagttgttctgacctagaaagcatgaaaacttcttgtagtcatggttccagtgattatcacacccgctttgctactgttaacattcttcctgaggtagaaaatgaccgtctggaaaattccccacatcagtgtagcatttctgtggttacccaaactgcttcctgttcagaagtttcacagttgaatcatattgctgaagaacatggtaacaatggaataaaacctaatgttgatttatattttggcgatgcactaaaagaaacaaataacaaccactcacatcagacaatggaattaaaagttgcaattcagactgaaatttaggcccataaatgctgcagaataattaccactgtacaaccgtgtttggagctggttgaactacatgtgactacttaagtttcaggttaccagcaaaagccgggtttcattatcataatgcagatacattttctgtgttcagcaaggcattgtgtgtcatgtggatcttagttaccaaactatgaagtgaaggctttaaaagtgcattattttaaggataataaatttgaagagcaaagcatgttttgtgtgtttgccacaaaacattgcttgaagcacatacttagatagaaattggtcttaatttatataatcaatataaaatactaatgcaattctacagcattcaaatgaagaaaacttgaggctttagggataagtggttagtgatattttattgaaaccactaaagagataagtttaaaagaactgcataggttactctcagtatatgatactctgtaacatttctatttatatcggcataaatttcattttttttcttcatatgcaatgtggttatataaagcttaatgcagctcatttgctaccatttggatacttagacactttgagcaagattgtggcagtttttgcacaactttgaaatagaaatacctggtactctatcttgtttattgttgatgccatcttagaggaaaaaatgtaaaggtaagtaattaagcatatgacagcaacaaataagatacataaaactacaaaataaagtcccattaggttataagtattacaaaaaatccacctttctctaaggggaagtttgtaccccattgattcttggtgcctttgggatcgactgggttttaatggcctagttatttgaggattttgctgtgttgttttccatgtcttctctggtcaccttggattatatataaaaatacaggaaatagataaacatgaatgtgattaataatgctgaaaaagtattagcctaccaaagacacactcaggctttagtgaataactttacataacctcagtttttaacacatgcatatcttctccaaccatgaaatcaaagcacggtgcagaacttgtaccaagtacaaaaggtccatgtatgattagcattattttcttttgcttttgtttatggacaatgttcagctgacataagcagaagttggccaaaatactgcctgtactgttaatttcctgtataattcacttaaataaaagcaggttaacctcaatgatagcagttaaaatgttctatcttatgtatttcttttaagtattaccattatggtgctactgagcgttttcttttggtaaaaagaaaaatgccatgggctgcagtcttcttccatcacttttccctaccaggtccattaatatgcttataacactagtgccagttattttatttgataatgcttatggtatttgtatatttgtttgcattccaattttgtttaataatgagtgtgtaaactgcatacgttaaataaatgtaaatactaatgta

SEQ ID NO: 361509 - DNA, 4243 bp, Homo sapiens
tcctaattttcccccccctgaaaggaaacggccccaaaactccacccttgaggcccactaggcccttttttttatttttgggggttttcgtgtttttttgcgccgttgattagattctttattttttttgtttttttttttcagaacatccatgatagcagtcttctgtaaatcgaacttttcaagaattctctgaaggaaccaagtaggatattcttacatcatgacttaatgtgaatgcaagaacaagaaataggttttatctctaaatataatgaagggctgtgtgtaaacactgaccctgtctcaattctaacaagcattttagacatgagtttacatcggcaaatgggttcagatcgagatcttcagtcctctgcttcatctgtgagcttgccttcagtcaaaaaggcacccaaaaaaagaagaatttcaataggctccctgtttcggaggaaaaaagataacaaacgtaaatcaagggagctaaatggcggggtggatggaattgcaagtattgaaagtatacattctgaaatgtgtactgataagaactccattttctctacaaatacctcttctgacaatggattaacttccatcagcaaacaaattggagacttcatagagtgccctttgtgccttttgcggcattctaaagacagatttcctgatataatgacttgtcatcacagatcttgtgtggattgcttacgacaatatttaaggatagaaatctctgaaagcagagttaatattagttgcccagaatgtactgaacggtttaatccccatgatattcgcttgatattaagtgatgatgtcttgatggaaaaatacgaagaatttatgcttagacggtggcttgttgcagatcctgattgtaggtggtgtccagctccagactgtggatatgctgtgatagcatttggatgtgccagctgtccaaaattaacttgtgggcgagagggctgtggaacagagttttgctaccactgtaaacagatttggcaccccaaccagacctgtgatgctgctcgacaagagagagcccagagcttacgtttgagaactatacgttcttcatccattagttatagtcaagagtctggagcagcagctgatgatataaagccatgtccacgatgtgctgcttatataataaagatgaatgatgggagctgcaatcacatgacatgtgctgtttgtggttgtgagttttgttggttgtgtatgaaagaaatctcagatttgcattatctaagtccatcaggatgtactttttgggggaagaaaccctggagccgaaagaagaaaatattgtggcaactgggaacactggttggtgctcctgtcggaatcgctttaatagctggcattgctattcctgcaatgattattggcattcctgtgtatgtgggccgcaagattcacaatcgctatgaaggcaaggatgtttcaaagcacaaacggaatttggccatagcaggtggtgtaacgttgtctgtaatcgtgtctccagtagtagctgcagtgactgtaggtatcggtgttcctattatgttagcttatgtctatggcgtagttccaatttctctttgtcgaagcggaggttgtggagtctcagcaggcaatggaaaaggagttaggattgaatttgatgatgaaaatgatataaatgttggtggaactaacacagctgtagacacaacatcagtagcagaagcaagacacaacccaagcataggggagggaagtgttggtgggctgactggcagtttgagtgcaagtggaagccacatggatcgaataggagccatccgagacaacctgagtgaaacggccagcaccatggcactagctggagccagtataacggggagtctgtcaggaagtgccatggtaaactgttttaacaggttggaagtacaagcagatgtacagaaagaacggtacagtctaagtggagaatctggcacagtcagcttgggaacagttagtgataatgccagcaccaaagcaatggcaggatccattctgaattcctacatcccattggacaaagaaggcaacagtatggaggtgcaagtagatattgagtcaaagccatccaaattcaggcacaacagtggaagcagtagtgtggatgatggcagtgccacccgaagtcatgctggcggttcatccagtggcttgcctgaaggtaaatctagtgccaccaagtggtccaaagaagcaacagcagggaaaaaatcaaaaagtggtaaactgaggaaaaagggtaacatgaagataaatgagacgagagaggacatggatgcacagttgttagaacaacaaagcacgaactcaagtgaatttgaggctccatccctcagtgacagtatgccttctgtagcagattctcactctagtcatttttctgaatttagttgttctgacctagaaagcatgaaaacttcttgtagtcatggttccagtgattatcacacccgctttgctactgttaacattcttcctgaggtagaaaatgaccgtctggaaaattccccacatcagtgtagcatttctgtggttacccaaactgcttcctgttcagaagtttcacagttgaatcatattgctgaagaacatggtaacaatggaataaaacctaatgttgatttatattttggcgatgcactaaaagaaacaaataacaaccactcacatcagacaatggaattaaaagttgcaattcagactgaaatttaggcccataaatgctgcagaataattaccactgtacaaccgtgtttggagctggttgaactacatgtgactacttaagtttcaggttaccagcaaaagccgggtttcattatcataatgcagatacattttctgtgttcagcaaggcattgtgtgtcatgtggatcttagttaccaaactatgaagtgaaggctttaaaagtgcattattttaaggataataaatttgaagagcaaagcatgttttgtgtgtttgccacaaaacattgcttgaagcacatacttagatagaaattggtcttaatttatataatcaatataaaatactaatgcaattctacagcattcaaatgaagaaaacttgaggctttagggataagtggttagtgatattttattgaaaccactaaagagataagtttaaaagaactgcataggttactctcagtatatgatactctgtaacatttctatttatatcggcataaatttcattttttttcttcatatgcaatgtggttatataaagcttaatgcagctcatttgctaccatttggatacttagacactttgagcaagattgtggcagtttttgcacaactttgaaatagaaatacctggtactctatcttgtttattgttgatgccatcttagaggaaaaaatgtaaaggtaagtaattaagcatatgacagcaacaaataagatacataaaactacaaaataaagtcccattaggttataagtattacaaaaaatccacctttctctaaggggaagtttgtaccccattgattcttggtgcctttgggatcgactgggttttaatggcctagttatttgaggattttgctgtgttgttttccatgtcttctctggtcaccttggattatatataaaaatacaggaaatagataaacatgaatgtgattaataatgctgaaaaagtattagcctaccaaagacacactcaggctttagtgaataactttacataacctcagtttttaacacatgcatatcttctccaaccatgaaatcaaagcacggtgcagaacttgtaccaagtacaaaaggtccatgtatgattagcattattttcttttgcttttgtttatggacaatgttcagctgacataagcagaagttggccaaaatactgcctgtactgttaatttcctgtataattcacttaaataaaagcaggttaacctcaatgatagcagttaaaatgttctatcttatgtatttcttttaagtattaccattatggtgctactgagcgttttcttttggtaaaaagaaaaatgccatgggctgcagtcttcttccatcacttttccctaccaggtccattaatatgcttataacactagtgccagttattttatttgataatgcttatggtatttgtatatttgtttgcattccaattttgtttaataatgagtgtgtaaactgcatacgttaaataaatgtaaatactaatgta

SEQ ID NO: 361510 - DNA, 4224 bp, Homo sapiens
  misc_feature (221)..(221): n is a, c, g, or t
ggacaagtagacccattacagagaagacgacgcgcagaaaaggaggaagcagtgtgctcatggaggcggagattggagtgatgtaaccgcaagccgaggaatgcttatagtcaccagaagctggaagagtcaaaggacacattctcccctcaagccccagtgggagcacggcccagctggattttggacttctggcctccagaactagacagggcctcacngtgtcacccagggtggaatacagtggtgtgatcatagctcactgcagcctggaattcctgggctcaagcaaccctgccacctcagccttccaagtagctaggactacagttttttcagaacatccatgatagcagtcttctgtaaatcgaacttttcaagaattctctgaaggaaccaagtaggatattcttacatcatgacttaatgtgaatgcaagaacaagaaataggttttatctctaaatataatgaagggctgtgtgtaaacactgaccctgtctcaattctaacaagcattttagacatgagtttacatcggcaaatgggttcagatcgagatcttcagtcctctgcttcatctgtgagcttgccttcagtcaaaaaggcacccaaaaaaagaagaatttcaataggctccctgtttcggaggaaaaaagataacaaacgtaaatcaagggagctaaatggcggggtggatggaattgcaagtattgaaagtatacattctgaaatgtgtactgataagaactccattttctctacaaatacctcttctgacaatggattaacttccatcagcaaacaaattggagacttcatagagtgccctttgtgccttttgcggcattctaaagacagatttcctgatataatgacttgtcatcacagatcttgtgtggattgcttacgacaatatttaaggatagaaatctctgaaagcagagttaatattagttgcccagaatgtactgaacggtttaatccccatgatattcgcttgatattaagtgatgatgtcttgatggaaaaatacgaagaatttatgcttagacggtggcttgttgcagatcctgattgtaggtggtgtccagctccagactgtggatatgctgtgatagcatttggatgtgccagctgtccaaaattaacttgtgggcgagagggctgtggaacagagttttgctaccactgtaaacagatttggcaccccaaccagacctgtgatgctgctcgacaagagagagcccagagcttacgtttgagaactatacgttcttcatccattagttatagtcaagagtctggagcagcagctgatgatataaagccatgtccacgatgtgctgcttatataataaagatgaatgatgggagctgcaatcacatgacatgtgctgtttgtggttgtgagttttgttggttgtgtatgaaagaaatctcagatttgcattatctaagtccatcaggatgtactttttgggggaagaaaccctggagccgaaagaagaaaatattgtggcaactgggaacactggttggtgctcctgtcggaatcgctttaatagctggcattgctattcctgcaatgattattggcattcctgtgtatgtgggccgcaagattcacaatcgctatgaaggcaaggatgtttcaaagcacaaacggaatttggccatagcaggtggtgtaacgttgtctgtaatcgtgtctccagtagtagctgcagtgactgtaggtatcggtgttcctattatgttagcttatgtctatggcgtagttccaatttctctttgtcgaagcggaggttgtggagtctcagcaggcaatggaaaaggagttaggattgaatttgatgatgaaaatgatataaatgttggtggaactaacacagctgtaggttggaagtacaagcagatgtacagaaagaacggtacagtctaagtggagaatctggcacagtcagcttgggaacagttagtgataatgccagcaccaaagcaatggcaggatccattctgaattcctacatcccattggacaaagaaggcaacagtatggaggtgcaagtagatattgagtcaaagccatccaaattcaggcacaacagtggaagcagtagtgtggatgatggcagtgccacccgaagtcatgctggcggttcatccagtggcttgcctgaaggtaaatctagtgccaccaagtggtccaaagaagcaacagcagggaaaaaatcaaaaagtggtaaactgaggaaaaagggtaacatgaagataaatgagacgagagaggacatggatgcacagttgttagaacaacaaagcacgaactcaagtgaatttgaggctccatccctcagtgacagtatgccttctgtagcagattctcactctagtcatttttctgaatttagttgttctgacctagaaagcatgaaaacttcttgtagtcatggttccagtgattatcacacccgctttgctactgttaacattcttcctgaggtagaaaatgaccgtctggaaaattccccacatcagtgtagcatttctgtggttacccaaactgcttcctgttcagaagtttcacagttgaatcatattgctgaagaacatggtaacaatggaataaaacctaatgttgatttatattttggcgatgcactaaaagaaacaaataacaaccactcacatcagacaatggaattaaaagttgcaattcagactgaaatttaggcccataaatgctgcagaataattaccactgtacaaccgtgtttggagctggttgaactacatgtgactacttaagtttcaggttaccagcaaaagccgggtttcattatcataatgcagatacattttctgtgttcagcaaggcattgtgtgtcatgtggatcttagttaccaaactatgaagtgaaggctttaaaagtgcattattttaaggataataaatttgaagagcaaagcatgttttgtgtgtttgccacaaaacattgcttgaagcacatacttagatagaaattggtcttaatttatataatcaatataaaatactaatgcaattctacagcattcaaatgaagaaaacttgaggctttagggataagtggttagtgatattttattgaaaccactaaagagataagtttaaaagaactgcataggttactctcagtatatgatactctgtaacatttctatttatatcggcataaatttcattttttttcttcatatgcaatgtggttatataaagcttaatgcagctcatttgctaccatttggatacttagacactttgagcaagattgtggcagtttttgcacaactttgaaatagaaatacctggtactctatcttgtttattgttgatgccatcttagaggaaaaaatgtaaaggtaagtaattaagcatatgacagcaacaaataagatacataaaactacaaaataaagtcccattaggttataagtattacaaaaaatccacctttctctaaggggaagtttgtaccccattgattcttggtgcctttgggatcgactgggttttaatggcctagttatttgaggattttgctgtgttgttttccatgtcttctctggtcaccttggattatatataaaaatacaggaaatagataaacatgaatgtgattaataatgctgaaaaagtattagcctaccaaagacacactcaggctttagtgaataactttacataacctcagtttttaacacatgcatatcttctccaaccatgaaatcaaagcacggtgcagaacttgtaccaagtacaaaaggtccatgtatgattagcattattttcttttgcttttgtttatggacaatgttcagctgacataagcagaagttggccaaaatactgcctgtactgttaatttcctgtataattcacttaaataaaagcaggttaacctcaatgatagcagttaaaatgttctatcttatgtatttcttttaagtattaccattatggtgctactgagcgttttcttttggtaaaaagaaaaatgccatgggctgcagtcttcttccatcacttttccctaccaggtccattaatatgcttataacactagtgccagttattttatttgataatgcttatggtatttgtatatttgtttgcattccaattttgtttaataatgagtgtgtaaactgcatacgttaaataaatgtaaatactaatgta

SEQ ID NO: 361511 - DNA, 4480 bp, Homo sapiens
  misc_feature (221)..(221): n is a, c, g, or t
ggacaagtagacccattacagagaagacgacgcgcagaaaaggaggaagcagtgtgctcatggaggcggagattggagtgatgtaaccgcaagccgaggaatgcttatagtcaccagaagctggaagagtcaaaggacacattctcccctcaagccccagtgggagcacggcccagctggattttggacttctggcctccagaactagacagggcctcacngtgtcacccagggtggaatacagtggtgtgatcatagctcactgcagcctggaattcctgggctcaagcaaccctgccacctcagccttccaagtagctaggactacagttttttcagaacatccatgatagcagtcttctgtaaatcgaacttttcaagaattctctgaaggaaccaagtaggatattcttacatcatgacttaatgtgaatgcaagaacaagaaataggttttatctctaaatataatgaagggctgtgtgtaaacactgaccctgtctcaattctaacaagcattttagacatgagtttacatcggcaaatgggttcagatcgagatcttcagtcctctgcttcatctgtgagcttgccttcagtcaaaaaggcacccaaaaaaagaagaatttcaataggctccctgtttcggaggaaaaaagataacaaacgtaaatcaagggagctaaatggcggggtggatggaattgcaagtattgaaagtatacattctgaaatgtgtactgataagaactccattttctctacaaatacctcttctgacaatggattaacttccatcagcaaacaaattggagacttcatagagtgccctttgtgccttttgcggcattctaaagacagatttcctgatataatgacttgtcatcacagatcttgtgtggattgcttacgacaatatttaaggatagaaatctctgaaagcagagttaatattagttgcccagaatgtactgaacggtttaatccccatgatattcgcttgatattaagtgatgatgtcttgatggaaaaatacgaagaatttatgcttagacggtggcttgttgcagatcctgattgtaggtggtgtccagctccagactgtggatatgctgtgatagcatttggatgtgccagctgtccaaaattaacttgtgggcgagagggctgtggaacagagttttgctaccactgtaaacagatttggcaccccaaccagacctgtgatgctgctcgacaagagagagcccagagcttacgtttgagaactatacgttcttcatccattagttatagtcaagagtctggagcagcagctgatgatataaagccatgtccacgatgtgctgcttatataataaagatgaatgatgggagctgcaatcacatgacatgtgctgtttgtggttgtgagttttgttggttgtgtatgaaagaaatctcagatttgcattatctaagtccatcaggatgtactttttgggggaagaaaccctggagccgaaagaagaaaatattgtggcaactgggaacactggttggtgctcctgtcggaatcgctttaatagctggcattgctattcctgcaatgattattggcattcctgtgtatgtgggccgcaagattcacaatcgctatgaaggcaaggatgtttcaaagcacaaacggaatttggccatagcaggtggtgtaacgttgtctgtaatcgtgtctccagtagtagctgcagtgactgtaggtatcggtgttcctattatgttagcttatgtctatggcgtagttccaatttctctttgtcgaagcggaggttgtggagtctcagcaggcaatggaaaaggagttaggattgaatttgatgatgaaaatgatataaatgttggtggaactaacacagctgtagacacaacatcagtagcagaagcaagacacaacccaagcataggggagggaagtgttggtgggctgactggcagtttgagtgcaagtggaagccacatggatcgaataggagccatccgagacaacctgagtgaaacggccagcaccatggcactagctggagccagtataacggggagtctgtcaggaagtgccatggtaaactgttttaacaggttggaagtacaagcagatgtacagaaagaacggtacagtctaagtggagaatctggcacagtcagcttgggaacagttagtgataatgccagcaccaaagcaatggcaggatccattctgaattcctacatcccattggacaaagaaggcaacagtatggaggtgcaagtagatattgagtcaaagccatccaaattcaggcacaacagtggaagcagtagtgtggatgatggcagtgccacccgaagtcatgctggcggttcatccagtggcttgcctgaaggtaaatctagtgccaccaagtggtccaaagaagcaacagcagggaaaaaatcaaaaagtggtaaactgaggaaaaagggtaacatgaagataaatgagacgagagaggacatggatgcacagttgttagaacaacaaagcacgaactcaagtgaatttgaggctccatccctcagtgacagtatgccttctgtagcagattctcactctagtcatttttctgaatttagttgttctgacctagaaagcatgaaaacttcttgtagtcatggttccagtgattatcacacccgctttgctactgttaacattcttcctgaggtagaaaatgaccgtctggaaaattccccacatcagtgtagcatttctgtggttacccaaactgcttcctgttcagaagtttcacagttgaatcatattgctgaagaacatggtaacaatggaataaaacctaatgttgatttatattttggcgatgcactaaaagaaacaaataacaaccactcacatcagacaatggaattaaaagttgcaattcagactgaaatttaggcccataaatgctgcagaataattaccactgtacaaccgtgtttggagctggttgaactacatgtgactacttaagtttcaggttaccagcaaaagccgggtttcattatcataatgcagatacattttctgtgttcagcaaggcattgtgtgtcatgtggatcttagttaccaaactatgaagtgaaggctttaaaagtgcattattttaaggataataaatttgaagagcaaagcatgttttgtgtgtttgccacaaaacattgcttgaagcacatacttagatagaaattggtcttaatttatataatcaatataaaatactaatgcaattctacagcattcaaatgaagaaaacttgaggctttagggataagtggttagtgatattttattgaaaccactaaagagataagtttaaaagaactgcataggttactctcagtatatgatactctgtaacatttctatttatatcggcataaatttcattttttttcttcatatgcaatgtggttatataaagcttaatgcagctcatttgctaccatttggatacttagacactttgagcaagattgtggcagtttttgcacaactttgaaatagaaatacctggtactctatcttgtttattgttgatgccatcttagaggaaaaaatgtaaaggtaagtaattaagcatatgacagcaacaaataagatacataaaactacaaaataaagtcccattaggttataagtattacaaaaaatccacctttctctaaggggaagtttgtaccccattgattcttggtgcctttgggatcgactgggttttaatggcctagttatttgaggattttgctgtgttgttttccatgtcttctctggtcaccttggattatatataaaaatacaggaaatagataaacatgaatgtgattaataatgctgaaaaagtattagcctaccaaagacacactcaggctttagtgaataactttacataacctcagtttttaacacatgcatatcttctccaaccatgaaatcaaagcacggtgcagaacttgtaccaagtacaaaaggtccatgtatgattagcattattttcttttgcttttgtttatggacaatgttcagctgacataagcagaagttggccaaaatactgcctgtactgttaatttcctgtataattcacttaaataaaagcaggttaacctcaatgatagcagttaaaatgttctatcttatgtatttcttttaagtattaccattatggtgctactgagcgttttcttttggtaaaaagaaaaatgccatgggctgcagtcttcttccatcacttttccctaccaggtccattaatatgcttataacactagtgccagttattttatttgataatgcttatggtatttgtatatttgtttaagtgaattatacaggaaattaacagtacaggcagtattttggccaacttctgcttatgtcagctgaacattgtccataaacaaaagcaaaagaaaataatgcgtcgacg

SEQ ID NO: 361512 - DNA, 2552 bp, Homo sapiens
  misc_feature (221)..(221): n is a, c, g, or t
ggacaagtagacccattacagagaagacgacgcgcagaaaaggaggaagcagtgtgctcatggaggcggagattggagtgatgtaaccgcaagccgaggaatgcttatagtcaccagaagctggaagagtcaaaggacacattctcccctcaagccccagtgggagcacggcccagctggattttggacttctggcctccagaactagacagggcctcacngtgtcacccagggtggaatacagtggtgtgatcatagctcactgcagcctggaattcctgggctcaagcaaccctgccacctcagccttccaagtagctaggactacagttttttcagaacatccatgatagcagtcttctgtaaatcgaacttttcaagaattctctgaaggaaccaagtaggatattcttacatcatgacttaatgtgaatgcaagaacaagaaataggttttatctctaaatataatgaagggctgtgtgtaaacactgaccctgtctcaattctaacaagcattttagacatgagtttacatcggcaaatgggttcagatcgagatcttcagtcctctgcttcatctgtgagcttgccttcagtcaaaaaggcacccaaaaaaagaagaatttcaataggctccctgtttcggaggaaaaaagataacaaacgtaaatcaagggagctaaatggcggggtggatggaattgcaagtattgaaagtatacattctgaaatgtgtactgataagaactccattttctctacaaatacctcttctgacaatggattaacttccatcagcaaacaaattggagacttcatagagtgccctttgtgccttttgcggcattctaaagacagatttcctgatataatgacttgtcatcacagatcttgtgtggattgcttacgacaatatttaaggatagaaatctctgaaagcagagttaatattagttgcccagaatgtactgaacggtttaatccccatgatattcgcttgatattaagtgatgatgtcttgatggaaaaatacgaagaatttatgcttagacggtggcttgttgcagatcctgattgtaggtggtgtccagctccagactgtggatatgctgtgatagcatttggatgtgccagctgtccaaaattaacttgtgggcgagagggctgtggaacagagttttgctaccactgtaaacagatttggcaccccaaccagacctgtgatgctgctcgacaagagagagcccagagcttacgtttgagaactatacgttcttcatccattagttatagtcaagagtctggagcagcagctgatgatataaagccatgtccacgatgtgctgcttatataataaagatgaatgatgggagctgcaatcacatgacatgtgctgtttgtggttgtgagttttgttggttgtgtatgaaagaaatctcagatttgcattatctaagtccatcaggatgtactttttgggggaagaaaccctggagccgaaagaagaaaatattgtggcaactgggaacactggttggtgctcctgtcggaatcgctttaatagctggcattgctattcctgcaatgattattggcattcctgtgtatgtgggccgcaagattcacaatcgctatgaaggcaaggatgtttcaaagcacaaacggaatttggccatagcaggtggtgtaacgttgtctgtaatcgtgtctccagtagtagctgcagtgactgtaggtatcggtgttcctattatgttagcttatgtctatggcgtagttccaatttctctttgtcgaagcggaggttgtggagtctcagcaggcaatggaaaaggagttaggattgaatttgatgatgaaaatgatataaatgttggtggaactaacacagctgtagacacaacatcagtagcagaagcaagacacaacccaagcataggggagggaagtgttggtgggctgactggcagtttgagtgcaagtggaagccacatggatcgaataggagccatccgagacaacctgagtgaaacggccagcaccatggcactagctggagccagtataacggggagtctgtcaggaagtgccatggtaaactgttttaacagtggaagtacaagcagatgtacagaaagaggctgctgtcgccgctgctgggagatgggcctactcgcccgccaccctgcgctgccgccgctctgaggagttaaagaacatccatgatagcagtcttctgtaaatcgaacttttcaagaattctctgaaggaaccaagtaggatattcttacatcatgacttaatgtgaatgcaagaacaagaaataggttttatctctaaatataatgaagggctgtgtgtaaacactgaccctgtctcaattctaacaagcattttagacatgagtttacaccggcaaatgggttcagatcgagatcttcagtcctctgcttcatctgtgagcttgccttcagtcaaaaaggcagccaaaaaaagaagaatttcaataggttccccagaggccccgttcccggtactaccttaatatt

SEQ ID NO: 361513 - DNA, 2334 bp, Homo sapiens
  misc_feature (221)..(221): n is a, c, g, or t
ggacaagtagacccattacagagaagacgacgcgcagaaaaggaggaagcagtgtgctcatggaggcggagattggagtgatgtaaccgcaagccgaggaatgcttatagtcaccagaagctggaagagtcaaaggacacattctcccctcaagccccagtgggagcacggcccagctggattttggacttctggcctccagaactagacagggcctcacngtgtcacccagggtggaatacagtggtgtgatcatagctcactgcagcctggaattcctgggctcaagcaaccctgccacctcagccttccaagtagctaggactacagttttttcagaacatccatgatagcagtcttctgtaaatcgaacttttcaagaattctctgaaggaaccaagtaggatattcttacatcatgacttaatgtgaatgcaagaacaagaaataggttttatctctaaatataatgaagggctgtgtgtaaacactgaccctgtctcaattctaacaagcattttagacatgagtttacatcggcaaatgggttcagatcgagatcttcagtcctctgcttcatctgtgagcttgccttcagtcaaaaaggcacccaaaaaaagaagaatttcaataggctccctgtttcggaggaaaaaagataacaaacgtaaatcaagggagctaaatggcggggtggatggaattgcaagtattgaaagtatacattctgaaatgtgtactgataagaactccattttctctacaaatacctcttctgacaatggattaacttccatcagcaaacaaattggagacttcatagagtgccctttgtgccttttgcggcattctaaagacagatttcctgatataatgacttgtcatcacagatcttgtgtggattgcttacgacaatatttaaggatagaaatctctgaaagcagagttaatattagttgcccagaatgtactgaacggtttaatccccatgatattcgcttgatattaagtgatgatgtcttgatggaaaaatacgaagaatttatgcttagacggtggcttgttgcagatcctgattgtaggtggtgtccagctccagactgtggatatgctgtgatagcatttggatgtgccagctgtccaaaattaacttgtgggcgagagggctgtggaacagagttttgctaccactgtaaacagatttggcaccccaaccagacctgtgatgctgctcgacaagagagagcccagagcttacgtttgagaactatacgttcttcatccattagttatagtcaagagtctggagcagcagctgatgatataaagccatgtccacgatgtgctgcttatataataaagatgaatgatgggagctgcaatcacatgacatgtgctgtttgtggttgtgagttttgttggttgtgtatgaaagaaatctcagatttgcattatctaagtccatcaggatgtactttttgggggaagaaaccctggagccgaaagaagaaaatattgtggcaactgggaacactggttggtgctcctgtcggaatcgctttaatagctggcattgctattcctgcaatgattattggcattcctgtgtatgtgggccgcaagattcacaatcgctatgaaggcaaggatgtttcaaagcacaaacggaatttggccatagcaggtggtgtaacgttgtctgtaatcgtgtctccagtagtagctgcagtgactgtaggtatcggtgttcctattatgttagcttatgtctatggcgtagttccaatttctctttgtcgaagcggaggttgtggagtctcagcaggcaatggaaaaggagttaggattgaatttgatgatgaaaatgatataaatgttggtggaactaacacagctgtagacacaacatcagtagcagaagcaagacacaacccaagcataggggagggaagtgttggtgggctgactggcagtttgagtgcaagtggaagccacatggatcgaataggagccatccgagacaacctgagtgaaacggccagcaccatggcactagctggagccagtataacggggagtctgtcaggaagtgccatggtaaactgttttaacaggttggaagtacaagcagatgtacagaaagaacggtacagtctaagtggagaatctggcacagtcagcttgggaacagttagtgataatgccagcaccaaagcaagagcagctgagatcgatgacaagctcaacaaaattaacgatcgttggcaacatctttttgatgtcatcggatcaagggtgaagaagctgaaggagacctttgcttttattcagcag

SEQ ID NO: 361514 - DNA, 1448 bp, Homo sapiens
  misc_feature (221)..(221): n is a, c, g, or t
ggacaagtagacccattacagagaagacgacgcgcagaaaaggaggaagcagtgtgctcatggaggcggagattggagtgatgtaaccgcaagccgaggaatgcttatagtcaccagaagctggaagagtcaaaggacacattctcccctcaagccccagtgggagcacggcccagctggattttggacttctggcctccagaactagacagggcctcacngtgtcacccagggtggaatacagtggtgtgatcatagctcactgcagcctggaattcctgggctcaagcaaccctgccacctcagccttccaagtagctaggactacagttttttcagaacatccatgatagcagtcttctgtaaatcgaacttttcaagaattctctgaaggaaccaagtaggatattcttacatcatgacttaatgtgaatgcaagaacaagaaataggttttatctctaaatataatgaagggctgtgtgtaaacactgaccctgtctcaattctaacaagcattttagacatgagtttacatcggcaaatgggttcagatcgagatcttcagtcctctgcttcatctgtgagcttgccttcagtcaaaaaggcacccaaaaaaagaagaatttcaataggctccctgtttcggaggaaaaaagataacaaacgtaaatcaagggagctaaatggcggggtggatggaattgcaagtattgaaagtatacattctgaaatgtgtactgataagaactccattttctctacaaatacctcttctgacaatggattaacttccatcagcaaacaaattggagacttcatagagtgccctttgtgccttttgcggcattctaaagacagatttcctgatataatgacttgtcatcacagatcttgtgtggattgcttacgacaatatttaaggatagaaatctctgaaagcagagttaatattagttgcccagaatgtactgaacggtttaatccccatgatattcgcttgatattaagtgatgatgtcttgatggaaaaatacgaagaatttatgcttagacggtggcttgttgcagatcctgattgtaggtggtgtccagctccagactgtgggtaagaagataatgtttgatttttcttgagttaatttttttctctgtggataaaataatttgctattactcaaaagaaaaatttttacatgctggagaattcattcaacagacatgttgagtgcacaccatatgtcaggcactatgctaggtgttaaaggcagtgatcctatcttactcatttctatatcgtctctgcgttacatactcactgagcacttttagaaggaaagggtaaggtggtagagtacaggatctagttgtatacaaaattggttttctcatccatttggagaatttttattttggaataacagatgaaatgatcaggtttgtttatgat

SEQ ID NO: 361515 - DNA, 602 bp, Homo sapiens
tgggtagaagcctaactttgatgggcaccaattagcaaatgccaatggcccaatcacagagaaaaatatttgcaaactcaggaacaacttaatgtgcttgacatatcccactgataagcctgccccttaactataaatccttcagtacttttctaactcgccgttgtgcttaaaccctcctcatggtatgacttacctccttcttcttatcaatttctcagttaccatgaggcaattattgtagcaacaacacacaaatgtatacacaagtgtcctaaggataaatattctcagacacagtaaagttgaaatgagaggcttcaaatctatgacctactgcccagatatgcatacaaaacacacataattggaggaggtgaagcaagatggtggaacagaaggctccacccattgttccccacccaaggacaccaagttaacaactatctacagagaaaaaacacctttgtatgcttttaggctgggcgcggtggctcatgcctgtagtcctggcattttgggaggctgaggcagaaggattacttgaggccaggagttcaagaccagcctaggcaacatggtgggacccacgtctctaccag

SEQ ID NO: 361516 - DNA, 343 bp, Homo sapiens
agaagtgacagcactgaagtgagattctgcagaatgttaatgaagttacagaagaaatagctgactgtgggaatgtgcagtgaagaaatttactgaaagtcaacttactgatataaatgaggaaagtcattgtgaggaaaaggatgaagatgtcccagaggaagtggtgcctcacaaacactttgtattagagaaacttgcagagagattttaccacattgaaggagcaaaggattcaatgttggaagttgatccatacttagcagggagtacaacagtttgctaaggcaaagaaaagatgttcacattgtgtcagaaattatatgacaagaagaaggcaagc

SEQ ID NO: 361517 - DNA, 2149 bp, Homo sapiens
ctagggtagcacagcctgtcattgggagtttccagacagaagtgttcccattccttactcctaaaggtggacttgaggagggtctttgaaagtcagctagaccaatctctagttgaacctcaaggagagtgaggtacagagcagagactgctggcttccaggtctagctggctcccacttggcctggccagagaattggtctgatggtgcccacaccttcaccggaggccctttggtgaccccatgcatgtttcctttgcaggacaagattagatgcaccccggttggaaacaaagtccctgagcagctccgtgttaccacccagctatgcttcagatcgcctgtcaggaaacaacagggaccctgctctgaaacccaagcggtcccaccgcaaggcagaccctgatgctgcccacaggccacggatcctggagatggacaaggaagagaaccggcgctcggtgctgctgcccacacaccggcggaggggtagcttcagctctgagaactactggcgcaagtcatacgagtcctcagaggactgctctgaggcagcaggcagccctgcccgaaaggtgaagatgcggcggcactgagtctacccgccgccctcctgggaactctggctcatccttacgtagttgcccctccttttgttttgagggttttgtttttgttcattggggggtttttgttttttgttttttgttttttttgattctatatatttttccttggttttgttgcctgttaaggctgaagaatagaattggccaggacctaggttctcatattcttggtattcctcctggatggaaaggctgttggcatcaataggggacagaggctgatgctggagtggccagtagaggtggtggagcagagcagccatcttttaagtggggctgtatcaggctgggtttatttaaaagcaacaaaatgttttggttaagaaaattattttgctttcagtgtaaatcttcgcagtgttctaaacaaagttcagtcttctgctcgcccctttccctcactgatgtctgcacttggttgaggtctcctggagcctcacaggctctgctgttctccacttctcacctgccatccacgccctgcaagctcatgcaaacaccctttcttcctcctgcggcagagttgttcaggttgcctgggcaggggcttaaacagtgccagcccctgccatcccaaagctattgttaagccccccaggcgtcctccacccacgcccactagcctgccatgtccacagttccttgggctgctgaggggctagtgcagtggtcctgacctctcttatcaagagcacacttctttgctggttgctccttttgagcatatgcgtgtgattatttggaacagttagacttgccacgttgggtcagttttagaaattgtttctagctagagggactggtgtccttccaagtctagcatttggggtatggaaaattgttgtggtgtgtggtagggtttttgttttcttttttgagttttttttccccctttagtctcctggctttttcctttcccttcccttctccactggccagcttgggcctcatcctcatgtcatccttctaggaaggcgcctgccccatcttgtctgccggcagcatgcatccaaggccagagctcaggcctgcagactgggctggtgcctcctccgcttcagggtatgggagttggtgaaggggctttcaaaaaataataagaaaaaaaaggtaaagtctttggtagcttctatccactcagatcctggaaggcagcaaggttttgtggatctagattcattaggaatgtcttcttgtcagccaggccaggacccgggcttgccaagagcagaggccctcccagcaaccaggataccaccactttgggggctttgtgtacagaggtccgggtctgagacctcataggctgcagaaatctggggcagccaccatcaagaagcccctctcaggggccagaactcctttgccagcgtggatttctcaagtcgggactgcataattaaagcagttgcagttttattttttttacagcttttttcccaaaaatgatttgtagttgtgtgtgcagcacttcgccctgatatgtgtgctctacaataaaaaccaaatctaatatattt

SEQ ID NO: 361518 - DNA, 424 bp, Homo sapiens
tttgcttaagagagaagtaaacatatctatttatttagttcaacagcctggagcagctgtgcatcaacttcaccaatgagaaactgcaacagtttttcaaccaccacatgttcgtgctggagcaggaggagtacaagaaggaaggcatcgagtggacgttcatcgacttcgggatggacctggctgcctgcatcgagctcatcgagaaggttggtctgatgctattcctgtccctttgaactttattaaagcttgtgatttgcaactctttccattcacaggtctttttcaaagctggtcttctggggctcctagaggagatgcgagatgacaagctggcccagctgattacccgaacccaggccaggtgcagagggttcaaggtatatcgttatttatttacacctgatccaagtaccttctg

SEQ ID NO: 361519 - DNA, 6105 bp, Homo sapiens
gaggacgggcctttcaagagggacactggtcacaccgcccagtgtcagcagcagctgctagttctgaactgtctcactcccaggctacatcttctcacttgctaacaaggacctctgagttcagcagccatgagttcagactcagaattggctgtttttggggaggctgctcctttcctccgaaagtctgaaagggagcgcattgaggcccagaataggccctttgatgccaaaacatctgtctttgtggcggagcccaaagaatcctttgtcaaagggaccatccagagcagagaaggaggaaaagtgacggtgaagactgagggaggagcgactctgacagtgaaggatgatcaggtcttccccatgaaccctcccaaatatgacaagatcgaggatatggccatgatgactcatctgcatgagcctgctgtgctgtacaacctcaaagaacgttatgcagcctggatgatctacacctattcaggtctcttctgtgtcactgtcaacccctacaagtggctgcctgtgtataagcccgaggtggtgacagcctaccgaggcaaaaagcgccaggaggccccgccccacatcttctccatctctgacaacgcctatcagttcatgctgactgaccgagagaatcagtcaatcctgatcactggagaatctggtgcagggaagactgtgaacaccaagcgtgtcatccagtactttgcaacaattgcagttactggtgagaagaagaaggaagaaattacttctggcaaaatacaggggactctggaagatcaaatcatcagtgccaaccccctactggaggcctttggcaacgccaagaccgtgaggaatgacaactcctctcgctttggtaaattcatcagaatccactttggcactactggaaaactggcatctgctgatattgaaacatatctgctagagaagtctagagttgttttccagcttaaggctgagagaagttatcatattttttaccagattacatcgaataagaaaccagaacttattgaaatgcttctgattaccacgaacccatatgattacccatttgtcagtcaaggggagatcagtgtggccagcatcgatgatcaggaagaactgatggccacagatagtgctattgatattttgggctttactaatgaagaaaaggtctccatttacaagctcacgggggctgtgatgcattatgggaacctaaaatttaagcaaaagcagcgtgaggagcaagcagagccagatggcacagaagttgctgacaaggcggcctacctccagagtctgaactctgcagatctgctcaaagctctctgctaccccagggtcaaggtcggcaatgagtatgtcaccaaaggccagactgtagaacaggtgtccaacgcagtaggtgctctggccaaagccgtctacgagaagatgttcctgtggatggttgcccgcatcaaccagcagctggacaccaagcagcccaggcagtacttcatcggggtcttggacattgctggttttgagatttttgatttcaacagcctggagcagctgtgcatcaacttcaccaatgagaaactgcaacagtttttcaaccaccacatgttcgtgctggagcaggaggagtacaagaaggaaggcatcgagtggacgttcatcgacttcgggatggacctggctgcctgcatcgagctcatcgagaaggttggtcctatgggcatcttctccatcctggaagaggagtgcatgttccctaaggcaacagacacctccttcaagaacaagctgtatgaccagcacctgggcaagtctgccaacttccagaagcccaaggtggtcaaaggcaaggccgaggcccacttcgctctgattcactatgctggtgttgtggactacaacattactggctggctggagaagaacaaggaccccctgaatgagaccgtggttggactgtaccagaagtctgcaatgaaaactctagctcagctcttctctggggctcaaactgctgaaggagagggagctggtggaggggccaagaaaggtggtaagaagaagggctcttctttccagacagtgtctgcccttttcagagagaatttgaacaagctgatgaccaacctcaggagtacccatcctcactttgtgaggtgtatcatccccaatgagacaaaaactcctggtgccatggagcatgagcttgtcctccaccagctgaggtgtaacggtgtgctggaaggcatccgcatctgtaggaaaggatttccaagcagaatcctttatgcagacttcaaacagagatacaaggtattaaatgcaagtgcaatccctgaagggcaattcattgatagcaagaaggcctctgagaagctccttgcatccatcgacattgaccacacccagtataaatttgggcacaccaaggtctttttcaaagctggtcttctggggctcctagaggagatgcgagatgacaagctggcccagctgattacccgaacccaggccaggtgcagagggttcttggcaagagtggagtaccagaggatggtggagagaagggaggccatcttctgtatccagtacaatatcagatccttcatgaatgtcaagcactggccctggatgaaactcttcttcaagatcaagcctctgttgaagagtgcagaaactgagaaggagatggccaccatgaaggaagaatttcagaaaattaaagacgaacttgccaagtcagaggcaaaaaggaaggaactggaagaaaagatggtgacgctgttgaaagaaaaaaatgacttgcagctccaagttcaggctgaagccgaaggcttggctgatgcagaggaaaggtgtgaccagctaatcaaaaccaaaatccagctagaagccaaaatcaaagaggtgactgagagagctgaggatgaggaagagatcaatgctgagctgacagccaagaagaggaaactggaggatgaatgttcagaactcaagaaagacattgatgaccttgagctgacactggccaaggttgagaaggagaaacatgccacagaaaacaaggtgaaaaacctcacagaagagatggcaggtctggatgaaaccattgctaagctgaccaaggagaagaaggctctccaggaggcccaccagcagaccctggatgacctgcaggcagaggaggacaaagtcaacaccctgaccaaagctaaaatcaaacttgaacaacaagtggatgatcttgaagggtccttggagcaagaaaagaaacttcgcatggacctagaaagggctaagaggaaacttgagggtgacttgaagttggcccaagaatccataatggacattgaaaatgagaaacagcaacttgatgaaaagctcaaaaagaaagagtttgaaatcagcaatctgcaaagcaagattgaagatgaacaggcacttggcattcaattgcagaagaaaattaaagaattgcaagcccgcattgaggagctggaggaggaaatcgaggcggagcgggcctcccgggccaaagcagagaagcagcgctctgacctctcccgggagctggaggagatcagcgagaggctggaagaagccggtggggccacttcagcccagattgagatgaacaagaagcgggaggctgagttccagaaaatgcgcagggacctggaggaggccaccctacagcatgaagccacagcggccaccctgaggaagaagcatgcagatagtgtggccgagcttggggagcagattgacaacctgcagcgagtgaagcagaagctggagaaggagaagagtgagatgaagatggagattgatgaccttgctagtaatgtagaaacggtctccaaagccaagggaaacctagagaaaatgtgccggactctagaggaccaactgagtgaactgaaatcaaaggaagaggagcagcagcggctgatcaatgacctgactgcgcagagggggcgcctgcagactgaatctggtgagttttcacgccagcttgatgaaaaggaagctctggtgtctcagttatcaagaggcaaacaagcctttactcaacagattgaagaattaaagaggcaacttgaagaggagataaaagccaagaacgccctggcgcatgccctgcagtcttcccgccacgactgtgacctgctgcgggaacagtatgaggaggagcaggaatccaaggccgagctgcagagagcactgtccaaggccaacaccgaggttgcccaatggaggaccaaatacgagacggacgccatccagcgcacagaggagctggaggaggccaagaagaagctggcccagcggctgcaggcagctgaggaacatgtagaagctgtgaacgccaaatgtgcttccctcgaaaagacgaagcagcggctgcagaatgaggtcgaggacctcatgcttgatgtggagaggacaaatgccgcctgtgccgcccttgacaaaaagcaaaggaacttcgataagatcctggcagaatggaaacagaaatgtgaggaaacgcatgctgagcttgaggcctcccagaaggaagcccgttcccttggcactgagctgttcaagataaagaatgcctatgaggaatctttggatcagctagaaaccctgaagcgagagaacaaaaacttacagcaggagatttctgacctcacggaacagattgcagaaggagggaaacgtatccatgaactggagaaaataaagaaacaagtggaacaagaaaagtgtgaacttcaggctgctttagaagaagcagaggcatctcttgaacatgaagagggaaagatcctgcgcatccagcttgagttgaaccaagtcaagtctgaggttgataggaaaattgctgaaaaagatgaggaaattgaccagctgaagagaaaccacattagaatcgtggagtccatgcagagcacgctggatgctgagatcaggagtaggaatgatgccattaggctcaagaagaagatggagggagacctcaatgaaatggaaatccagctgaaccatgccaaccgcatggctgctgaggccctgaggaactacaggaacacccaaggcatcctcaaggatacccagatccacctggatgatgctctccggagccaggaggacctgaaggaacagctggccatggtggagcgcagagccaacctgctgcaggctgagatcgaggagctgcgggccactctggaacagacagagaggagcagaaaaatcgcagaacaggagctcctggatgccagtgagcgtgttcagctactgcacacccagaacaccagcctgatcaacaccaagaagaagctggagacagatatttcccaaatgcaaggagagatggaggacattctccaggaagcccgcaatgcagaagaaaaggccaagaaggccatcactgatgccgccatgatggctgaggagctgaagaaggagcaggacaccagcgcccacctggagcggatgaagaagaacatggagcagaccgtgaaggatctgcagctccgtctggatgaggctgagcagctggccctgaagggtgggaagaagcagatccagaaactggaggccagggtacgggagctggaaggagaggttgagagtgagcaaaagcgtaatgctgaggctgtcaaaggtctgcgcaaacatgagaggcgagtgaaggaactcacttaccagacggaagaagatagaaagaatattctcaggcttcaagatttggtagataaacttcaggcaaaagtgaaatcttataagagacaagctgaggaggctgaggaacaatccaacaccaatctagctaaattccgcaagctccagcatgagctggaggaggccgaggaacgggctgacattgctgagtcccaggtgaacaaactgcgggtgaagagccgggaggttcacacaaaagtcataagtgaagagtgatcatgtcctgatgccatggaatgactgaagacaggcacaaaatgtgacatctttggtcatttccctctgtaattattgtgtattctaccctgttgcaaaggaaataaagcatagggtagtttgcaaacaataaaaaaaaaaaag

SEQ ID NO: 361520 - DNA, 3232 bp, Homo sapiens
catggcggccgccagcggctacacggacctgcgtgagaagctcaagtccatgacgtcccgggacaactataaggcgggcagccgggaggccgccgccgctgccgcagccgccgtagccgccgcagccgcagccgccgctgccgccgaaccttaccctgtgtccggggccaagcgcaagtatcaggaggactcggaccccgagcgcagcgactatgaggagcagcagctgcagaaggaggaggaggcgcgcaaggtgaagagcggcatccgccagatgcgcctcttcagccaggacgagtgcgccaagatcgaggcccgcattgacgaggtggtgtcccgcgctgagaagggcctgtacaacgagcacacggtggaccgggccccactgcgcaacaagtacttcttcggcgaaggctacacttacggcgcccagctgcagaagcgcgggcccggccaggagcgcctctacccgccgggcgacgtggacgagatccccgagtgggtgcaccagctggtgatccaaaagctggtggagcaccgcgtcatccccgagggcttcgtcaacagcgccgtcatcaacgactaccagcccggcggctgcatcgtgtctcacgtggaccccatccacatcttcgagcgccccatcgtgtccgtgtccttctttagcgactctgcgctgtgcttcggctgcaagttccagttcaagcctattcgggtgtcggaaccagtgctttccctgccggtgcgcaggggaagcgtgactgtgctcagtggatatgctgctgatgaaatcactcactgcatacggcctcaggacatcaaggagcgccgagcagtcatcatcctcaggaagacaagattagatgcaccccggttggaaacaaagtccctgagcagctccgtgttaccacccagctatgcttcagatcgcctgtcaggaaacaacagggaccctgctctgaaacccaagcggtcccaccgcaaggcagaccctgatgctgcccacaggccacggatcctggagatggacaaggaagagaaccggcgctcggtgctgctgcccacacaccggcggaggggtagcttcagctctgagaactactggcgcaagtcatacgagtcctcagaggactgctctgaggcagcaggcagccctgcccgaaaggtgaagatgcggcggcactgagtctacccgccgccctcctgggaactctggctcatccttacgtagttgcccctccttttgttttgagggttttgtttttgttcattggggggtttttgttttttgttttttgttttttttgattctatatatttttccttggttttgttgcctgttaaggctgaagaatagaattggccaggacctaggttctcatattcttggtattcctcctggatggaaaggctgttggcatcaataggggacagaggctgatgctggagtggccagtagaggtggtggagcagagcagccatcttttaagtggggctgtatcaggctgggtttatttaaaagcaacaaaatgttttggttaagaaaattattttgctttcagtgtaaatcttcgcagtgttctaaacaaagttcagtcttctgctcgcccctttccctcactgatgtctgcacttggttgaggtctcctggagcctcacaggctctgctgttctccacttctcacctgccatccacgccctgcaagctcatgcaaacaccctttcttcctcctgcggcagagttgttcaggttgcctgggcaggggcttaaacagtgccagcccctgccatcccaaagctattgttaagccccccaggcgtcctccacccacgcccactagcctgccatgtccacagttccttgggctgctgaggggctagtgcagtggtcctgacctctcttatcaagagcacacttctttgctggttgctccttttgagcatatgcgtgtgattatttggaacagttagacttgccacgttgggtcagttttagaaattgtttctagctagagggactggtgtccttccaagtctagcatttggggtatggaaaattgttgtggtgtgtggtagggtttttgttttcttttttgagttttttttccccctttagtctcctggctttttcctttcccttcccttctccactggccagcttgggcctcatcctcatgtcatccttctaggaaggcgcctgccccatcttgtctgccggcagcatgcatccaaggccagagctcaggcctgcagactgggctggtgcctcctccgcttcagggtatgggagttggtgaaggggctttcaaaaaataataagaaaaaaaaggtaaagtctttggtagcttctatccactcagatcctggaaggcagcaaggttttgtggatctagattcattaggaatgtcttcttgtcagccaggccaggacccgggcttgccaagagcagaggccctcccagcaaccaggataccaccactttgggggctttgtgtacagaggtccgggtctgagacctcataggctgcttgagattattcagctaggaaggccatcactgatgccgccatgatggctgaggagctgaagaaggagcaggacaccagcgcccacctggagcggatgaagaagaacatggagcagaccgtgaaggatctgcagctccgtctggatgaggctgagcagctggccctgaagggtgggaagaagcagatccagaaactggaggccagggtacgggagctggaaggagaggttgagagtgagcaaaagcgtaatgctgaggctgtcaaaggtctgcgcaaacatgagaggcgagtgaaggaactcacttaccagacggaagaagatagaaagaatattctcaggcttcaagatttggtagataaacttcaggcaaaagtgaaatcttataagagacaagctgaggaggctgaggaacaatccaacaccaatctagctaaattccgcaagctccagcatgagctggaggaggccgaggaacgggctgacattgctgagtcccaggtgaacaaactgcgggtgaagagccgggaggttcacacaaaagtcataagtgaagagtgatcatgtcctgatgccatggaatgactgaagacaggcacaaaatgtgacatctttggtcatttccctctgtaattattgtgtattctaccctgttgcaaaggaaataaagcatagggtagtttgcaaacaataaaaaaaaaaaag

SEQ ID NO: 361521 - DNA, 3189 bp, Homo sapiens
  misc_feature (27)..(27): n is a, c, g, or t
gggcctcccgcgaagagtataccgagngcaatccctgggggaacggccgccgccgctgccgcagccgccgtagccgccgcagccgcagccgccgctgccgccgaaccttaccctgtgtccggggccaagcgcaagtatcaggaggactcggaccccgagcgcagcgactatgaggagcagcagctgcagaaggaggaggaggcgcgcaaggtgaagagcggcatccgccagatgcgcctcttcagccaggacgagtgcgccaagatcgaggcccgcattgacgaggtggtgtcccgcgctgagaagggcctgtacaacgagcacacggtggaccgggccccactgcgcaacaagtacttcttcggcgaaggctacacttacggcgcccagctgcagaagcgcgggcccggccaggagcgcctctacccgccgggcgacgtggacgagatccccgagtgggtgcaccagctggtgatccaaaagctggtggagcaccgcgtcatccccgagggcttcgtcaacagcgccgtcatcaacgactaccagcccggcggctgcatcgtgtctcacgtggaccccatccacatcttcgagcgccccatcgtgtccgtgtccttctttagcgactctgcgctgtgcttcggctgcaagttccagttcaagcctattcgggtgtcggaaccagtgctttccctgccggtgcgcaggggaagcgtgactgtgctcagtggatatgctgctgatgaaatcactcactgcatacggcctcaggacatcaaggagcgccgagcagtcatcatcctcaggaagacaagattagatgcaccccggttggaaacaaagtccctgagcagctccgtgttaccacccagctatgcttcagatcgcctgtcaggaaacaacagggaccctgctctgaaacccaagcggtcccaccgcaaggcagaccctgatgctgcccacaggccacggatcctggagatggacaaggaagagaaccggcgctcggtgctgctgcccacacaccggcggaggggtagcttcagctctgagaactactggcgcaagtcatacgagtcctcagaggactgctctgaggcagcaggcagccctgcccgaaaggtgaagatgcggcggcactgagtctacccgccgccctcctgggaactctggctcatccttacgtagttgcccctccttttgttttgagggttttgtttttgttcattggggggtttttgttttttgttttttgttttttttgattctatatatttttccttggttttgttgcctgttaaggctgaagaatagaattggccaggacctaggttctcatattcttggtattcctcctggatggaaaggctgttggcatcaataggggacagaggctgatgctggagtggccagtagaggtggtggagcagagcagccatcttttaagtggggctgtatcaggctgggtttatttaaaagcaacaaaatgttttggttaagaaaattattttgctttcagtgtaaatcttcgcagtgttctaaacaaagttcagtcttctgctcgcccctttccctcactgatgtctgcacttggttgaggtctcctggagcctcacaggctctgctgttctccacttctcacctgccatccacgccctgcaagctcatgcaaacaccctttcttcctcctgcggcagagttgttcaggttgcctgggcaggggcttaaacagtgccagcccctgccatcccaaagctattgttaagccccccaggcgtcctccacccacgcccactagcctgccatgtccacagttccttgggctgctgaggggctagtgcagtggtcctgacctctcttatcaagagcacacttctttgctggttgctccttttgagcatatgcgtgtgattatttggaacagttagacttgccacgttgggtcagttttagaaattgtttctagctagagggactggtgtccttccaagtctagcatttggggtatggaaaattgttgtggtgtgtggtagggtttttgttttcttttttgagttttttttccccctttagtctcctggctttttcctttcccttcccttctccactggccagcttgggcctcatcctcatgtcatccttctaggaaggcgcctgccccatcttgtctgccggcagcatgcatccaaggccagagctcaggcctgcagactgggctggtgcctcctccgcttcagggtatgggagttggtgaaggggctttcaaaaaataataagaaaaaaaaggtaaagtctttggtagcttctatccactcagatcctggaaggcagcaaggttttgtggatctagattcattaggaatgtcttcttgtcagccaggccaggacccgggcttgccaagagcagaggccctcccagcaaccaggataccaccactttgggggctttgtgtacagaggtccgggtctgagacctcataggctgcttgagattattcagctaggaaggccatcactgatgccgccatgatggctgaggagctgaagaaggagcaggacaccagcgcccacctggagcggatgaagaagaacatggagcagaccgtgaaggatctgcagctccgtctggatgaggctgagcagctggccctgaagggtgggaagaagcagatccagaaactggaggccagggtacgggagctggaaggagaggttgagagtgagcaaaagcgtaatgctgaggctgtcaaaggtctgcgcaaacatgagaggcgagtgaaggaactcacttaccagacggaagaagatagaaagaatattctcaggcttcaagatttggtagataaacttcaggcaaaagtgaaatcttataagagacaagctgaggaggctgaggaacaatccaacaccaatctagctaaattccgcaagctccagcatgagctggaggaggccgaggaacgggctgacattgctgagtcccaggtgaacaaactgcgggtgaagagccgggaggttcacacaaaagtcataagtgaagagtgatcatgtcctgatgccatggaatgactgaagacaggcacaaaatgtgacatctttggtcatttccctctgtaattattgtgtattctaccctgttgcaaaggaaataaagcatagggtagtttgcaaacaataaaaaaaaaaaag

SEQ ID NO: 361522 - DNA, 4167 bp, Homo sapiens
tttgcttaagagagaagtaaacatatctatttatttagttcaacagcctggagcagctgtgcatcaacttcaccaatgagaaactgcaacagtttttcaaccaccacatgttcgtgctggagcaggaggagtacaagaaggaaggcatcgagtggacgttcatcgacttcgggatggacctggctgcctgcatcgagctcatcgagaaggttggtctccttttcaacagctctgcagtgaaataaatatgcatttttaggtgccatggagcatgagcttgtcctccaccagctgaggtgtaacggtgtgctggaaggcatccgcatctgtaggaaaggatttccaagcagaatcctttatgcagacttcaaacagagatacaaggtattaaatgcaagtgcaatccctgaagggcaattcattgatagcaagaaggcctctgagaagctccttgcatccatcgacattgaccacacccagtataaatttgggcacaccaaggtctttttcaaagctggtcttctggggctcctagaggagatgcgagatgacaagctggcccagctgattacccgaacccaggccaggtgcagagggttcttggcaagagtggagtaccagaggatggtggagagaagggaggccatcttctgtatccagtacaatatcagatccttcatgaatgtcaagcactggccctggatgaaactcttcttcaagatcaagcctctgttgaagagtgcagaaactgagaaggagatggccaccatgaaggaagaatttcagaaaattaaagacgaacttgccaagtcagaggcaaaaaggaaggaactggaagaaaagatggtgacgctgttgaaagaaaaaaatgacttgcagctccaagttcaggctgaagccgaaggcttggctgatgcagaggaaaggtgtgaccagctaatcaaaaccaaaatccagctagaagccaaaatcaaagaggtgactgagagagctgaggatgaggaagagatcaatgctgagctgacagccaagaagaggaaactggaggatgaatgttcagaactcaagaaagacattgatgaccttgagctgacactggccaaggttgagaaggagaaacatgccacagaaaacaaggtgaaaaacctcacagaagagatggcaggtctggatgaaaccattgctaagctgaccaaggagaagaaggctctccaggaggcccaccagcagaccctggatgacctgcaggcagaggaggacaaagtcaacaccctgaccaaagctaaaatcaaacttgaacaacaagtggatgatcttgaagggtccttggagcaagaaaagaaacttcgcatggacctagaaagggctaagaggaaacttgagggtgacttgaagttggcccaagaatccataatggacattgaaaatgagaaacagcaacttgatgaaaagctcaaaaagaaagagtttgaaatcagcaatctgcaaagcaagattgaagatgaacaggcacttggcattcaattgcagaagaaaattaaagaattgcaagcccgcattgaggagctggaggaggaaatcgaggcggagcgggcctcccgggccaaagcagagaagcagcgctctgacctctcccgggagctggaggagatcagcgagaggctggaagaagccggtggggccacttcagcccagattgagatgaacaagaagcgggaggctgagttccagaaaatgcgcagggacctggaggaggccaccctacagcatgaagccacagcggccaccctgaggaagaagcatgcagatagtgtggccgagcttggggagcagattgacaacctgcagcgagtgaagcagaagctggagaaggagaagagtgagatgaagatggagattgatgaccttgctagtaatgtagaaacggtctccaaagccaagggaaacctagagaaaatgtgccggactctagaggaccaactgagtgaactgaaatcaaaggaagaggagcagcagcggctgatcaatgacctgactgcgcagagggggcgcctgcagactgaatctggtgagttttcacgccagcttgatgaaaaggaagctctggtgtctcagttatcaagaggcaaacaagcctttactcaacagattgaagaattaaagaggcaacttgaagaggagataaaagccaagaacgccctggcgcatgccctgcagtcttcccgccacgactgtgacctgctgcgggaacagtatgaggaggagcaggaatccaaggccgagctgcagagagcactgtccaaggccaacaccgaggttgcccaatggaggaccaaatacgagacggacgccatccagcgcacagaggagctggaggaggccaagaagaagctggcccagcggctgcaggcagctgaggaacatgtagaagctgtgaacgccaaatgtgcttccctcgaaaagacgaagcagcggctgcagaatgaggtcgaggacctcatgcttgatgtggagaggacaaatgccgcctgtgccgcccttgacaaaaagcaaaggaacttcgataagatcctggcagaatggaaacagaaatgtgaggaaacgcatgctgagcttgaggcctcccagaaggaagcccgttcccttggcactgagctgttcaagataaagaatgcctatgaggaatctttggatcagctagaaaccctgaagcgagagaacaaaaacttacagcaggagatttctgacctcacggaacagattgcagaaggagggaaacgtatccatgaactggagaaaataaagaaacaagtggaacaagaaaagtgtgaacttcaggctgctttagaagaagcagaggcatctcttgaacatgaagagggaaagatcctgcgcatccagcttgagttgaaccaagtcaagtctgaggttgataggaaaattgctgaaaaagatgaggaaattgaccagctgaagagaaaccacattagaatcgtggagtccatgcagagcacgctggatgctgagatcaggagtaggaatgatgccattaggctcaagaagaagatggagggagacctcaatgaaatggaaatccagctgaaccatgccaaccgcatggctgctgaggccctgaggaactacaggaacacccaaggcatcctcaaggatacccagatccacctggatgatgctctccggagccaggaggacctgaaggaacagctggccatggtggagcgcagagccaacctgctgcaggctgagatcgaggagctgcgggccactctggaacagacagagaggagcagaaaaatcgcagaacaggagctcctggatgccagtgagcgtgttcagctactgcacacccagaacaccagcctgatcaacaccaagaagaagctggagacagatatttcccaaatgcaaggagagatggaggacattctccaggaagcccgcaatgcagaagaaaaggccaagaaggccatcactgatgccgccatgatggctgaggagctgaagaaggagcaggacaccagcgcccacctggagcggatgaagaagaacatggagcagaccgtgaaggatctgcagctccgtctggatgaggctgagcagctggccctgaagggtgggaagaagcagatccagaaactggaggccagggtacgggagctggaaggagaggttgagagtgagcaaaagcgtaatgctgaggctgtcaaaggtctgcgcaaacatgagaggcgagtgaaggaactcacttaccagacggaagaagatagaaagaatattctcaggcttcaagatttggtagataaacttcaggcaaaagtgaaatcttataagagacaagctgaggaggctgaggaacaatccaacaccaatctagctaaattccgcaagctccagcatgagctggaggaggccgaggaacgggctgacattgctgagtcccaggtgaacaaactgcgggtgaagagccgggaggttcacacaaaagtcataagtgaagagtgatcatgtcctgatgccatggaatgactgaagacaggcacaaaatgtgacatctttggtcatttccctctgtaattattgtgtattctaccctgttgcaaaggaaataaagcatagggtagtttgcaaacaataaaaaaaaaaaag

SEQ ID NO: 361523 - DNA, 2642 bp, Homo sapiens
ctagggtagcacagcctgtcattgggagtttccagacagaagtgttcccattccttactcctaaaggtggacttgaggagggtctttgaaagtcagctagaccaatctctagttgaacctcaaggagagtgaggtacagagcagagactgctggcttccaggtctagctggctcccacttggcctggccagagaattggtctgatggtgcccacaccttcaccggaggccctttggtgaccccatgcatgtttcctttgcaggacaagattagatgcaccccggttggaaacaaagtccctgagcagctccgtgttaccacccagctatgcttcagatcgcctgtcaggaaacaacagggaccctgctctgaaacccaagcggtcccaccgcaaggcagaccctgatgctgcccacaggccacggatcctggagatggacaaggaagagaaccggcgctcggtgctgctgcccacacaccggcggaggggtagcttcagctctgagaactactggcgcaagtcatacgagtcctcagaggactgctctgaggcagcaggcagccctgcccgaaaggtgaagatgcggcggcactgagtctacccgccgccctcctgggaactctggctcatccttacgtagttgcccctccttttgttttgagggttttgtttttgttcattggggggtttttgttttttgttttttgttttttttgattctatatatttttccttggttttgttgcctgttaaggctgaagaatagaattggccaggacctaggttctcatattcttggtattcctcctggatggaaaggctgttggcatcaataggggacagaggctgatgctggagtggccagtagaggtggtggagcagagcagccatcttttaagtggggctgtatcaggctgggtttatttaaaagcaacaaaatgttttggttaagaaaattattttgctttcagtgtaaatcttcgcagtgttctaaacaaagttcagtcttctgctcgcccctttccctcactgatgtctgcacttggttgaggtctcctggagcctcacaggctctgctgttctccacttctcacctgccatccacgccctgcaagctcatgcaaacaccctttcttcctcctgcggcagagttgttcaggttgcctgggcaggggcttaaacagtgccagcccctgccatcccaaagctattgttaagccccccaggcgtcctccacccacgcccactagcctgccatgtccacagttccttgggctgctgaggggctagtgcagtggtcctgacctctcttatcaagagcacacttctttgctggttgctccttttgagcatatgcgtgtgattatttggaacagttagacttgccacgttgggtcagttttagaaattgtttctagctagagggactggtgtccttccaagtctagcatttggggtatggaaaattgttgtggtgtgtggtagggtttttgttttcttttttgagttttttttccccctttagtctcctggctttttcctttcccttcccttctccactggccagcttgggcctcatcctcatgtcatccttctaggaaggcgcctgccccatcttgtctgccggcagcatgcatccaaggccagagctcaggcctgcagactgggctggtgcctcctccgcttcagggtatgggagttggtgaaggggctttcaaaaaataataagaaaaaaaaggtaaagtctttggtagcttctatccactcagatcctggaaggcagcaaggttttgtggatctagattcattaggaatgtcttcttgtcagccaggccaggacccgggcttgccaagagcagaggccctcccagcaaccaggataccaccactttgggggctttgtgtacagaggtccgggtctgagacctcataggctgcttgagattattcagctaggaaggccatcactgatgccgccatgatggctgaggagctgaagaaggagcaggacaccagcgcccacctggagcggatgaagaagaacatggagcagaccgtgaaggatctgcagctccgtctggatgaggctgagcagctggccctgaagggtgggaagaagcagatccagaaactggaggccagggtacgggagctggaaggagaggttgagagtgagcaaaagcgtaatgctgaggctgtcaaaggtctgcgcaaacatgagaggcgagtgaaggaactcacttaccagacggaagaagatagaaagaatattctcaggcttcaagatttggtagataaacttcaggcaaaagtgaaatcttataagagacaagctgaggaggctgaggaacaatccaacaccaatctagctaaattccgcaagctccagcatgagctggaggaggccgaggaacgggctgacattgctgagtcccaggtgaacaaactgcgggtgaagagccgggaggttcacacaaaagtcataagtgaagagtgatcatgtcctgatgccatggaatgactgaagacaggcacaaaatgtgacatctttggtcatttccctctgtaattattgtgtattctaccctgttgcaaaggaaataaagcatagggtagtttgcaaacaataaaaaaaaaaaag

SEQ ID NO: 361524 - DNA, 3239 bp, Homo sapiens
catggcggccgccagcggctacacggacctgcgtgagaagctcaagtccatgacgtcccgggacaactataaggcgggcagccgggaggccgccgccgctgccgcagccgccgtagccgccgcagccgcagccgccgctgccgccgaaccttaccctgtgtccggggccaagcgcaagtatcaggaggactcggaccccgagcgcagcgactatgaggagcagcagctgcagaaggaggaggaggcgcgcaaggtgaagagcggcatccgccagatgcgcctcttcagccaggacgagtgcgccaagatcgaggcccgcattgacgaggtggtgtcccgcgctgagaagggcctgtacaacgagcacacggtggaccgggccccactgcgcaacaagtacttcttcggcgaaggctacacttacggcgcccagctgcagaagcgcgggcccggccaggagcgcctctacccgccgggcgacgtggacgagatccccgagtgggtgcaccagctggtgatccaaaagctggtggagcaccgcgtcatccccgagggcttcgtcaacagcgccgtcatcaacgactaccagcccggcggctgcatcgtgtctcacgtggaccccatccacatcttcgagcgccccatcgtgtccgtgtccttctttagcgactctgcgctgtgcttcggctgcaagttccagttcaagcctattcgggtgtcggaaccagtgctttccctgccggtgcgcaggggaagcgtgactgtgctcagtggatatgctgctgatgaaatcactcactgcatacggcctcaggacatcaaggagcgccgagcagtcatcatcctcaggaagacaagattagatgcaccccggttggaaacaaagtccctgagcagctccgtgttaccacccagctatgcttcagatcgcctgtcaggaaacaacagggaccctgctctgaaacccaagcggtcccaccgcaaggcagaccctgatgctgcccacaggccacggatcctggagatggacaaggaagagaaccggcgctcggtgctgctgcccacacaccggcggaggggtagcttcagctctgagaactactggcgcaagtcatacgagtcctcagaggactgctctgaggcagcaggcagccctgcccgaaaggtgaagatgcggcggcactgagtctacccgccgccctcctgggaactctggctcatccttacgtagttgcccctccttttgttttgagggttttgtttttgttcattggggggtttttgttttttgttttttgttttttttgattctatatatttttccttggttttgttgcctgttaaggctgaagaatagaattggccaggacctaggttctcatattcttggtattcctcctggatggaaaggctgttggcatcaataggggacagaggctgatgctggagtggccagtagaggtggtggagcagagcagccatcttttaagtggggctgtatcaggctgggtttatttaaaagcaacaaaatgttttggttaagaaaattattttgctttcagtgtaaatcttcgcagtgttctaaacaaagttcagtcttctgctcgcccctttccctcactgatgtctgcacttggttgaggtctcctggagcctcacaggctctgctgttctccacttctcacctgccatccacgccctgcaagctcatgcaaacaccctttcttcctcctgcggcagagttgttcaggttgcctgggcaggggcttaaacagtgccagcccctgccatcccaaagctattgttaagccccccaggcgtcctccacccacgcccactagcctgccatgtccacagttccttgggctgctgaggggctagtgcagtggtcctgacctctcttatcaagagcacacttctttgctggttgctccttttgagcatatgcgtgtgattatttggaacagttagacttgccacgttgggtcagttttagaaattgtttctagctagagggactggtgtccttccaagtctagcatttggggtatggaaaattgttgtggtgtgtggtagggtttttgttttcttttttgagttttttttccccctttagtctcctggctttttcctttcccttcccttctccactggccagcttgggcctcatcctcatgtcatccttctaggaaggcgcctgccccatcttgtctgccggcagcatgcatccaaggccagagctcaggcctgcagactgggctggtgcctcctccgcttcagggtatgggagttggtgaaggggctttcaaaaaataataagaaaaaaaaggtaaagtctttggtagcttctatccactcagatcctggaaggcagcaaggttttgtggatctagattcattaggaatgtcttcttgtcagccaggccaggacccgggcttgccaagagcagaggccctcccagcaaccaggataccaccactttgggggctttgtgtacagaggtccgggtctgagacctcataggctgcttgagattattcagctaggaaggccatcactgatgccgccatgatggctgaggagctgaagaaggagcaggacaccagcgcccacctggagcggatgaagaagaacatggagcagaccgtgaaggatctgcagctccgtctggatgaggctgagcagctggccctgaagggtgggaagaagcagatccagaaactggaggccagggtacgggagctggaaggagaggttgagagtgagcaaaagcgtaatgctgaggctgtcaaaggtctgcgcaaacatgagaggcgagtgaaggaactcacttaccagacggaagaagatagaaagaatattctcaggcttcaagatttggtagataaacttcaggcaaaagtgaaatcttataagagacaagctgaggaggctgaggaacaatccaacaccaatctagctaaattccgcaagctccagcatgagctggaggaggccgaggaacgggctgacattgctgagtcccaggtgaacaaactgcgggtgaagagccgggaggttcacacaaaagtcataagtgattgttcctcagcctcctcagcttgtctctataagatttcacttttgcctgaagtttatctaccaaatcttgaagcctgagaatattctttctatcttcttccgtctggtaagtgagttccttactcgcctctaatgtatgcgcagaccttgacagcta

SEQ ID NO: 361525 - DNA, 992 bp, Homo sapiens
cttccaccagcaaaagtactgggccagccccgcgttgatatgtggaagggagctgtggaaggctcccttccaccaacctgctgcaggctgagatcgaggagctgcgggccactctggaacagacagagaggagcagaaaaatcgcagaacaggagctcctggatgccagtgagcgtgttcagctactgcacacccagaacaccagcctgatcaacaccaagaagaagctggagacagatatttcccaaatgcaaggagagatggaggacattctccaggaagcccgcaatgcagaagaaaaggccaagaaggccatcactgatgccgccatgatggctgaggagctgaagaaggagcaggacaccagcgcccacctggagcggatgaagaagaacatggagcagaccgtgaaggatctgcagctccgtctggatgaggctgagcagctggccctgaagggtgggaagaagcagatccagaaactggaggccagggtacgggagctggaaggagaggttgagagtgagcaaaagcgtaatgctgaggctgtcaaaggtctgcgcaaacatgagaggcgagtgaaggaactcacttaccagacggaagaagatagaaagaatattctcaggcttcaagatttggtagataaacttcaggcaaaagtgaaatcttataagagacaagctgaggaggctgaggaacaatccaacaccaatctagctaaattccgcaagctccagcatgagctggaggaggccgaggaacgggctgacattgctgagtcccaggtgaacaaactgcgggtgaagagccgggaggttcacacaaaagtcataagtgaagagtgatcatgtcctgatgccatggaatgactgaagacaggcacaaaatgtgacatctttggtcatttccctctgtaattattgtgtattctaccctgttgcaaaggaaataaagcatagggtagtttgcaaacaataaaaaaaaaaaag

SEQ ID NO: 361526 - DNA, 897 bp, Homo sapiens
  misc_feature (47)..(47): n is a, c, g, or t
ttgttactcctcgtaccaaaaaggaccagaacaaaaagtttacttcnattgttcccataggaaactcagcttggttagtgtgtcaggcactttctgagataccagcccacccctcgggccctcccagcaaccaggataccaccactttgggggctttgtgtacagaggtccgggtctgagacctcataggctgcttgagattattcagctaggaaggccatcactgatgccgccatgatggctgaggagctgaagaaggagcaggacaccagcgcccacctggagcggatgaagaagaacatggagcagaccgtgaaggatctgcagctccgtctggatgaggctgagcagctggccctgaagggtgggaagaagcagatccagaaactggaggccagggtacgggagctggaaggagaggttgagagtgagcaaaagcgtaatgctgaggctgtcaaaggtctgcgcaaacatgagaggcgagtgaaggaactcacttaccagacggaagaagatagaaagaatattctcaggcttcaagatttggtagataaacttcaggcaaaagtgaaatcttataagagacaagctgaggaggctgaggaacaatccaacaccaatctagctaaattccgcaagctccagcatgagctggaggaggccgaggaacgggctgacattgctgagtcccaggtgaacaaactgcgggtgaagagccgggaggttcacacaaaagtcataagtgaagagtgatcatgtcctgatgccatggaatgactgaagacaggcacaaaatgtgacatctttggtcatttccctctgtaattattgtgtattctaccctgttgcaaaggaaataaagcatagggtagtttgcaaacaataaaaaaaaaaaag

SEQ ID NO: 361527 - DNA, 710 bp, Homo sapiens
tccaacgatggtcctcagctatcatgaaggccatcactgatgccgccatgatggctgaggagctgaagaaggagcaggacaccagcgcccacctggagcggatgaagaagaacatggagcagaccgtgaaggatctgcagctccgtctggatgaggctgagcagctggccctgaagggtgggaagaagcagatccagaaactggaggccagggtacgggagctggaaggagaggttgagagtgagcaaaagcgtaatgctgaggctgtcaaaggtctgcgcaaacatgagaggcgagtgaaggaactcacttaccagacggaagaagatagaaagaatattctcaggcttcaagatttggtagataaacttcaggcaaaagtgaaatcttataagagacaagctgaggaggctgaggaacaatccaacaccaatctagctaaattccgcaagctccagcatgagctggaggaggccgaggaacgggctgacattgctgagtcccaggtgaacaaactgcgggtgaagagccgggaggttcacacaaaagtcataagtgaagagtgatcatgtcctgatgccatggaatgactgaagacaggcacaaaatgtgacatctttggtcatttccctctgtaattattgtgtattctaccctgttgcaaaggaaataaagcatagggtagtttgcaaacaataaaaaaaaaaaag

SEQ ID NO: 361528 - DNA, 2719 bp, Homo sapiens
catggcggccgccagcggctacacggacctgcgtgagaagctcaagtccatgacgtcccgggacaactataaggcgggcagccgggaggccgccgccgctgccgcagccgccgtagccgccgcagccgcagccgccgctgccgccgaaccttaccctgtgtccggggccaagcgcaagtatcaggaggactcggaccccgagcgcagcgactatgaggagcagcagctgcagaaggaggaggaggcgcgcaaggtgaagagcggcatccgccagatgcgcctcttcagccaggacgagtgcgccaagatcgaggcccgcattgacgaggtggtgtcccgcgctgagaagggcctgtacaacgagcacacggtggaccgggccccactgcgcaacaagtacttcttcggcgaaggctacacttacggcgcccagctgcagaagcgcgggcccggccaggagcgcctctacccgccgggcgacgtggacgagatccccgagtgggtgcaccagctggtgatccaaaagctggtggagcaccgcgtcatccccgagggcttcgtcaacagcgccgtcatcaacgactaccagcccggcggctgcatcgtgtctcacgtggaccccatccacatcttcgagcgccccatcgtgtccgtgtccttctttagcgactctgcgctgtgcttcggctgcaagttccagttcaagcctattcgggtgtcggaaccagtgctttccctgccggtgcgcaggggaagcgtgactgtgctcagtggatatgctgctgatgaaatcactcactgcatacggcctcaggacatcaaggagcgccgagcagtcatcatcctcaggaagacaagattagatgcaccccggttggaaacaaagtccctgagcagctccgtgttaccacccagctatgcttcagatcgcctgtcaggaaacaacagggaccctgctctgaaacccaagcggtcccaccgcaaggcagaccctgatgctgcccacaggccacggatcctggagatggacaaggaagagaaccggcgctcggtgctgctgcccacacaccggcggaggggtagcttcagctctgagaactactggcgcaagtcatacgagtcctcagaggactgctctgaggcagcaggcagccctgcccgaaaggtgaagatgcggcggcactgagtctacccgccgccctcctgggaactctggctcatccttacgtagttgcccctccttttgttttgagggttttgtttttgttcattggggggtttttgttttttgttttttgttttttttgattctatatatttttccttggttttgttgcctgttaaggctgaagaatagaattggccaggacctaggttctcatattcttggtattcctcctggatggaaaggctgttggcatcaataggggacagaggctgatgctggagtggccagtagaggtggtggagcagagcagccatcttttaagtggggctgtatcaggctgggtttatttaaaagcaacaaaatgttttggttaagaaaattattttgctttcagtgtaaatcttcgcagtgttctaaacaaagttcagtcttctgctcgcccctttccctcactgatgtctgcacttggttgaggtctcctggagcctcacaggctctgctgttctccacttctcacctgccatccacgccctgcaagctcatgcaaacaccctttcttcctcctgcggcagagttgttcaggttgcctgggcaggggcttaaacagtgccagcccctgccatcccaaagctattgttaagccccccaggcgtcctccacccacgcccactagcctgccatgtccacagttccttgggctgctgaggggctagtgcagtggtcctgacctctcttatcaagagcacacttctttgctggttgctccttttgagcatatgcgtgtgattatttggaacagttagacttgccacgttgggtcagttttagaaattgtttctagcaaccaggataccaccactttgggggctttgtgtacagaggtccgggtctgagacctcataggctgcagaaatctggggcagccaccatcaagaagcccctctcaggggccagaactcctttgccagcgtggatttctcaagtcgggactgcataattaaagcagttgcagttttattttttttacagcttttttcccaaaaatgatttgtagttgtgtgtgcagcacttcgccctgatatgtgtgctctacaataaaaaccaaatctaatatattttggaaacagttgtctgatgttgttgtaagagagggcttgcctttggtgcttccttaatccctttactttcttaaacttgaaacaggggttggggaggcagagctagctcattggccgccagcgtcccagaggagttggttggtcttggacactgggcctcctgtgtgcctagccttggatttatggctgaaggtggacttgccctcaccccactgtcctttctcccactccaaggagggtgaacttcataaaccacaatgtccaggtgcccagggaccacaccttctggagttctggaagtccctcttttagatatgatcactgagaggctggtgctggtgaagggggagatggcaggcacaaaagcaagggagaacctggcttttgtggaaaatatgcgagtgattttgctcattaaacaaatacttggcca

SEQ ID NO: 361529 - DNA, 4848 bp, Homo sapiens
gaggacgggcctttcaagagggacactggtcacaccgcccagtgtcagcagcagctgctagttctgaactgtctcactcccaggctacatcttctcacttgctaacaaggacctctgagttcagcagccatgagttcagactcagaattggctgtttttggggaggctgctcctttcctccgaaagtctgaaagggagcgcattgaggcccagaataggccctttgatgccaaaacatctgtctttgtggcggagcccaaagaatcctttgtcaaagggaccatccagagcagagaaggaggaaaagtgacggtgaagactgagggaggagcgactctgacagtgaaggatgatcaggtcttccccatgaaccctcccaaatatgacaagatcgaggatatggccatgatgactcatctgcatgagcctgctgtgctgtacaacctcaaagaacgttatgcagcctggatgatctacacctattcaggtctcttctgtgtcactgtcaacccctacaagtggctgcctgtgtataagcccgaggtggtgacagcctaccgaggcaaaaagcgccaggaggccccgccccacatcttctccatctctgacaacgcctatcagttcatgctgactgaccgagagaatcagtcaatcctgatcactggagaatctggtgcagggaagactgtgaacaccaagcgtgtcatccagtactttgcaacaattgcagttactggtgagaagaagaaggaagaaattacttctggcaaaatacaggggactctggaagatcaaatcatcagtgccaaccccctactggaggcctttggcaacgccaagaccgtgaggaatgacaactcctctcgctttggtaaattcatcagaatccactttggcactactggaaaactggcatctgctgatattgaaacatatctgctagagaagtctagagttgttttccagcttaaggctgagagaagttatcatattttttaccagattacatcgaataagaaaccagaacttattgaaatgcttctgattaccacgaacccatatgattacccatttgtcagtcaaggggagatcagtgtggccagcatcgatgatcaggaagaactgatggccacagatagtgctattgatattttgggctttactaatgaagaaaaggtctccatttacaagctcacgggggctgtgatgcattatgggaacctaaaatttaagcaaaagcagcgtgaggagcaagcagagccagatggcacagaagttgctgacaaggcggcctacctccagagtctgaactctgcagatctgctcaaagctctctgctaccccagggtcaaggtcggcaatgagtatgtcaccaaaggccagactgtagaacaggtgtccaacgcagtaggtgctctggccaaagccgtctacgagaagatgttcctgtggatggttgcccgcatcaaccagcagctggacaccaagcagcccaggcagtacttcatcggggtcttggacattgctggttttgagatttttgatttcaacagcctggagcagctgtgcatcaacttcaccaatgagaaactgcaacagtttttcaaccaccacatgttcgtgctggagcaggaggagtacaagaaggaaggcatcgagtggacgttcatcgacttcgggatggacctggctgcctgcatcgagctcatcgagaaggttggtcctatgggcatcttctccatcctggaagaggagtgcatgttccctaaggcaacagacacctccttcaagaacaagctgtatgaccagcacctgggcaagtctgccaacttccagaagcccaaggtggtcaaaggcaaggccgaggcccacttcgctctgattcactatgctggtgttgtggactacaacattactggctggctggagaagaacaaggaccccctgaatgagaccgtggttggactgtaccagaagtctgcaatgaaaactctagctcagctcttctctggggctcaaactgctgaaggagagggagctggtggaggggccaagaaaggtggtaagaagaagggctcttctttccagacagtgtctgcccttttcagagagaatttgaacaagctgatgaccaacctcaggagtacccatcctcactttgtgaggtgtatcatccccaatgagacaaaaactcctggtgccatggagcatgagcttgtcctccaccagctgaggtgtaacggtgtgctggaaggcatccgcatctgtaggaaaggatttccaagcagaatcctttatgcagacttcaaacagagatacaaggtattaaatgcaagtgcaatccctgaagggcaattcattgatagcaagaaggcctctgagaagctccttgcatccatcgacattgaccacacccagtataaatttgggcacaccaaggtctttttcaaagctggtcttctggggctcctagaggagatgcgagatgacaagctggcccagctgattacccgaacccaggccaggtgcagagggttcttggcaagagtggagtaccagaggatggtggagagaagggaggccatcttctgtatccagtacaatatcagatccttcatgaatgtcaagcactggccctggatgaaactcttcttcaagatcaagcctctgttgaagagtgcagaaactgagaaggagatggccaccatgaaggaagaatttcagaaaattaaagacgaacttgccaagtcagaggcaaaaaggaaggaactggaagaaaagatggtgacgctgttgaaagaaaaaaatgacttgcagctccaagttcaggctgaagccgaaggcttggctgatgcagaggaaaggtgtgaccagctaatcaaaaccaaaatccagctagaagccaaaatcaaagaggtgactgagagagctgaggatgaggaagagatcaatgctgagctgacagccaagaagaggaaactggaggatgaatgttcagaactcaagaaagacattgatgaccttgagctgacactggccaaggttgagaaggagaaacatgccacagaaaacaaggtgaaaaacctcacagaagagatggcaggtctggatgaaaccattgctaagctgaccaaggagaagaaggctctccaggaggcccaccagcagaccctggatgacctgcaggcagaggaggacaaagtcaacaccctgaccaaagctaaaatcaaacttgaacaacaagtggatgatcttgaagggtccttggagcaagaaaagaaacttcgcatggacctagaaagggctaagaggaaacttgagggtgacttgaagttggcccaagaatccataatggacattgaaaatgagaaacagcaacttgatgaaaagctcaaaaagaaagagtttgaaatcagcaatctgcaaagcaagattgaagatgaacaggcacttggcattcaattgcagaagaaaattaaagaattgcaagcccgcattgaggagctggaggaggaaatcgaggcggagcgggcctcccgggccaaagcagagaagcagcgctctgacctctcccgggagctggaggagatcagcgagaggctggaagaagccggtggggccacttcagcccagattgagatgaacaagaagcgggaggctgagttccagaaaatgcgcagggacctggaggaggccaccctacagcatgaagccacagcggccaccctgaggaagaagcatgcagatagtgtggccgagcttggggagcagattgacaacctgcagcgagtgaagcagaagctggagaaggagaagagtgagatgaagatggagattgatgaccttgctagtaatgtagaaacggtctccaaagccaagggaaacctagagaaaatgtgccggactctagaggaccaactgagtgaactgaaatcaaaggaagaggagcagcagcggctgatcaatgacctgactgcgcagagggggcgcctgcagactgaatctggtgagttttcacgccagcttgatgaaaaggaagctctggtgtctcagttatcaagaggcaaacaagcctttactcaacagattgaagaattaaagaggcaacttgaagaggagataaaagccaagaacgccctggcgcatgccctgcagtcttcccgccacgactgtgacctgctgcgggaacagtatgaggaggagcaggaatccaaggccgagctgcagagagcactgtccaaggccaacaccgaggttgcccaatggaggaccaaatacgagacggacgccatccagcgcacagaggagctggaggaggccaagaagaagctggcccagcggctgcaggcagctgaggaacatgtagaagctgtgaacgccaaatgtgcttccctcgaaaagacgaagcagcggctgcagaatgaggtcgaggacctcatgcttgatgtggagaggacaaatgccgcctgtgccgcccttgacaaaaagcaaaggaacttcgataagatcctggcagaatggaaacagaaatgtgaggaaacgcatgctgagcttgaggcctcccagaaggaagcccgttcccttggcactgagctgttcaagataaagaatgcctatgaggaatctttggatcagctagaaaccctgaagcgagagaacaaaaacttacagcaggagatttctgacctcacggaacagattgcagaaggagggaaacgtatccatgaactggagaaaataaagaaacaagtggaacaagaaaagtgtgaacttcaggctgctttagaagaagcagaggtcactataatcacttcacaagtatggtacatatttggaagtgatgtcacg

SEQ ID NO: 361530 - DNA, 207 bp, Homo sapiens
gaggacgggcctttcaagagggacactggtcacaccgcccagtgtcagcagcagctgctagttctggtactgctccttctggaactgcacgttttacctctatgaattttgttacttctgtttacaatagcaagccatgccataaatgggattttttccccctctttttggtcaactaatcaagtgcttttcccttttcttttatag

SEQ ID NO: 361531 - DNA, 6063 bp, Homo sapiens
ggtcctgctttaaaaagctccaagaactgtctcactcccaggctacatcttctcacttgctaacaaggacctctgagttcagcagccatgagttcagactcagaattggctgtttttggggaggctgctcctttcctccgaaagtctgaaagggagcgcattgaggcccagaataggccctttgatgccaaaacatctgtctttgtggcggagcccaaagaatcctttgtcaaagggaccatccagagcagagaaggaggaaaagtgacggtgaagactgagggaggagcgactctgacagtgaaggatgatcaggtcttccccatgaaccctcccaaatatgacaagatcgaggatatggccatgatgactcatctgcatgagcctgctgtgctgtacaacctcaaagaacgttatgcagcctggatgatctacacctattcaggtctcttctgtgtcactgtcaacccctacaagtggctgcctgtgtataagcccgaggtggtgacagcctaccgaggcaaaaagcgccaggaggccccgccccacatcttctccatctctgacaacgcctatcagttcatgctgactgaccgagagaatcagtcaatcctgatcactggagaatctggtgcagggaagactgtgaacaccaagcgtgtcatccagtactttgcaacaattgcagttactggtgagaagaagaaggaagaaattacttctggcaaaatacaggggactctggaagatcaaatcatcagtgccaaccccctactggaggcctttggcaacgccaagaccgtgaggaatgacaactcctctcgctttggtaaattcatcagaatccactttggcactactggaaaactggcatctgctgatattgaaacatatctgctagagaagtctagagttgttttccagcttaaggctgagagaagttatcatattttttaccagattacatcgaataagaaaccagaacttattgaaatgcttctgattaccacgaacccatatgattacccatttgtcagtcaaggggagatcagtgtggccagcatcgatgatcaggaagaactgatggccacagatagtgctattgatattttgggctttactaatgaagaaaaggtctccatttacaagctcacgggggctgtgatgcattatgggaacctaaaatttaagcaaaagcagcgtgaggagcaagcagagccagatggcacagaagttgctgacaaggcggcctacctccagagtctgaactctgcagatctgctcaaagctctctgctaccccagggtcaaggtcggcaatgagtatgtcaccaaaggccagactgtagaacaggtgtccaacgcagtaggtgctctggccaaagccgtctacgagaagatgttcctgtggatggttgcccgcatcaaccagcagctggacaccaagcagcccaggcagtacttcatcggggtcttggacattgctggttttgagatttttgatttcaacagcctggagcagctgtgcatcaacttcaccaatgagaaactgcaacagtttttcaaccaccacatgttcgtgctggagcaggaggagtacaagaaggaaggcatcgagtggacgttcatcgacttcgggatggacctggctgcctgcatcgagctcatcgagaaggttggtcctatgggcatcttctccatcctggaagaggagtgcatgttccctaaggcaacagacacctccttcaagaacaagctgtatgaccagcacctgggcaagtctgccaacttccagaagcccaaggtggtcaaaggcaaggccgaggcccacttcgctctgattcactatgctggtgttgtggactacaacattactggctggctggagaagaacaaggaccccctgaatgagaccgtggttggactgtaccagaagtctgcaatgaaaactctagctcagctcttctctggggctcaaactgctgaaggagagggagctggtggaggggccaagaaaggtggtaagaagaagggctcttctttccagacagtgtctgcccttttcagagagaatttgaacaagctgatgaccaacctcaggagtacccatcctcactttgtgaggtgtatcatccccaatgagacaaaaactcctggtgccatggagcatgagcttgtcctccaccagctgaggtgtaacggtgtgctggaaggcatccgcatctgtaggaaaggatttccaagcagaatcctttatgcagacttcaaacagagatacaaggtattaaatgcaagtgcaatccctgaagggcaattcattgatagcaagaaggcctctgagaagctccttgcatccatcgacattgaccacacccagtataaatttgggcacaccaaggtctttttcaaagctggtcttctggggctcctagaggagatgcgagatgacaagctggcccagctgattacccgaacccaggccaggtgcagagggttcttggcaagagtggagtaccagaggatggtggagagaagggaggccatcttctgtatccagtacaatatcagatccttcatgaatgtcaagcactggccctggatgaaactcttcttcaagatcaagcctctgttgaagagtgcagaaactgagaaggagatggccaccatgaaggaagaatttcagaaaattaaagacgaacttgccaagtcagaggcaaaaaggaaggaactggaagaaaagatggtgacgctgttgaaagaaaaaaatgacttgcagctccaagttcaggctgaagccgaaggcttggctgatgcagaggaaaggtgtgaccagctaatcaaaaccaaaatccagctagaagccaaaatcaaagaggtgactgagagagctgaggatgaggaagagatcaatgctgagctgacagccaagaagaggaaactggaggatgaatgttcagaactcaagaaagacattgatgaccttgagctgacactggccaaggttgagaaggagaaacatgccacagaaaacaaggtgaaaaacctcacagaagagatggcaggtctggatgaaaccattgctaagctgaccaaggagaagaaggctctccaggaggcccaccagcagaccctggatgacctgcaggcagaggaggacaaagtcaacaccctgaccaaagctaaaatcaaacttgaacaacaagtggatgatcttgaagggtccttggagcaagaaaagaaacttcgcatggacctagaaagggctaagaggaaacttgagggtgacttgaagttggcccaagaatccataatggacattgaaaatgagaaacagcaacttgatgaaaagctcaaaaagaaagagtttgaaatcagcaatctgcaaagcaagattgaagatgaacaggcacttggcattcaattgcagaagaaaattaaagaattgcaagcccgcattgaggagctggaggaggaaatcgaggcggagcgggcctcccgggccaaagcagagaagcagcgctctgacctctcccgggagctggaggagatcagcgagaggctggaagaagccggtggggccacttcagcccagattgagatgaacaagaagcgggaggctgagttccagaaaatgcgcagggacctggaggaggccaccctacagcatgaagccacagcggccaccctgaggaagaagcatgcagatagtgtggccgagcttggggagcagattgacaacctgcagcgagtgaagcagaagctggagaaggagaagagtgagatgaagatggagattgatgaccttgctagtaatgtagaaacggtctccaaagccaagggaaacctagagaaaatgtgccggactctagaggaccaactgagtgaactgaaatcaaaggaagaggagcagcagcggctgatcaatgacctgactgcgcagagggggcgcctgcagactgaatctggtgagttttcacgccagcttgatgaaaaggaagctctggtgtctcagttatcaagaggcaaacaagcctttactcaacagattgaagaattaaagaggcaacttgaagaggagataaaagccaagaacgccctggcgcatgccctgcagtcttcccgccacgactgtgacctgctgcgggaacagtatgaggaggagcaggaatccaaggccgagctgcagagagcactgtccaaggccaacaccgaggttgcccaatggaggaccaaatacgagacggacgccatccagcgcacagaggagctggaggaggccaagaagaagctggcccagcggctgcaggcagctgaggaacatgtagaagctgtgaacgccaaatgtgcttccctcgaaaagacgaagcagcggctgcagaatgaggtcgaggacctcatgcttgatgtggagaggacaaatgccgcctgtgccgcccttgacaaaaagcaaaggaacttcgataagatcctggcagaatggaaacagaaatgtgaggaaacgcatgctgagcttgaggcctcccagaaggaagcccgttcccttggcactgagctgttcaagataaagaatgcctatgaggaatctttggatcagctagaaaccctgaagcgagagaacaaaaacttacagcaggagatttctgacctcacggaacagattgcagaaggagggaaacgtatccatgaactggagaaaataaagaaacaagtggaacaagaaaagtgtgaacttcaggctgctttagaagaagcagaggcatctcttgaacatgaagagggaaagatcctgcgcatccagcttgagttgaaccaagtcaagtctgaggttgataggaaaattgctgaaaaagatgaggaaattgaccagctgaagagaaaccacattagaatcgtggagtccatgcagagcacgctggatgctgagatcaggagtaggaatgatgccattaggctcaagaagaagatggagggagacctcaatgaaatggaaatccagctgaaccatgccaaccgcatggctgctgaggccctgaggaactacaggaacacccaaggcatcctcaaggatacccagatccacctggatgatgctctccggagccaggaggacctgaaggaacagctggccatggtggagcgcagagccaacctgctgcaggctgagatcgaggagctgcgggccactctggaacagacagagaggagcagaaaaatcgcagaacaggagctcctggatgccagtgagcgtgttcagctactgcacacccagaacaccagcctgatcaacaccaagaagaagctggagacagatatttcccaaatgcaaggagagatggaggacattctccaggaagcccgcaatgcagaagaaaaggccaagaaggccatcactgatgccgccatgatggctgaggagctgaagaaggagcaggacaccagcgcccacctggagcggatgaagaagaacatggagcagaccgtgaaggatctgcagctccgtctggatgaggctgagcagctggccctgaagggtgggaagaagcagatccagaaactggaggccagggtacgggagctggaaggagaggttgagagtgagcaaaagcgtaatgctgaggctgtcaaaggtctgcgcaaacatgagaggcgagtgaaggaactcacttaccagacggaagaagatagaaagaatattctcaggcttcaagatttggtagataaacttcaggcaaaagtgaaatcttataagagacaagctgaggaggctgaggaacaatccaacaccaatctagctaaattccgcaagctccagcatgagctggaggaggccgaggaacgggctgacattgctgagtcccaggtgaacaaactgcgggtgaagagccgggaggttcacacaaaagtcataagtgaagagtgatcatgtcctgatgccatggaatgactgaagacaggcacaaaatgtgacatctttggtcatttccctctgtaattattgtgtattctaccctgttgcaaaggaaataaagcatagggtagtttgcaaacaataaaaaaaaaaaag

SEQ ID NO: 361532 - DNA, 2739 bp, Homo sapiens
catggcggccgccagcggctacacggacctgcgtgagaagctcaagtccatgacgtcccgggacaactataaggcgggcagccgggaggccgccgccgctgccgcagccgccgtagccgccgcagccgcagccgccgctgccgccgaaccttaccctgtgtccggggccaagcgcaagtatcaggaggactcggaccccgagcgcagcgactatgaggagcagcagctgcagaaggaggaggaggcgcgcaaggtgaagagcggcatccgccagatgcgcctcttcagccaggacgagtgcgccaagatcgaggcccgcattgacgaggtggtgtcccgcgctgagaagggcctgtacaacgagcacacggtggaccgggccccactgcgcaacaagtacttcttcggcgaaggctacacttacggcgcccagctgcagaagcgcgggcccggccaggagcgcctctacccgccgggcgacgtggacgagatccccgagtgggtgcaccagctggtgatccaaaagctggtggagcaccgcgtcatccccgagggcttcgtcaacagcgccgtcatcaacgactaccagcccggcggctgcatcgtgtctcacgtggaccccatccacatcttcgagcgccccatcgtgtccgtgtccttctttagcgactctgcgctgtgcttcggctgcaagttccagttcaagcctattcgggtgtcggaaccagtgctttccctgccggtgcgcaggggaagcgtgactgtgctcagtggatatgctgctgatgaaatcactcactgcatacggcctcaggacatcaaggagcgccgagcagtcatcatcctcaggaagacaagattagatgcaccccggttggaaacaaagtccctgagcagctccgtgttaccacccagctatgcttcagatcgcctgtcaggaaacaacagggaccctgctctgaaacccaagcggtcccaccgcaaggcagaccctgatgctgcccacaggccacggatcctggagatggacaaggaagagaaccggcgctcggtgctgctgcccacacaccggcggaggggtagcttcagctctgagaactactggcgcaagtcatacgagtcctcagaggactgctctgaggcagcaggcagccctgcccgaaaggtgaagatgcggcggcactgagtctacccgccgccctcctgggaactctggctcatccttacgtagttgcccctccttttgttttgagggttttgtttttgttcattggggggtttttgttttttgttttttgttttttttgattctatatatttttccttggttttgttgcctgttaaggctgaagaatagaattggccaggacctaggttctcatattcttggtattcctcctggatggaaaggctgttggcatcaataggggacagaggctgatgctggagtggccagtagaggtggtggagcagagcagccatcttttaagtggggctgtatcaggctgggtttatttaaaagcaacaaaatgttttggttaagaaaattattttgctttcagtgtaaatcttcgcagtgttctaaacaaagttcagtcttctgctcgcccctttccctcactgatgtctgcacttggttgaggtctcctggagcctcacaggctctgctgttctccacttctcacctgccatccacgccctgcaagctcatgcaaacaccctttcttcctcctgcggcagagttgttcaggttgcctgggcaggggcttaaacagtgccagcccctgccatcccaaagctattgttaagccccccaggcgtcctccacccacgcccactagcctgccatgtccacagttccttgggctgctgaggggctagtgcagtggtcctgacctctcttatcaagagcacacttctttgctggttgctccttttgagcatatgcgtgtgattatttggaacagttagacttgccacgttgggtcagttttagaaattgtttctagctagagggactggtgtccttccaagtctagcatttggggtatggaaaattgttgtggtgtgtggtagggtttttgttttcttttttgagttttttttccccctttagtctcctggctttttcctttcccttcccttctccactggccagcttgggcctcatcctcatgtcatccttctaggaaggcgcctgccccatcttgtctgccggcagcatgcatccaaggccagagctcaggcctgcagactgggctggtgcctcctccgcttcagggtatgggagttggtgaaggggctttcaaaaaataataagaaaaaaaaggtaaagtctttggtagcttctatccactcagatcctggaaggcagcaaggttttgtggatctagattcattaggaatgtcttcttgtcagccaggccaggacccgggcttgccaagagcagaggccctcccagcaaccaggataccaccactttgggggctttgtgtacagaggtccgggtctgagacctcataggctgcagaaatctggggcagccaccatcaagaagcccctctcaggggccagaactcctttgccagcgtggatttctcaagtcgggactgcataattaaagcagttgcagttttattttttttacagcttttttcccaaaaatgatttgtagttgtgtgtgcagcacttcgccctgatatgtgtgctctacaataaaaaccaaatctaatatattt

SEQ ID NO: 361533 - DNA, 4963 bp, Homo sapiens
catgttggccaggctggtcttgaactcctgacctcagatgaaccacccaccttggcctcccaaagtgctgggactacaagcatgagccaccgtgcctggcaaaaatatcaaatttttaatttattttaattaaattgctgacaaggcggcctacctccagagtctgaactctgcagatctgctcaaagctctctgctaccccagggtcaaggtcggcaatgagtatgtcaccaaaggccagactgtagaacaggtgtccaacgcagtaggtgctctggccaaagccgtctacgagaagatgttcctgtggatggttgcccgcatcaaccagcagctggacaccaagcagcccaggcagtacttcatcggggtcttggacattgctggttttgagatttttgatttcaacagcctggagcagctgtgcatcaacttcaccaatgagaaactgcaacagtttttcaaccaccacatgttcgtgctggagcaggaggagtacaagaaggaaggcatcgagtggacgttcatcgacttcgggatggacctggctgcctgcatcgagctcatcgagaaggttggtcctatgggcatcttctccatcctggaagaggagtgcatgttccctaaggcaacagacacctccttcaagaacaagctgtatgaccagcacctgggcaagtctgccaacttccagaagcccaaggtggtcaaaggcaaggccgaggcccacttcgctctgattcactatgctggtgttgtggactacaacattactggctggctggagaagaacaaggaccccctgaatgagaccgtggttggactgtaccagaagtctgcaatgaaaactctagctcagctcttctctggggctcaaactgctgaaggagagggagctggtggaggggccaagaaaggtggtaagaagaagggctcttctttccagacagtgtctgcccttttcagagagaatttgaacaagctgatgaccaacctcaggagtacccatcctcactttgtgaggtgtatcatccccaatgagacaaaaactcctggtgccatggagcatgagcttgtcctccaccagctgaggtgtaacggtgtgctggaaggcatccgcatctgtaggaaaggatttccaagcagaatcctttatgcagacttcaaacagagatacaaggtattaaatgcaagtgcaatccctgaagggcaattcattgatagcaagaaggcctctgagaagctccttgcatccatcgacattgaccacacccagtataaatttgggcacaccaaggtctttttcaaagctggtcttctggggctcctagaggagatgcgagatgacaagctggcccagctgattacccgaacccaggccaggtgcagagggttcttggcaagagtggagtaccagaggatggtggagagaagggaggccatcttctgtatccagtacaatatcagatccttcatgaatgtcaagcactggccctggatgaaactcttcttcaagatcaagcctctgttgaagagtgcagaaactgagaaggagatggccaccatgaaggaagaatttcagaaaattaaagacgaacttgccaagtcagaggcaaaaaggaaggaactggaagaaaagatggtgacgctgttgaaagaaaaaaatgacttgcagctccaagttcaggctgaagccgaaggcttggctgatgcagaggaaaggtgtgaccagctaatcaaaaccaaaatccagctagaagccaaaatcaaagaggtgactgagagagctgaggatgaggaagagatcaatgctgagctgacagccaagaagaggaaactggaggatgaatgttcagaactcaagaaagacattgatgaccttgagctgacactggccaaggttgagaaggagaaacatgccacagaaaacaaggtgaaaaacctcacagaagagatggcaggtctggatgaaaccattgctaagctgaccaaggagaagaaggctctccaggaggcccaccagcagaccctggatgacctgcaggcagaggaggacaaagtcaacaccctgaccaaagctaaaatcaaacttgaacaacaagtggatgatcttgaagggtccttggagcaagaaaagaaacttcgcatggacctagaaagggctaagaggaaacttgagggtgacttgaagttggcccaagaatccataatggacattgaaaatgagaaacagcaacttgatgaaaagctcaaaaagaaagagtttgaaatcagcaatctgcaaagcaagattgaagatgaacaggcacttggcattcaattgcagaagaaaattaaagaattgcaagcccgcattgaggagctggaggaggaaatcgaggcggagcgggcctcccgggccaaagcagagaagcagcgctctgacctctcccgggagctggaggagatcagcgagaggctggaagaagccggtggggccacttcagcccagattgagatgaacaagaagcgggaggctgagttccagaaaatgcgcagggacctggaggaggccaccctacagcatgaagccacagcggccaccctgaggaagaagcatgcagatagtgtggccgagcttggggagcagattgacaacctgcagcgagtgaagcagaagctggagaaggagaagagtgagatgaagatggagattgatgaccttgctagtaatgtagaaacggtctccaaagccaagggaaacctagagaaaatgtgccggactctagaggaccaactgagtgaactgaaatcaaaggaagaggagcagcagcggctgatcaatgacctgactgcgcagagggggcgcctgcagactgaatctggtgagttttcacgccagcttgatgaaaaggaagctctggtgtctcagttatcaagaggcaaacaagcctttactcaacagattgaagaattaaagaggcaacttgaagaggagataaaagccaagaacgccctggcgcatgccctgcagtcttcccgccacgactgtgacctgctgcgggaacagtatgaggaggagcaggaatccaaggccgagctgcagagagcactgtccaaggccaacaccgaggttgcccaatggaggaccaaatacgagacggacgccatccagcgcacagaggagctggaggaggccaagaagaagctggcccagcggctgcaggcagctgaggaacatgtagaagctgtgaacgccaaatgtgcttccctcgaaaagacgaagcagcggctgcagaatgaggtcgaggacctcatgcttgatgtggagaggacaaatgccgcctgtgccgcccttgacaaaaagcaaaggaacttcgataagatcctggcagaatggaaacagaaatgtgaggaaacgcatgctgagcttgaggcctcccagaaggaagcccgttcccttggcactgagctgttcaagataaagaatgcctatgaggaatctttggatcagctagaaaccctgaagcgagagaacaaaaacttacagcaggagatttctgacctcacggaacagattgcagaaggagggaaacgtatccatgaactggagaaaataaagaaacaagtggaacaagaaaagtgtgaacttcaggctgctttagaagaagcagaggcatctcttgaacatgaagagggaaagatcctgcgcatccagcttgagttgaaccaagtcaagtctgaggttgataggaaaattgctgaaaaagatgaggaaattgaccagctgaagagaaaccacattagaatcgtggagtccatgcagagcacgctggatgctgagatcaggagtaggaatgatgccattaggctcaagaagaagatggagggagacctcaatgaaatggaaatccagctgaaccatgccaaccgcatggctgctgaggccctgaggaactacaggaacacccaaggcatcctcaaggatacccagatccacctggatgatgctctccggagccaggaggacctgaaggaacagctggccatggtggagcgcagagccaacctgctgcaggctgagatcgaggagctgcgggccactctggaacagacagagaggagcagaaaaatcgcagaacaggagctcctggatgccagtgagcgtgttcagctactgcacacccagaacaccagcctgatcaacaccaagaagaagctggagacagatatttcccaaatgcaaggagagatggaggacattctccaggaagcccgcaatgcagaagaaaaggccaagaaggccatcactgatgccgccatgatggctgaggagctgaagaaggagcaggacaccagcgcccacctggagcggatgaagaagaacatggagcagaccgtgaaggatctgcagctccgtctggatgaggctgagcagctggccctgaagggtgggaagaagcagatccagaaactggaggccagggtacgggagctggaaggagaggttgagagtgagcaaaagcgtaatgctgaggctgtcaaaggtctgcgcaaacatgagaggcgagtgaaggaactcacttaccagacggaagaagatagaaagaatattctcaggcttcaagatttggtagataaacttcaggcaaaagtgaaatcttataagagacaagctgaggaggctgaggaacaatccaacaccaatctagctaaattccgcaagctccagcatgagctggaggaggccgaggaacgggctgacattgctgagtcccaggtgaacaaactgcgggtgaagagccgggaggttcacacaaaagtcataagtgaagagtgatcatgtcctgatgccatggaatgactgaagacaggcacaaaatgtgacatctttggtcatttccctctgtaattattgtgtattctaccctgttgcaaaggaaataaagcatagggtagtttgcaaacaataaaaaaaaaaaag

SEQ ID NO: 361534 - DNA, 1650 bp, Homo sapiens
  misc_feature (10)..(10): n is a, c, g, or t
agctttgganaaatttattgaaacatacaggcggctgttagcagagaaatcatcctggcagaatggaaacagaaatgtgaggaaacgcatgctgagcttgaggcctcccagaaggaagcccgttcccttggcactgagctgttcaagataaagaatgcctatgaggaatctttggatcagctagaaaccctgaagcgagagaacaaaaacttacagcaggagatttctgacctcacggaacagattgcagaaggagggaaacgtatccatgaactggagaaaataaagaaacaagtggaacaagaaaagtgtgaacttcaggctgctttagaagaagcagaggcatctcttgaacatgaagagggaaagatcctgcgcatccagcttgagttgaaccaagtcaagtctgaggttgataggaaaattgctgaaaaagatgaggaaattgaccagctgaagagaaaccacattagaatcgtggagtccatgcagagcacgctggatgctgagatcaggagtaggaatgatgccattaggctcaagaagaagatggagggagacctcaatgaaatggaaatccagctgaaccatgccaaccgcatggctgctgaggccctgaggaactacaggaacacccaaggcatcctcaaggatacccagatccacctggatgatgctctccggagccaggaggacctgaaggaacagctggccatggtggagcgcagagccaacctgctgcaggctgagatcgaggagctgcgggccactctggaacagacagagaggagcagaaaaatcgcagaacaggagctcctggatgccagtgagcgtgttcagctactgcacacccagaacaccagcctgatcaacaccaagaagaagctggagacagatatttcccaaatgcaaggagagatggaggacattctccaggaagcccgcaatgcagaagaaaaggccaagaaggccatcactgatgccgccatgatggctgaggagctgaagaaggagcaggacaccagcgcccacctggagcggatgaagaagaacatggagcagaccgtgaaggatctgcagctccgtctggatgaggctgagcagctggccctgaagggtgggaagaagcagatccagaaactggaggccagggtacgggagctggaaggagaggttgagagtgagcaaaagcgtaatgctgaggctgtcaaaggtctgcgcaaacatgagaggcgagtgaaggaactcacttaccagacggaagaagatagaaagaatattctcaggcttcaagatttggtagataaacttcaggcaaaagtgaaatcttataagagacaagctgaggaggctgaggaacaatccaacaccaatctagctaaattccgcaagctccagcatgagctggaggaggccgaggaacgggctgacattgctgagtcccaggtgaacaaactgcgggtgaagagccgggaggttcacacaaaagtcataagtgaagagtgatcatgtcctgatgccatggaatgactgaagacaggcacaaaatgtgacatctttggtcatttccctctgtaattattgtgtattctaccctgttgcaaaggaaataaagcatagggtagtttgcaaacaataaaaaaaaaaaag

SEQ ID NO: 361535 - DNA, 3172 bp, Homo sapiens
catggcggccgccagcggctacacggacctgcgtgagaagctcaagtccatgacgtcccgggacaactataaggcgggcagccgggaggccgccgccgctgccgcagccgccgtagccgccgcagccgcagccgccgctgccgccgaaccttaccctgtgtccggggccaagcgcaagtatcaggaggactcggaccccgagcgcagcgactatgaggagcagcagctgcagaaggaggaggaggcgcgcaaggtgaagagcggcatccgccagatgcgcctcttcagccaggacgagtgcgccaagatcgaggcccgcattgacgaggtggtgtcccgcgctgagaagggcctgtacaacgagcacacggtggaccgggccccactgcgcaacaagtacttcttcggcgaaggctacacttacggcgcccagctgcagaagcgcgggcccggccaggagcgcctctacccgccgggcgacgtggacgagatccccgagtgggtgcaccagctggtgatccaaaagctggtggagcaccgcgtcatccccgagggcttcgtcaacagcgccgtcatcaacgactaccagcccggcggctgcatcgtgtctcacgtggaccccatccacatcttcgagcgccccatcgtgtccgtgtccttctttagcgactctgcgctgtgcttcggctgcaagttccagttcaagcctattcgggtgtcggaaccagtgctttccctgccggtgcgcaggggaagcgtgactgtgctcagtggatatgctgctgatgaaatcactcactgcatacggcctcaggacatcaaggagcgccgagcagtcatcatcctcaggaagacaagattagatgcaccccggttggaaacaaagtccctgagcagctccgtgttaccacccagctatgcttcagatcgcctgtcaggaaacaacagggaccctgctctgaaacccaagcggtcccaccgcaaggcagaccctgatgctgcccacaggccacggatcctggagatggacaaggaagagaaccggcgctcggtgctgctgcccacacaccggcggaggggtagcttcagctctgagaactactggcgcaagtcatacgagtcctcagaggactgctctgaggcagcaggcagccctgcccgaaaggtgaagatgcggcggcactgagtctacccgccgccctcctgggaactctggctcatccttacgtagttgcccctccttttgttttgagggttttgtttttgttcattggggggtttttgttttttgttttttgttttttttgattctatatatttttccttggttttgttgcctgttaaggctgaagaatagaattggccaggacctaggttctcatattcttggtattcctcctggatggaaaggctgttggcatcaataggggacagaggctgatgctggagtggccagtagaggtggtggagcagagcagccatcttttaagtggggctgtatcaggctgggtttatttaaaagcaacaaaatgttttggttaagaaaattattttgctttcagtgtaaatcttcgcagtgttctaaacaaagttcagtcttctgctcgcccctttccctcactgatgtctgcacttggttgaggtctcctggagcctcacaggctctgctgttctccacttctcacctgccatccacgccctgcaagctcatgcaaacaccctttcttcctcctgcggcagagttgttcaggttgcctgggcaggggcttaaacagtgccagcccctgccatcccaaagctattgttaagccccccaggcgtcctccacccacgcccactagcctgccatgtccacagttccttgggctgctgaggggctagtgcagtggtcctgacctctcttatcaagagcacacttctttgctggttgctccttttgagcatatgcgtgtgattatttggaacagttagacttgccacgttgggtcagttttagaaattgtttctagctagagggactggtgtccttccaagtctagcatttggggtatggaaaattgttgtggtgtgtggtagggtttttgttttcttttttgagttttttttccccctttagtctcctggctttttcctttcccttcccttctccactggccagcttgggcctcatcctcatgtcatccttctaggaaggcgcctgccccatcttgtctgccggcagcatgcatccaaggccagagctcaggcctgcagactgggctggtgcctcctccgcttcagggtatgggagttggtgaaggggctttcaaaaaataataagaaaaaaaaggtaaagtctttggtagcttctatccactcagatcctggaaggcagcaaggttttgtggatctagattcattaggaatgtcttcttgtcagccaggccaggacccgggcttgccaagagcagaggccctcccagcaaccaggataccaccactttgggggctttgtgtacagaggtccgggtctgagacctcataggctgcagaaatctggggcagccaccatcaagaagcccctctcaggggccagaactcctttgccagcgtggatttctcaagtcgggactgcataattaaagcagttgcagttttattttttttacagcttttttcccaaaaatgatttgtagttgtgtgtgcagcacttcgccctgatatgtgtgctctacaataaaaaccaaatctaatatattttggaaacagttgtctgatgttgttgtaagagagggcttgcctttggtgcttccttaatccctttactttcttaaacttgaaacaggggttggggaggcagagctagctcattggccgccagcgtcccagaggagttggttggtcttggacactgggcctcctgtgtgcctagccttggatttatggctgaaggtggacttgccctcaccccactgtcctttctcccactccaaggagggtgaacttcataaaccacaatgtccaggtgcccagggaccacaccttctggagttctggaagtccctcttttagatatgatcactgagaggctggtgctggtgaagggggagatggcaggcacaaaagcaagggagaacctggcttttgtggaaaatatgcgagtgattttgctcattaaacaaatacttggcca

SEQ ID NO: 361536 - DNA, 1361 bp, Homo sapiens
  misc_feature (7)..(7): n is a, c, g, or t
  misc_feature (13)..(13): n is a, c, g, or t
  misc_feature (16)..(16): n is a, c, g, or t
gattctngagganccncacctcctaccccacgatcaagagcacacttctttgctggttgctccttttgagcatatgcgtgtgattatttggaacagttagacttgccacgttgggtcagttttagaaattgtttctagctagagggactggtgtccttccaagtctagcatttggggtatggaaaattgttgtggtgtgtggtagggtttttgttttcttttttgagttttttttccccctttagtctcctggctttttcctttcccttcccttctccactggccagcttgggcctcatcctcatgtcatccttctaggaaggcgcctgccccatcttgtctgccggcagcatgcatccaaggccagagctcaggcctgcagactgggctggtgcctcctccgcttcagggtatgggagttggtgaaggggctttcaaaaaataataagaaaaaaaaggtaaagtctttggtagcttctatccactcagatcctggaaggcagcaaggttttgtggatctagattcattaggaatgtcttcttgtcagccaggccaggacccgggcttgccaagagcagaggccctcccagcaaccaggataccaccactttgggggctttgtgtacagaggtccgggtctgagacctcataggctgcttgagattattcagctaggaaggccatcactgatgccgccatgatggctgaggagctgaagaaggagcaggacaccagcgcccacctggagcggatgaagaagaacatggagcagaccgtgaaggatctgcagctccgtctggatgaggctgagcagctggccctgaagggtgggaagaagcagatccagaaactggaggccagggtacgggagctggaaggagaggttgagagtgagcaaaagcgtaatgctgaggctgtcaaaggtctgcgcaaacatgagaggcgagtgaaggaactcacttaccagacggaagaagatagaaagaatattctcaggcttcaagatttggtagataaacttcaggcaaaagtgaaatcttataagagacaagctgaggaggctgaggaacaatccaacaccaatctagctaaattccgcaagctccagcatgagctggaggaggccgaggaacgggctgacattgctgagtcccaggtgaacaaactgcgggtgaagagccgggaggttcacacaaaagtcataagtgaagagtgatcatgtcctgatgccatggaatgactgaagacaggcacaaaatgtgacatctttggtcatttccctctgtaattattgtgtattctaccctgttgcaaaggaaataaagcatagggtagtttgcaaacaataaaaaaaaaaaag

SEQ ID NO: 361537 - DNA, 2700 bp, Homo sapiens
catggcggccgccagcggctacacggacctgcgtgagaagctcaagtccatgacgtcccgggacaactataaggcgggcagccgggaggccgccgccgctgccgcagccgccgtagccgccgcagccgcagccgccgctgccgccgaaccttaccctgtgtccggggccaagcgcaagtatcaggaggactcggaccccgagcgcagcgactatgaggagcagcagctgcagaaggaggaggaggcgcgcaaggtgaagagcggcatccgccagatgcgcctcttcagccaggacgagtgcgccaagatcgaggcccgcattgacgaggtggtgtcccgcgctgagaagggcctgtacaacgagcacacggtggaccgggccccactgcgcaacaagtacttcttcggcgaaggctacacttacggcgcccagctgcagaagcgcgggcccggccaggagcgcctctacccgccgggcgacgtggacgagatccccgagtgggtgcaccagctggtgatccaaaagctggtggagcaccgcgtcatccccgagggcttcgtcaacagcgccgtcatcaacgactaccagcccggcggctgcatcgtgtctcacgtggaccccatccacatcttcgagcgccccatcgtgtccgtgtccttctttagcgactctgcgctgtgcttcggctgcaagttccagttcaagcctattcgggtgtcggaaccagtgctttccctgccggtgcgcaggggaagcgtgactgtgctcagtggatatgctgctgatgaaatcactcactgcatacggcctcaggacatcaaggagcgccgagcagtcatcatcctcaggaagacaagattagatgcaccccggttggaaacaaagtccctgagcagctccgtgttaccacccagctatgcttcagatcgcctgtcaggaaacaacagggaccctgctctgaaacccaagcggtcccaccgcaaggcagaccctgatgctgcccacaggccacggatcctggagatggacaaggaagagaaccggcgctcggtgctgctgcccacacaccggcggaggggtagcttcagctctgagaactactggcgcaagtcatacgagtcctcagaggactgctctgaggcagcaggcagccctgcccgaaaggtgaagatgcggcggcactgagtctacccgccgccctcctgggaactctggctcatccttacgtagttgcccctccttttgttttgagggttttgtttttgttcattggggggtttttgttttttgttttttgttttttttgattctatatatttttccttggttttgttgcctgttaaggctgaagaatagaattggccaggacctaggttctcatattcttggtattcctcctggatggaaaggctgttggcatcaataggggacagaggctgatgctggagtggccagtagaggtggtggagcagagcagccatcttttaagtggggctgtatcaggctgggtttatttaaaagcaacaaaatgttttggttaagaaaattattttgctttcagtgtaaatcttcgcagtgttctaaacaaagttcagtcttctgctcgcccctttccctcactgatgtctgcacttggttgaggtctcctggagcctcacaggctctgctgttctccacttctcacctgccatccacgccctgcaagctcatgcaaacaccctttcttcctcctgcggcagagttgttcaggttgcctgggcaggggcttaaacagtgccagcccctgccatcccaaagctattgttaagccccccaggcgtcctccacccacgcccactagcctgccatgtccacagttccttgggctgctgaggggctagtgcagtggtcctgacctctcttatcaagagcacacttctttgctggttgctccttttgagcatatgcgtgtgattatttggaacagttagacttgccacgttgggtcagttttagaaattgtttctagctagagggactggtgtccttccaagtctagcatttggggtatggaaaattgttgtggtgtgtggtagggtttttgttttcttttttgagttttttttccccctttagtctcctggctttttcctttcccttcccttctccactggccagcttgggcctcatcctcatgtcatccttctaggaaggcgcctgccccatcttgtctgccggcagcatgcatccaaggccagagctcaggcctgcagactgggctggtgcctcctccgcttcagggtatgggagttggtgaaggggctttcaaaaaataataagaaaaggttttgtggatctagattcattaggaatgtcttcttgtcagccaggccaggacccgggcttgccaagagcagaggccctcccagcaaccaggataccaccactttgggggctttgtgtacagaggtccgggtctgagacctcataggctgcagaaatctggggcagccaccatcaagaagcccctctcaggggccagaactcctttgccagcgtggatttctcaagtcgggactgcataattaaagcagttgcagttttattttttttacagcttttttcccaaaaatgatttgtagttgtgtgtgcagcacttcatcctcgattgcgcgctataccactttaacccactctcctcttctctacacattctcccg

SEQ ID NO: 361538 - DNA, 4991 bp, Homo sapiens
gaggacgggcctttcaagagggacactggtcacaccgcccagtgtcagcagcagctgctagttctgaactgtctcactcccaggctacatcttctcacttgctaacaaggacctctgagttcagcagccatgagttcagactcagaattggctgtttttggggaggctgctcctttcctccgaaagtctgaaagggagcgcattgaggcccagaataggccctttgatgccaaaacatctgtctttgtggcggagcccaaagaatcctttgtcaaagggaccatccagagcagagaaggaggaaaagtgacggtgaagactgagggaggagcgactctgacagtgaaggatgatcaggtcttccccatgaaccctcccaaatatgacaagatcgaggatatggccatgatgactcatctgcatgagcctgctgtgctgtacaacctcaaagaacgttatgcagcctggatgatctacacctattcaggtctcttctgtgtcactgtcaacccctacaagtggctgcctgtgtataagcccgaggtggtgacagcctaccgaggcaaaaagcgccaggaggccccgccccacatcttctccatctctgacaacgcctatcagttcatgctgactgaccgagagaatcagtcaatcctgatcactggagaatctggtgcagggaagactgtgaacaccaagcgtgtcatccagtactttgcaacaattgcagttactggtgagaagaagaaggaagaaattacttctggcaaaatacaggggactctggaagatcaaatcatcagtgccaaccccctactggaggcctttggcaacgccaagaccgtgaggaatgacaactcctctcgctttggtaaattcatcagaatccactttggcactactggaaaactggcatctgctgatattgaaacatatctgctagagaagtctagagttgttttccagcttaaggctgagagaagttatcatattttttaccagattacatcgaataagaaaccagaacttattgaaatgcttctgattaccacgaacccatatgattacccatttgtcagtcaaggggagatcagtgtggccagcatcgatgatcaggaagaactgatggccacagatagtgctattgatattttgggctttactaatgaagaaaaggtctccatttacaagctcacgggggctgtgatgcattatgggaacctaaaatttaagcaaaagcagcgtgaggagcaagcagagccagatggcacagaagttgctgacaaggcggcctacctccagagtctgaactctgcagatctgctcaaagctctctgctaccccagggtcaaggtcggcaatgagtatgtcaccaaaggccagactgtagaacaggtgtccaacgcagtaggtgctctggccaaagccgtctacgagaagatgttcctgtggatggttgcccgcatcaaccagcagctggacaccaagcagcccaggcagtacttcatcggggtcttggacattgctggttttgagatttttgatttcaacagcctggagcagctgtgcatcaacttcaccaatgagaaactgcaacagtttttcaaccaccacatgttcgtgctggagcaggaggagtacaagaaggaaggcatcgagtggacgttcatcgacttcgggatggacctggctgcctgcatcgagctcatcgagaaggttggtcctatgggcatcttctccatcctggaagaggagtgcatgttccctaaggcaacagacacctccttcaagaacaagctgtatgaccagcacctgggcaagtctgccaacttccagaagcccaaggtggtcaaaggcaaggccgaggcccacttcgctctgattcactatgctggtgttgtggactacaacattactggctggctggagaagaacaaggaccccctgaatgagaccgtggttggactgtaccagaagtctgcaatgaaaactctagctcagctcttctctggggctcaaactgctgaaggagagggagctggtggaggggccaagaaaggtggtaagaagaagggctcttctttccagacagtgtctgcccttttcagagagaatttgaacaagctgatgaccaacctcaggagtacccatcctcactttgtgaggtgtatcatccccaatgagacaaaaactcctggtgccatggagcatgagcttgtcctccaccagctgaggtgtaacggtgtgctggaaggcatccgcatctgtaggaaaggatttccaagcagaatcctttatgcagacttcaaacagagatacaaggtattaaatgcaagtgcaatccctgaagggcaattcattgatagcaagaaggcctctgagaagctccttgcatccatcgacattgaccacacccagtataaatttgggcacaccaaggtctttttcaaagctggtcttctggggctcctagaggagatgcgagatgacaagctggcccagctgattacccgaacccaggccaggtgcagagggttcttggcaagagtggagtaccagaggatggtggagagaagggaggccatcttctgtatccagtacaatatcagatccttcatgaatgtcaagcactggccctggatgaaactcttcttcaagatcaagcctctgttgaagagtgcagaaactgagaaggagatggccaccatgaaggaagaatttcagaaaattaaagacgaacttgccaagtcagaggcaaaaaggaaggaactggaagaaaagatggtgacgctgttgaaagaaaaaaatgacttgcagctccaagttcaggctgaagccgaaggcttggctgatgcagaggaaaggtgtgaccagctaatcaaaaccaaaatccagctagaagccaaaatcaaagaggtgactgagagagctgaggatgaggaagagatcaatgctgagctgacagccaagaagaggaaactggaggatgaatgttcagaactcaagaaagacattgatgaccttgagctgacactggccaaggttgagaaggagaaacatgccacagaaaacaaggtgaaaaacctcacagaagagatggcaggtctggatgaaaccattgctaagctgaccaaggagaagaaggctctccaggaggcccaccagcagaccctggatgacctgcaggcagaggaggacaaagtcaacaccctgaccaaagctaaaatcaaacttgaacaacaagtggatgatcttgaagggtccttggagcaagaaaagaaacttcgcatggacctagaaagggctaagaggaaacttgagggtgacttgaagttggcccaagaatccataatggacattgaaaatgagaaacagcaacttgatgaaaagctcaaaaagaaagagtttgaaatcagcaatctgcaaagcaagattgaagatgaacaggcacttggcattcaattgcagaagaaaattaaagaattgcaagcccgcattgaggagctggaggaggaaatcgaggcggagcgggcctcccgggccaaagcagagaagcagcgctctgacctctcccgggagctggaggagatcagcgagaggctggaagaagccggtggggccacttcagcccagattgagatgaacaagaagcgggaggctgagttccagaaaatgcgcagggacctggaggaggccaccctacagcatgaagccacagcggccaccctgaggaagaagcatgcagatagtgtggccgagcttggggagcagattgacaacctgcagcgagtgaagcagaagctggagaaggagaagagtgagatgaagatggagattgatgaccttgctagtaatgtagaaacggtctccaaagccaagggaaacctagagaaaatgtgccggactctagaggaccaactgagtgaactgaaatcaaaggaagaggagcagcagcggctgatcaatgacctgactgcgcagagggggcgcctgcagactgaatctggtgagttttcacgccagcttgatgaaaaggaagctctggtgtctcagttatcaagaggcaaacaagcctttactcaacagattgaagaattaaagaggcaacttgaagaggagataaaagccaagaacgccctggcgcatgccctgcagtcttcccgccacgactgtgacctgctgcgggaacagtatgaggaggagcaggaatccaaggccgagctgcagagagcactgtccaaggccaacaccgaggttgcccaatggaggaccaaatacgagacggacgccatccagcgcacagaggagctggaggaggccaagaagaagctggcccagcggctgcaggcagctgaggaacatgtagaagctgtgaacgccaaatgtgcttccctcgaaaagacgaagcagcggctgcagaatgaggtcgaggacctcatgcttgatgtggagaggacaaatgccgcctgtgccgcccttgacaaaaagcaaaggaacttcgataagatcctggcagaatggaaacagaaatgtgaggaaacgcatgctgagcttgaggcctcccagaaggaagcccgttcccttggcactgagctgttcaagataaagaatgcctatgaggaatctttggatcagctagaaaccctgaagcgagagaacaaaaacttacagcaggagatttctgacctcacggaacagattgcagaaggagggaaacgtatccatgaactggagaaaataaagaaacaagtggaacaagaaaagtgtgaacttcaggctgctttagaagaagcagagtgcgggtgaagagccgggaggttcacacaaaagtcataagtgaagagtgatcatgtcctgatgccatggaatgactgaagacaggcacaaaatgtgacatctttggtcatttccctctgtaattattgtgtattctaccctgttgcaaaggaaataaagcatagggtagtttgcaaacaataaaaaaaaaaaag

SEQ ID NO: 361539 - DNA, 2934 bp, Homo sapiens
gaggacgggcctttcaagagggacactggtcacaccgcccagtgtcagcagcagctgctagttctgaactgtctcactcccaggctacatcttctcacttgctaacaaggacctctgagttcagcagccatgagttcagactcagaattggctgtttttggggaggctgctcctttcctccgaaagtctgaaagggagcgcattgaggcccagaataggccctttgatgccaaaacatctgtctttgtggcggagcccaaagaatcctttgtcaaagggaccatccagagcagagaaggaggaaaagtgacggtgaagactgagggaggagcgactctgacagtgaaggatgatcaggtcttccccatgaaccctcccaaatatgacaagatcgaggatatggccatgatgactcatctgcatgagcctgctgtgctgtacaacctcaaagaacgttatgcagcctggatgatctacacctattcaggtctcttctgtgtcactgtcaacccctacaagtggctgcctgtgtataagcccgaggtggtgacagcctaccgaggcaaaaagcgccaggaggccccgccccacatcttctccatctctgacaacgcctatcagttcatgctgactgaccgagagaatcagtcaatcctgatcactggagaatctggtgcagggaagactgtgaacaccaagcgtgtcatccagtactttgcaacaattgcagttactggtgagaagaagaaggaagaaattacttctggcaaaatacaggggactctggaagatcaaatcatcagtgccaaccccctactggaggcctttggcaacgccaagaccgtgaggaatgacaactcctctcgctttggtaaattcatcagaatccactttggcactactggaaaactggcatctgctgatattgaaacatatctgctagagaagtctagagttgttttccagcttaaggctgagagaagttatcatattttttaccagattacatcgaataagaaaccagaacttattgaaatgcttctgattaccacgaacccatatgattacccatttgtcagtcaaggggagatcagtgtggccagcatcgatgatcaggaagaactgatggccacagatagtgctattgatattttgggctttactaatgaagaaaaggtctccatttacaagctcacgggggctgtgatgcattatgggaacctaaaatttaagcaaaagcagcgtgaggagcaagcagagccagatggcacagaagttgctgacaaggcggcctacctccagagtctgaactctgcagatctgctcaaagctctctgctaccccagggtcaaggtcggcaatgagtatgtcaccaaaggccagactgtagaacaggtgtccaacgcagtaggtgctctggccaaagccgtctacgagaagatgttcctgtggatggttgcccgcatcaaccagcagctggacaccaagcagcccaggcagtacttcatcggggtcttggacattgctggttttgagatttttgatttcaacagcctggagcagctgtgcatcaacttcaccaatgagaaactgcaacagtttttcaaccaccacatgttcgtgctggagcaggaggagtacaagaaggaaggcatcgagtggacgttcatcgacttcgggatggacctggctgcctgcatcgagctcatcgagaaggttggtcctatgggcatcttctccatcctggaagaggagtgcatgttccctaaggcaacagacacctccttcaagaacaagctgtatgaccagcacctgggcaagtctgccaacttccagaagcccaaggtggtcaaaggcaaggccgaggcccacttcgctctgattcactatgctggtgttgtggactacaacattactggctggctggagaagaacaaggaccccctgaatgagaccgtggttggactgtaccagaagtctgcaatgaaaactctagctcagctcttctctggggctcaaactgctgaaggagagggagctggtggaggggccaagaaaggtggtaagaagaagggctcttctttccagacagtgtctgcccttttcagagagaatttgaacaagctgatgaccaacctcaggagtacccatcctcactttgtgaggtgtatcatccccaatgagacaaaaactcctggtgccatggagcatgagcttgtcctccaccagctgaggtgtaacggtgtgctggaaggcatccgcatctgtaggaaaggatttccaagcagaatcctttatgcagacttcaaacagagatacaaggtattaaatgcaagtgcaatccctgaagggcaattcattgatagcaagaaggcctctgagaagctccttgcatccatcgacattgaccacacccagtataaatttgggcacaccaaggtctttttcaaagctggtcttctggggctcctagaggagatgcgagatgacaagctggcccagctgattacccgaacccaggccaggtgcagagggttcttggcaagagtggagtaccagaggatggtggagagaagggaggccatcttctgtatccagtacaatatcagatccttcatgaatgtcaagcactggccctggatgaaactcttcttcaagatcaagcctctgttgaagagtgcagaaactgagaaggagatggccaccatgaaggaagaatttcagaaaattaaagacgaacttgccaagtcagaggcaaaaaggaaggaactggaagaaaagatggtgacgctgttgaaagaaaaaaatgacttgcagctccaagttcaggctgaagccgaaggcttggctgatgcagaggaaagttggaccagcatagcaaaccatagccatgcagagccttaaacaagatgggtcgagagatcgagactactt

SEQ ID NO: 361540 - DNA, 1326 bp, Homo sapiens
ctcacctctacaccttcccctcatcacctgaatgaaaaacagaccgcccttcactccttccatctgaaggacgtcctcactaccatcggggagaaggtgtgcctggaggtgagcagctgcctctccctgtgtgggtcctctcccttcaccacggacaaggagaccgtgctcaagggccagatccaggccgtggccagtcccgatgaccccattcgcaggatcatggaatctcgaatcctgaccttcttagaaacctaccttgcctcgggtcatcagaagccattgcccacagtccctgggggactcagtccagttcagagagagctggaggaagttgctattaaatttgctcgcctggtcaactataacaagatggtcttctgtccctactacgatgcaatcctgagtaagatcctcgtccgatcctaacgtgtatgcaccctacagcagcagtattactcactagccacagaatacctgttctgtactctaatgttgcattggaaaatggctatatagtacatgtctatttaacagcaccgattccaaagggaagaatattgtgtatcactgttgaaaagacttgttgagaaatccactgaattctattttgagagattgtatttatgagtgcaagtttacaaatcaaagaagcattttgttctcgagttttacaggtaacactcagctgttgtctccactcctcccccatcatgtccttccaaggaggctgggacctctctcttctgcaatctgggtagttctttcagatgcctcatgctgagctgacggccatccaagcgcaaaagagaccaagccatggcctcacctcctgccctccctcagacagccttgtccctcacccctcccttctggtatttttgttagaagggctatataacgtcttattgccattttctccccctatttattgcttcctccctgcctggcctagccagggctcccaagcccttttttctagaggagagttatttgtctctctctctttttttttttactttcttttttgtatttaaacattcttttaaccttcccccaaagatacagttattggactttaaaaagcttgttcttttatacaaaattactcctgcatctggttgagagcagttatgacttatgagatctagtgaaaggaaagtctttgactttcaagccttgaaagtcaaggaggaaatgtattgaaaaatagtttactgtaatgtgaacgaagagaaatgtctggaattcttactgaaaaattgaccctgagacaatacacagatgtgatgattgaattaaattctggaattagatttaactgtt

SEQ ID NO: 361541 - DNA, 419 bp, Homo sapiens
gcaaaaaatcactaacttttaaaataaagtatgccctcagttgaagtatgcctgggaaatctttccttggtccaaatcactgggattgatcttaccctaaacccatagtatttgtgcttttgaaagtgatttgaaactcaaatattttggtttttgcccccctccttttttttttcactgccccagcttgaagaagagagtaaaggagattgtacataaagcgttttgggattgcttgagtgtgcagctaagtgaagatcccccagcatatgaccatgctatcaaacttgtaggagaaatcaaagaggtgaggcaaagagtgaattgtgatgcttttctggtgtgttaggagtgtttattcaacttcttgtgtcaccaccagaagactttaaagaaattgaaggatcaagaagttaaag

SEQ ID NO: 361542 - DNA, 2819 bp, Homo sapiens
  misc_feature (2214)..(2214): n is a, c, g, or t
  misc_feature (2330)..(2330): n is a, c, g, or t
  misc_feature (2717)..(2717): n is a, c, g, or t
ggaccgcccgccgcgtggcgagggatgcggcctcggaggggcagaggctgaaccgcccctgcctgccgcgcatccctccggcttccgccgcggcgccagcccgcgcctgattcgcggcgggagcggcaggagggagaacgccgactccgtggcaggtgagagcgggagctggggcggaggctggcggggcccgtccgggaggcgcgcggtccaagtcgcacgcatctcttcgcctcttcccgtcggatcccatcccgggatgtcgggggcaggcgaggaagaggcggggtccgcgggcgggtggagctcacccctcgaggctgtcctctcggcgcgcccgcgtcctcccctactcccggccctgccactccctcgctggcctgaacagctgtttacaacggaatccggacgccgggcgcgagtggagctcagtgccagaggaggggattcccggcgccgggggacagagcccctttttttcttttgccgaaagaccctttctgctggggagcctcttgtgtccagcctaggcccgcgtgcagcgccgacggatgatcgtcttcttggcgaaagtgaataaacttaattgagaatgtctgaaaaccttgacaagtccaatgtaaatgaagcaggaaaatcaaaatccaatgattctgaggaaggccttgaagatgctgtggaaggtgctgatgaagccttacaaaaagcaataaagtcagactcctccagcccccaaagagtgcagagacctcactctagtcctcctcgctttgtgacagtagaagaacttctagagacagcgagaggcgtcaccaacatggctctagcccatgaaattgtagtaaatggagactttcagattaaaccagttgaattaccagaaaacagcttgaagaagagagtaaaggagattgtacataaagcgttttgggattgcttgagtgtgcagctaagtgaagatcccccagcatatgaccatgctatcaaacttgtaggagaaatcaaagagactctcttatctttcttgctgcctggtcatactagactgagaaaccagataacagaagtcttggatctggatctgataaagcaggaagcagagaatggggcgctagacatttccaagctggcagaattcattattggcatgatggggacactgtgtgcacctgctcgagatgaggaagttaagaaactaaaggacattaaggaaatagtgccccttttcagagaaattttttctgtgttggacctaatgaaagtggacatggccaactttgctatcagtagcatcaggcctcatctcatgcagcagtcagttgaatacgaaaggaagaagtttcaagagattttggagaggcaaccaaattccctggactttgtcacccagtggctggaagaagcctcagaggaccttatgactcagaagtataaacacgccctgccagtggggggaatggctgctggctctggggacatgcccaggctgagccctgttgctgtccagaattacgcttacctgaagcttctgaagtgggaccacctccagaggccgttccccgaaacagttttaatggaccagtctcgcttccacgagctccagttgcagctggaacaactgaccatcctgggggctgtgttgctggtcaccttcagcatggcagcgccaggaatttccagccaggccgactttgctgagaaactcaagatgattgtgaagattttgctaacagatatgcacctgccctccttccatctgaaggacgtcctcactaccatcggggagaaggtgtgcctggaggtgagcagctgcctctccctgtgtgggtcctctcccttcaccacggacaaggagaccgtgctcaagggccagatccaggccgtggccagtcccgatgaccccattcgcaggatcatggaatctcgaatcctgaccttcttagaaacctaccttgcctcgggtcatcagaagccattgcccacagtccctgggggactcagtccagttcagagagagctggaggaagttgctattaaatttgctcgcctggtcaactataacaagatggtcttctgtccctactacgatgcaatcctgagaaaaagatggatatcttttggcaatttctttgggtccagcaatactgatatgagtccttggaattgtaggactgattatcccatgagtctgcacattagatttccaaagaaccntgtgatagaggcaccaatgacaatacaactttgtttccaagaaccttgtaacaaagcgttgtctcttttaaacataccacttgaggcaaaaggaatcctggacaggagttttctgnagaggcgtttaaaaccctaccgaatccgcttctgctgccgtgctctgtaaatgtcatgaacaggggggacaacggctcccttttcttcatcttcatctgaatcctcgttgggccttttgacggccttgtctctccagagctgttcaatgttgatcatcggattaacacaacctcgttgataaactcttcggacagctgttattctttgattttctgcataagatcctacagcttccctgagattggataagaaatgccatcaattatattataaccaaatctcattcaacccagcaatctcactactggatatctacccaaagaacaactctatggaaaatagtatggagatttctcaaagaactaaaaattatattttagctaaancaactgtagatgtaaaaaaaaactatacaaatacttacacgccttttaggaaattgatgtaatccacccaaatctaagaaataaaatgaaatgttaatatct

SEQ ID NO: 361543 - DNA, 2117 bp, Homo sapiens
  misc_feature (1512)..(1512): n is a, c, g, or t
  misc_feature (1628)..(1628): n is a, c, g, or t
  misc_feature (2015)..(2015): n is a, c, g, or t
gcaaaaaatcactaacttttaaaataaagtatgccctcagttgaagtatgcctgggaaatctttccttggtccaaatcactgggattgatcttaccctaaacccatagtatttgtgcttttgaaagtgatttgaaactcaaatattttggtttttgcccccctccttttttttttcactgccccagcttgaagaagagagtaaaggagattgtacataaagcgttttgggattgcttgagtgtgcagctaagtgaagatcccccagcatatgaccatgctatcaaacttgtaggagaaatcaaagagactctcttatctttcttgctgcctggtcatactagactgagaaaccagataacagaagtcttggatctggatctgataaagcaggaagcagagaatggggcgctagacatttccaagctggcagaattcattattggcatgatggggacactgtgtgcacctgctcgagatgaggaagttaagaaactaaaggacattaaggaaatagtgccccttttcagagaaattttttctgtgttggacctaatgaaagtggacatggccaactttgctatcagtagcatcaggcctcatctcatgcagcagtcagttgaatacgaaaggaagaagtttcaagagattttggagaggcaaccaaattccctggactttgtcacccagtggctggaagaagcctcagaggaccttatgactcagaagtataaacacgccctgccagtggggggaatggctgctggctctggggacatgcccaggctgagccctgttgctgtccagaattacgcttacctgaagcttctgaagtgggaccacctccagaggccgttccccgaaacagttttaatggaccagtctcgcttccacgagctccagttgcagctggaacaactgaccatcctgggggctgtgttgctggtcaccttcagcatggcagcgccaggaatttccagccaggccgactttgctgagaaactcaagatgattgtgaagattttgctaacagatatgcacctgccctccttccatctgaaggacgtcctcactaccatcggggagaaggtgtgcctggaggtgagcagctgcctctccctgtgtgggtcctctcccttcaccacggacaaggagaccgtgctcaagggccagatccaggccgtggccagtcccgatgaccccattcgcaggatcatggaatctcgaatcctgaccttcttagaaacctaccttgcctcgggtcatcagaagccattgcccacagtccctgggggactcagtccagttcagagagagctggaggaagttgctattaaatttgctcgcctggtcaactataacaagatggtcttctgtccctactacgatgcaatcctgagaaaaagatggatatcttttggcaatttctttgggtccagcaatactgatatgagtccttggaattgtaggactgattatcccatgagtctgcacattagatttccaaagaaccntgtgatagaggcaccaatgacaatacaactttgtttccaagaaccttgtaacaaagcgttgtctcttttaaacataccacttgaggcaaaaggaatcctggacaggagttttctgnagaggcgtttaaaaccctaccgaatccgcttctgctgccgtgctctgtaaatgtcatgaacaggggggacaacggctcccttttcttcatcttcatctgaatcctcgttgggccttttgacggccttgtctctccagagctgttcaatgttgatcatcggattaacacaacctcgttgataaactcttcggacagctgttattctttgattttctgcataagatcctacagcttccctgagattggataagaaatgccatcaattatattataaccaaatctcattcaacccagcaatctcactactggatatctacccaaagaacaactctatggaaaatagtatggagatttctcaaagaactaaaaattatattttagctaaancaactgtagatgtaaaaaaaaactatacaaatacttacacgccttttaggaaattgatgtaatccacccaaatctaagaaataaaatgaaatgttaatatct

SEQ ID NO: 361544 - DNA, 1983 bp, Homo sapiens
tcccacctcagcctcctaaagtgctgggattacaggcatgagccaccatgcctggcttattcattatcttgtttaatcctcacaacagcctgtgaggtgggtgttgtaaatttgcctatatcaggcatctgaaactcagacacattatgacttgcctgagatccctcagttagtcattggcactactatgatttgatccaagttttatttgattccaaagttcatactttatactttatcactccaccaggacatcgattgtcccttaagtaattccgagaagcatcccttcttggtgtcaaggtaatgtgtgcagctttgtttttcacagattccctggactttgtcacccagtggctggaagaagcctcagaggaccttatgactcagaagtataaacacgccctgccagtggggggaatggctgctggctctggggacatgcccaggctgagccctgttgctgtccagaattacgcttacctgaagcttctgaagtgggaccacctccagaggccgttccccgaaacagttttaatggaccagtctcgcttccacgagctccagttgcagctggaacaactgaccatcctgggggctgtgttgctggtcaccttcagcatggcagcgccaggaatttccagccaggccgactttgctgagaaactcaagatgattgtgaagattttgctaacagatatgcacctgccctccttccatctgaaggacgtcctcactaccatcggggagaaggtgtgcctggaggtgagcagctgcctctccctgtgtgggtcctctcccttcaccacggacaaggagaccgtgctcaagggccagatccaggccgtggccagtcccgatgaccccattcgcaggatcatggaatctcgaatcctgaccttcttagaaacctaccttgcctcgggtcatcagaagccattgcccacagtccctgggggactcagtccagttcagagagagctggaggaagttgctattaaatttgctcgcctggtcaactataacaagatggtcttctgtccctactacgatgcaatcctgagtaagatcctcgtccgatcctaacgtgtatgcaccctacagcagcagtattactcactagccacagaatacctgttctgtactctaatgttgcattggaaaatggctatatagtacatgtctatttaacagcaccgattccaaagggaagaatattgtgtatcactgttgaaaagacttgttgagaaatccactgaattctattttgagagattgtatttatgagtgcaagtttacaaatcaaagaagcattttgttctcgagttttacaggtaacactcagctgttgtctccactcctcccccatcatgtccttccaaggaggctgggacctctctcttctgcaatctgggtagttctttcagatgcctcatgctgagctgacggccatccaagcgcaaaagagaccaagccatggcctcacctcctgccctccctcagacagccttgtccctcacccctcccttctggtatttttgttagaagggctatataacgtcttattgccattttctccccctatttattgcttcctccctgcctggcctagccagggctcccaagcccttttttctagaggagagttatttgtctctctctctttttttttttactttcttttttgtatttaaacattcttttaaccttcccccaaagatacagttattggactttaaaaagcttgttcttttatacaaaattactcctgcatctggttgagagcagttatgacttatgagatctagtgaaaggaaagtctttgactttcaagccttgaaagtcaaggaggaaatgtattgaaaaatagtttactgtaatgtgaacgaagagaaatgtctggaattcttactgaaaaattgaccctgagacaatacacagatgtgatgattgaattaaattctggaattagatttaactgtt

SEQ ID NO: 361545 - DNA, 413 bp, Homo sapiens
taagaggtgatggttaagctaagaactgaagcacagtaaggtttgtaaggtgaaggacaagaaacaactgaccactttcttttttgtcacagaatctcgaatcctgaccttcttagaaacctaccttgcctcgggtcatcagaagccattgcccacagtccctgggggactcagtccagttcagagagagctggaggaagttgctattaaatttgctcgcctggtcaactataacaagatggtcttctgtccctactacgatgcaatcctgagtaagatcctcgtccgatcctaacgtgtatgcaccctacagcagcagtattactcactagccacagaatacctgttctgtactctaatgttgcattggaaaatggctatatagtacatgtctatttaacagcaccgattcc

SEQ ID NO: 361546 - DNA, 3019 bp, Homo sapiens
ggaccgcccgccgcgtggcgagggatgcggcctcggaggggcagaggctgaaccgcccctgcctgccgcgcatccctccggcttccgccgcggcgccagcccgcgcctgattcgcggcgggagcggcaggagggagaacgccgactccgtggcaggtgagagcgggagctggggcggaggctggcggggcccgtccgggaggcgcgcggtccaagtcgcacgcatctcttcgcctcttcccgtcggatcccatcccgggatgtcgggggcaggcgaggaagaggcggggtccgcgggcgggtggagctcacccctcgaggctgtcctctcggcgcgcccgcgtcctcccctactcccggccctgccactccctcgctggcctgaacagctgtttacaacggaatccggacgccgggcgcgagtggagctcagtgccagaggaggggattcccggcgccgggggacagagcccctttttttcttttgccgaaagaccctttctgctggggagcctcttgtgtccagcctaggcccgcgtgcagcgccgacggatgatcgtcttcttggcgaaagtgaataaacttaattgagaatgtctgaaaaccttgacaagtccaatgtaaatgaagcaggaaaatcaaaatccaatgattctgaggaaggccttgaagatgctgtggaaggtgctgatgaagccttacaaaaagcaataaagtcagactcctccagcccccaaagagtgcagagacctcactctagtcctcctcgctttgtgacagtagaagaacttctagagacagcgagaggcgtcaccaacatggctctagcccatgaaattgtagtaaatggagactttcagattaaaccagttgaattaccagaaaacagcttgaagaagagagtaaaggagattgtacataaagcgttttgggattgcttgagtgtgcagctaagtgaagatcccccagcatatgaccatgctatcaaacttgtaggagaaatcaaagagactctcttatctttcttgctgcctggtcatactagactgagaaaccagataacagaagtcttggatctggatctgataaagcaggaagcagagaatggggcgctagacatttccaagctggcagaattcattattggcatgatggggacactgtgtgcacctgctcgagatgaggaagttaagaaactaaaggacattaaggaaatagtgccccttttcagagaaattttttctgtgttggacctaatgaaagtggacatggccaactttgctatcagtagcatcaggcctcatctcatgcagcagtcagttgaatacgaaaggaagaagtttcaagagattttggagaggcaaccaaattccctggactttgtcacccagtggctggaagaagcctcagaggaccttatgactcagaagtataaacacgccctgccagtggggggaatggctgctggctctggggacatgcccaggctgagccctgttgctgtccagaattacgcttacctgaagcttctgaagtgggaccacctccagaggccgttccccgaaacagttttaatggaccagtctcgcttccacgagctccagttgcagctggaacaactgaccatcctgggggctgtgttgctggtcaccttcagcatggcagcgccaggaatttccagccaggccgactttgctgagaaactcaagatgattgtgaagattttgctaacagatatgcacctgccctccttccatctgaaggacgtcctcactaccatcggggagaaggtgtgcctggaggtgagcagctgcctctccctgtgtgggtcctctcccttcaccacggacaaggagaccgtgctcaagggccagatccaggccgtggccagtcccgatgaccccattcgcaggatcatggaatctcgaatcctgaccttcttagaaacctaccttgcctcgggtcatcagaagccattgcccacagtccctgggggactcagtccagttcagagagagctggaggaagttgctattaaatttgctcgcctggtcaactataacaagatggtcttctgtccctactacgatgcaatcctgagtaagatcctcgtccgatcctaacgtgtatgcaccctacagcagcagtattactcactagccacagaatacctgttctgtactctaatgttgcattggaaaatggctatatagtacatgtctatttaacagcaccgattccaaagggaagaatattgtgtatcactgttgaaaagacttgttgagaaatccactgaattctattttgagagattgtatttatgagtgcaagtttacaaatcaaagaagcattttgttctcgagttttacaggtaacactcagctgttgtctccactcctcccccatcatgtccttccaaggaggctgggacctctctcttctgcaatctgggtagttctttcagatgcctcatgctgagctgacggccatccaagcgcaaaagagaccaagccatggcctcacctcctgccctccctcagacagccttgtccctcacccctcccttctggtatttttgttagaagggctatataacgtcttattgccattttctccccctatttattgcttcctccctgcctggcctagccagggctcccaagcccttttttctagaggagagttatttgtctctctctctttttttttttactttcttttttgtatttaaacattcttttaaccttcccccaaagatacagttattggactttaaaaagcttgttcttttatacaaaattactcctgcatctggttgagagcagttatgacttatgagatctagtgaaaggaaagtctttgactttcaagccttgaaagtcaaggaggaaatgtattgaaaaatagtttactgtaatgtgaacgaagagaaatgtctggaattcttactgaaaaattgaccctgagacaatacacagatgtgatgattgaattaaattctggaattagatttaactgtt

SEQ ID NO: 361547 - DNA, 2406 bp, Homo sapiens
  misc_feature (1801)..(1801): n is a, c, g, or t
  misc_feature (1917)..(1917): n is a, c, g, or t
  misc_feature (2304)..(2304): n is a, c, g, or t
ggaccgcccgccgcgtggcgagggatgcggcctcggaggggcagaggctgaaccgcccctgcctgccgcgcatccctccggcttccgccgcggcgccagcccgcgcctgattcgcggcgggagcggcaggagggagaacgccgactccgtggcaggaaagtgaataaacttaattgagaatgtctgaaaaccttgacaagtccaatgtaaatgaagcaggaaaatcaaaatccaatgattctgaggaaggccttgaagatgctgtggaaggtgctgatgaagccttacaaaaagcaataaagtcagactcctccagcccccaaagagtgcagagacctcactctagtcctcctcgctttgtgacagtagaagaacttctagagacagcgagaggcgtcaccaacatggctctagcccatgaaattgtagtaaatggagactttcagattaaaccagttgaattaccagaaaacagcttgaagaagagagtaaaggagattgtacataaagcgttttgggattgcttgagtgtgcagctaagtgaagatcccccagcatatgaccatgctatcaaacttgtaggagaaatcaaagagactctcttatctttcttgctgcctggtcatactagactgagaaaccagataacagaagtcttggatctggatctgataaagcaggaagcagagaatggggcgctagacatttccaagctggcagaattcattattggcatgatggggacactgtgtgcacctgctcgagatgaggaagttaagaaactaaaggacattaaggaaatagtgccccttttcagagaaattttttctgtgttggacctaatgaaagtggacatggccaactttgctatcagtagcatcaggcctcatctcatgcagcagtcagttgaatacgaaaggaagaagtttcaagagattttggagaggcaaccaaattccctggactttgtcacccagtggctggaagaagcctcagaggaccttatgactcagaagtataaacacgccctgccagtggggggaatggctgctggctctggggacatgcccaggctgagccctgttgctgtccagaattacgcttacctgaagcttctgaagtgggaccacctccagaggccgttccccgaaacagttttaatggaccagtctcgcttccacgagctccagttgcagctggaacaactgaccatcctgggggctgtgttgctggtcaccttcagcatggcagcgccaggaatttccagccaggccgactttgctgagaaactcaagatgattgtgaagattttgctaacagatatgcacctgccctccttccatctgaaggacgtcctcactaccatcggggagaaggtgtgcctggaggtgagcagctgcctctccctgtgtgggtcctctcccttcaccacggacaaggagaccgtgctcaagggccagatccaggccgtggccagtcccgatgaccccattcgcaggatcatggaatctcgaatcctgaccttcttagaaacctaccttgcctcgggtcatcagaagccattgcccacagtccctgggggactcagtccagttcagagagagctggaggaagttgctattaaatttgctcgcctggtcaactataacaagatggtcttctgtccctactacgatgcaatcctgagaaaaagatggatatcttttggcaatttctttgggtccagcaatactgatatgagtccttggaattgtaggactgattatcccatgagtctgcacattagatttccaaagaaccntgtgatagaggcaccaatgacaatacaactttgtttccaagaaccttgtaacaaagcgttgtctcttttaaacataccacttgaggcaaaaggaatcctggacaggagttttctgnagaggcgtttaaaaccctaccgaatccgcttctgctgccgtgctctgtaaatgtcatgaacaggggggacaacggctcccttttcttcatcttcatctgaatcctcgttgggccttttgacggccttgtctctccagagctgttcaatgttgatcatcggattaacacaacctcgttgataaactcttcggacagctgttattctttgattttctgcataagatcctacagcttccctgagattggataagaaatgccatcaattatattataaccaaatctcattcaacccagcaatctcactactggatatctacccaaagaacaactctatggaaaatagtatggagatttctcaaagaactaaaaattatattttagctaaancaactgtagatgtaaaaaaaaactatacaaatacttacacgccttttaggaaattgatgtaatccacccaaatctaagaaataaaatgaaatgttaatatct

SEQ ID NO: 361548 - DNA, 1228 bp, Homo sapiens
ggaccgcccgccgcgtggcgagggatgcggcctcggaggggcagaggctgaaccgcccctgcctgccgcgcatccctccggcttccgccgcggcgccagcccgcgcctgattcgcggcgggagcggcaggagggagaacgccgactccgtggcaggtgagagcgggagctggggcggaggctggcggggcccgtccgggaggcgcgcggtccaagtcgcacgcatctcttcgcctcttcccgtcggatcccatcccgggatgtcgggggcaggcgaggaagaggcggggtccgcgggcgggtggagctcacccctcgaggctgtcctctcggcgcgcccgcgtcctcccctactcccggccctgccactccctcgctggcctgaacagctgtttacaacggaatccggacgccgggcgcgagtggagctcagtgccagaggaggggattcccggcgccgggggacagagcccctttttttcttttgccgaaagaccctttctgctggggagcctcttgtgtccagcctaggcccgcgtgcagcgccgacggatgatcgtcttcttggcaagtgcgaggatcctcctcccctcggctctctttttagacacagtgggggttgaatggatgcgtgcgatataagcaaattaaatggttcgtggccgcatcctagagccctttaattagagttaccatttgtagaaggcctgccgtgcacaatccctcgtttcatctccccccaaaccgagcaggtaggtagctgtattttacagaggaggacactgaagttacacagctagtaaagagccagaactggggcccaggtatgtctgaaaccaacgcccagcctcccagatacagtgacatcacagagatgacgtagggattcatctctatcaacagatacttgtgggtgtctatttgggggatatacagatggagcataagtggggaatatgactggtcctggctcttaagaagttcgaaatctaggtggggaattttccacttccttttctcattttcttgtgccttggcttctgccctctgagtgaaatgccctccttttcacctcctctccccctccagacatgttttaactaggtgaaatcctactccttttaaagatcagttcaaatgtcatcttttctgggaaggttttctcaatctcctcccaggcagagttagtttcttcctctgctatattccctgggcaatttcataatgcc

SEQ ID NO: 361549 - DNA, 463 bp, Homo sapiens
atcactttagaaaccccatctgttgtcttggtgctggatatttcccatgtctgatcctcaataacacaattcactaaaggccaagcttggctcaatctgattttcccattcttactacttcacagccatgaatgtgattgctcaatccagttggccctgagagcaccttgccctgctgaccttcactgtcacctcggtcttgaatcagagccccaacccaaacactccctgcctgtccctaccccagcctttattctcaccacttgtttaacggcatgaccttttagtttctccattcccagacacccacacacccagacttccttctgagttgcaggtttctccttagatgtccaactagaaatattactaggaaagttacttttcaaagcaggaatgtgctgggaagtaggagacagcaactccctcctctctccccaaaattattggatcaaaaaagaaa

SEQ ID NO: 361550 - DNA, 205 bp, Homo sapiens
cattgttctggtttctgctatgatgaagtccttatttaagcttccttcaatcttgggaattgtattgactgtattgtgtgaattgtatactcactgcattgtgtggcttagatacaacatggttctggtaccatgaaggattctggtaccatgaaagtttgttggggttactaaactgtgtgactcttagggaacagtatgaagg

SEQ ID NO: 361551 - DNA, 2115 bp, Homo sapiens
agcttccgcaagctgcgcagcgccgggcctgagggcgtgtatccgcggccgtagcagccgggctggtcctgctgcgagccggcggcccggagtggggcggcggagcaaacatgaacgttggagttgcccacagtgaagtgaatccaaatacccgtgtcatgaacagccggggtatgtggctgacatatgcattgggagttggcttgcttcatattgtcttactcagcattcccttcttcagtgttcctgttgcttggactttaacaaatattatacataatctggggatgtacgtatttttgcatgcagtgaaaggaacacctttcgaaactcctgaccagggtaaagcaaggctcctaactcattgggaacaactggactatggagtacagtttacatcttcacggaagtttttcacaatttctccaataattctatattttctggcaagtttctatacgaagtatgatccaactcacttcatcctaaacacagcttctctcctgagtgtactaattcccaaaatgccacaactacatggtgttcggatctttggaattaataagtattgaaatgttttgaaactgaaaaaaaattttacagctactgaatttcttataaggaaggagtggttagtaaactgcactgtttctctgataatgtgaaatgagaagtatttacattggagggccaatggctggtccttcaagtgctgttttgaagtgcagatttccattaaatgatgcctctgtttaatacacctggtacatttctgaagaggggctttataagcaggctgggcaggcccagcttataagttaaagggcatcacagtgagggtgtagtagataaattcaaggaaataagagatttgtaagaaactaggaccagcttaacttataatgaatgggcattgtgttaagaaaagaacatttccagtcattcagctgtggttatttaaagcagacttacatgtaaaccggaatcctctctatacaagtttattaaagattatttttattaccgtacatatttctcttgttttatgtaagtggatgtatatcctcttgttttatacaagccagttcccacttatgagggtacttttttggttttgctggcttaatattgtgtattggtcaatgaggccatttttacatttattacgttacagagttcatggaggttcacctttgtgactgattggtgataaaagatagccaagtgtcttacaagcagcctctgagtcaagtgttctaattttggaacaaagcaggttttactgcttttccagacacaaggctgctaaaccaattaagaaaataattaatttctttcaagcaactaaaaaatatatggtaatttaaaggtgtctgcttatttggttgaacaatttaattgggaaagtttgtcatcatttgaaaaaggaaatataaaaggaacaaccatatagccaacctgtggtctggcagaaacaacgtctctagcaatagtaccaaagtaagtaatggagtcttttttttggcaggtctgcagtaaaagataacattttcttttcttagtcctcctgctctcaacccccatattttgcctttgaatacgtgggttttagtatatatagcccaaaatggtaactgtctccagaacagcaaccacattgaattcttgtgacttaggaaagcttcttatagttgctgacattaattgcaagaaataactatatactactttgagaagtaaacatgtcaaaaaaaacaaagttcagatatgggacaaaatttaaaaattcagtaacatttataaacagaattgaatgaaaagagttacagaccaacttaaacatcaattcgtgtcagtaaactgacttttgggggtaatgatcattgttttgtatctcaaaagtattgagtttagaaatcagttgtatgatactacctttgtatgtctgtcttttcccgtgtatttttaaataactggtgatctataatttaataaaatttttcgttggtgtaatattatttcaaaagccctccaaatttagtcatcaaaattaaaatgacatttttcaagtttatttttaagcaactgaattcgtaaaattaaagtaacaaaaag

SEQ ID NO: 361552 - DNA, 2226 bp, Homo sapiens
agcttccgcaagctgcgcagcgccgggcctgagggcgtgtatccgcggccgtagcagccgggctggtcctgctgcgagccggcggcccggagtggggcggcgggcatgtaccttccacattgagtattcagaaagaagtgatctgaactctgaccattctttatggatacattaagtcaaatataagagtctgactacttgacacactggctcgagcaaacatgaacgttggagttgcccacagtgaagtgaatccaaatacccgtgtcatgaacagccggggtatgtggctgacatatgcattgggagttggcttgcttcatattgtcttactcagcattcccttcttcagtgttcctgttgcttggactttaacaaatattatacataatctggggatgtacgtatttttgcatgcagtgaaaggaacacctttcgaaactcctgaccagggtaaagcaaggctcctaactcattgggaacaactggactatggagtacagtttacatcttcacggaagtttttcacaatttctccaataattctatattttctggcaagtttctatacgaagtatgatccaactcacttcatcctaaacacagcttctctcctgagtgtactaattcccaaaatgccacaactacatggtgttcggatctttggaattaataagtattgaaatgttttgaaactgaaaaaaaattttacagctactgaatttcttataaggaaggagtggttagtaaactgcactgtttctctgataatgtgaaatgagaagtatttacattggagggccaatggctggtccttcaagtgctgttttgaagtgcagatttccattaaatgatgcctctgtttaatacacctggtacatttctgaagaggggctttataagcaggctgggcaggcccagcttataagttaaagggcatcacagtgagggtgtagtagataaattcaaggaaataagagatttgtaagaaactaggaccagcttaacttataatgaatgggcattgtgttaagaaaagaacatttccagtcattcagctgtggttatttaaagcagacttacatgtaaaccggaatcctctctatacaagtttattaaagattatttttattaccgtacatatttctcttgttttatgtaagtggatgtatatcctcttgttttatacaagccagttcccacttatgagggtacttttttggttttgctggcttaatattgtgtattggtcaatgaggccatttttacatttattacgttacagagttcatggaggttcacctttgtgactgattggtgataaaagatagccaagtgtcttacaagcagcctctgagtcaagtgttctaattttggaacaaagcaggttttactgcttttccagacacaaggctgctaaaccaattaagaaaataattaatttctttcaagcaactaaaaaatatatggtaatttaaaggtgtctgcttatttggttgaacaatttaattgggaaagtttgtcatcatttgaaaaaggaaatataaaaggaacaaccatatagccaacctgtggtctggcagaaacaacgtctctagcaatagtaccaaagtaagtaatggagtcttttttttggcaggtctgcagtaaaagataacattttcttttcttagtcctcctgctctcaacccccatattttgcctttgaatacgtgggttttagtatatatagcccaaaatggtaactgtctccagaacagcaaccacattgaattcttgtgacttaggaaagcttcttatagttgctgacattaattgcaagaaataactatatactactttgagaagtaaacatgtcaaaaaaaacaaagttcagatatgggacaaaatttaaaaattcagtaacatttataaacagaattgaatgaaaagagttacagaccaacttaaacatcaattcgtgtcagtaaactgacttttgggggtaatgatcattgttttgtatctcaaaagtattgagtttagaaatcagttgtatgatactacctttgtatgtctgtcttttcccgtgtatttttaaataactggtgatctataatttaataaaatttttcgttggtgtaatattatttcaaaagccctccaaatttagtcatcaaaattaaaatgacatttttcaagtttatttttaagcaactgaattcgtaaaattaaagtaacaaaaag

SEQ ID NO: 361553 - DNA, 1136 bp, Homo sapiens
tgctttaaataaccacagctgacttacttgtatagagaggattaccgtacatatttctcttgttttatgtaagtggatgtatatcctcttgttttatacaagccagttcccacttatgagggtacttttttggttttgctggcttaatattgtgtattggtcaatgaggccatttttacatttattacgttacagagttcatggaggttcacctttgtgactgattggtgataaaagatagccaagtgtcttacaagcagcctctgagtcaagtgttctaattttggaacaaagcaggttttactgcttttccagacacaaggctgctaaaccaattaagaaaataattaatttctttcaagcaactaaaaaatatatggtaatttaaaggtgtctgcttatttggttgaacaatttaattgggaaagtttgtcatcatttgaaaaaggaaatataaaaggaacaaccatatagccaacctgtggtctggcagaaacaacgtctctagcaatagtaccaaagtaagtaatggagtcttttttttggcaggtctgcagtaaaagataacattttcttttcttagtcctcctgctctcaacccccatattttgcctttgaatacgtgggttttagtatatatagcccaaaatggtaactgtctccagaacagcaaccacattgaattcttgtgacttaggaaagcttcttatagttgctgacattaattgcaagaaataactatatactactttgagaagtaaacatgtcaaaaaaaacaaagttcagatatgggacaaaatttaaaaattcagtaacatttataaacagaattgaatgaaaagagttacagaccaacttaaacatcaattcgtgtcagtaaactgacttttgggggtaatgatcattgttttgtatctcaaaagtattgagtttagaaatcagttgtatgatactacctttgtatgtctgtcttttcccgtgtatttttaaataactggtgatctataatttaataaaatttttcgttggtgtaatattatttcaaaagccctccaaatttagtcatcaaaattaaaatgacatttttcaagtttatttttaagcaactgaattcgtaaaattaaagtaacaaaaag

SEQ ID NO: 361554 - DNA, 3781 bp, Homo sapiens
agcttccgcaagctgcgcagcgccgggcctgagggcgtgtatccgcggccgtagcagccgggctggtcctgctgcgagccggcggcccggagtggggcggcgggtaagtgggcacgaacgcggtggacgctgtacagtcgccttcgtcggtagggaactgctggcggcctaggggtcgtcctgagagggaaaagcgggctccggctgcatctgcggcgccctgcgtggccgtaagagccaagtggcctcagaggctcgccccctacgcaaatcctcgttgtcttgccagggtcctgacgtgacgtgcggccgcgagaaggaaggggcgggttgggggaggcgctgaggtggtagcagcggcggcttttgctgagttttctctggcccagagcgctcgggctgtcggtctagcaggggggactcccctgaggggccgctgcgggtcgccgtcttcggaggcaccggcgagggcagagccaacagcctcttcacggtctgtaaggtcattgtttgccagtcgtgggcagcgcggcaaacctgctgggaaaaggttttctggttggaataggatgagtaccgcaccagctttgccttccagctgagatgtaaatttcaggcctccatcctgtggaacgtgggaaaactatcttgagtgttggcatgttctaagtatgacataatagtttaatgtatgataaatcatgggtgtttagacgaaagatttacacatataaattggaggctttagcggtcttagtgtaactaacttttcgtccccttaacccttgatgcctgttctatgggtctctagagcggaaggagcattatactccggaaacatttgctggaaggggttatgagaaattcctctctgtatgctaactccgtaatacaagcgtttgtgtattttaaaatcacagctgttccaaatataatctagcctcgttttccccctccgtcggatgataggtgttcttcaggacagttttattttaagcaattcttagtctcaagtaaacaccatcattaaaagaactgagaactattatcaattcttcctttggagtccatcttcaatggaaaggagaagggaaaaccttttttaaaaagaagaaagaaaactgaagtttttgatttgactagagaaatattcagaagactccttattttcacctagtctaatcacaaaattgagaaacaaacattatcccttgaccatgtaaattttacaccacattatgtcaacagcatgtaccttccacattgagtattcagaaagaagtgatctgaactctgaccattctttatggatacattaagtcaaatataagagtctgactacttgacacactggctcggtgagttctgctttttctttttaatataaatttattatgttggtaaatttagcttttggcttttcactttgctctcatgatataagaaaatgtaggttttctctttcagtttgaattttcctattcagtaaaacaacatgctagaaaacaaacttttggaaaggcattgtaactattttttcaaatagaaccataataacaagtcttgtcttaccctaaagtcaaatgctgaagattctttactgctgtcatcagcatctacaagtagcatattttggatggtgtttgtgtgctacttcaaagtaactaggaaaaaataatcctcgcaacacaggtaccttgtcatgtcagaattgggggtgttaggttgccagttgtatcagtgttgattcatttcattacttcctacagagcaaacatgaacgttggagttgcccacagtgaagtgaatccaaatacccgtgtcatgaacagccggggtatgtggctgacatatgcattgggagttggcttgcttcatattgtcttactcagcattcccttcttcagtgttcctgttgcttggactttaacaaatattatacataatctggggatgtacgtatttttgcatgcagtgaaaggaacacctttcgaaactcctgaccagggtaaagcaaggctcctaactcattgggaacaactggactatggagtacagtttacatcttcacggaagtttttcacaatttctccaataattctatattttctggcaagtttctatacgaagtatgatccaactcacttcatcctaaacacagcttctctcctgagtgtactaattcccaaaatgccacaactacatggtgttcggatctttggaattaataagtattgaaatgttttgaaactgaaaaaaaattttacagctactgaatttcttataaggaaggagtggttagtaaactgcactgtttctctgataatgtgaaatgagaagtatttacattggagggccaatggctggtccttcaagtgctgttttgaagtgcagatttccattaaatgatgcctctgtttaatacacctggtacatttctgaagaggggctttataagcaggctgggcaggcccagcttataagttaaagggcatcacagtgagggtgtagtagataaattcaaggaaataagagatttgtaagaaactaggaccagcttaacttataatgaatgggcattgtgttaagaaaagaacatttccagtcattcagctgtggttatttaaagcagacttacatgtaaaccggaatcctctctatacaagtttattaaagattatttttattaccgtacatatttctcttgttttatgtaagtggatgtatatcctcttgttttatacaagccagttcccacttatgagggtacttttttggttttgctggcttaatattgtgtattggtcaatgaggccatttttacatttattacgttacagagttcatggaggttcacctttgtgactgattggtgataaaagatagccaagtgtcttacaagcagcctctgagtcaagtgttctaattttggaacaaagcaggttttactgcttttccagacacaaggctgctaaaccaattaagaaaataattaatttctttcaagcaactaaaaaatatatggtaatttaaaggtgtctgcttatttggttgaacaatttaattgggaaagtttgtcatcatttgaaaaaggaaatataaaaggaacaaccatatagccaacctgtggtctggcagaaacaacgtctctagcaatagtaccaaagtaagtaatggagtcttttttttggcaggtctgcagtaaaagataacattttcttttcttagtcctcctgctctcaacccccatattttgcctttgaatacgtgggttttagtatatatagcccaaaatggtaactgtctccagaacagcaaccacattgaattcttgtgacttaggaaagcttcttatagttgctgacattaattgcaagaaataactatatactactttgagaagtaaacatgtcaaaaaaaacaaagttcagatatgggacaaaatttaaaaattcagtaacatttataaacagaattgaatgaaaagagttacagaccaacttaaacatcaattcgtgtcagtaaactgacttttgggggtaatgatcattgttttgtatctcaaaagtattgagtttagaaatcagttgtatgatactacctttgtatgtctgtcttttcccgtgtatttttaaataactggtgatctataatttaataaaatttttcgttggtgtaatattatttcaaaagccctccaaatttagtcatcaaaattaaaatgacatttttcaagtttatttttaagcaactgaattcgtaaaattaaagtaacaaaaag

SEQ ID NO: 361555 - DNA, 3370 bp, Homo sapiens
agcttccgcaagctgcgcagcgccgggcctgagggcgtgtatccgcggccgtagcagccgggctggtcctgctgcgagccggcggcccggagtggggcggcgggtaagtgggcacgaacgcggtggacgctgtacagtcgccttcgtcggtagggaactgctggcggcctaggggtcgtcctgagagggaaaagcgggctccggctgcatctgcggcgccctgcgtggccgtaagagccaagtggcctcagaggctcgccccctacgcaaatcctcgttgtcttgccagggtcctgacgtgacgtgcggccgcgagaaggaaggggcgggttgggggaggcgctgaggtggtagcagcggcggcttttgctgagttttctctggcccagagcgctcgggctgtcggtctagcaggggggactcccctgaggggccgctgcgggtcgccgtcttcggaggcaccggcgagggcagagccaacagcctcttcacggtctgtaaggtcattgtttgccagtcgtgggcagcgcggcaaacctgctgggaaaaggttttctggttggaataggatgagtaccgcaccagctttgccttccagctgagatgtaaatttcaggcctccatcctgtggaacgtgggaaaactatcttgagtgttggcatgttctaagtatgacataatagtttaatgtatgataaatcatgggtgtttagacgaaagatttacacatataaattggaggctttagcggtcttagtgtaactaacttttcgtccccttaacccttgatgcctgttctatgggtctctagagcggaaggagcattatactccggaaacatttgctggaaggggttatgagaaattcctctctgtatgctaactccgtaatacaagcgtttgtgtattttaaaatcacagctgttccaaatataatctagcctcgttttccccctccgtcggatgataggtgttcttcaggacagttttattttaagcaattcttagtctcaagtaaacaccatcattaaaagaactgagaactattatcaattcttcctttggagtccatcttcaatggaaaggagaagggaaaaccttttttaaaaagaagaaagaaaactgaagtttttgatttgactagagaaatattcagaagactccttattttcacctagtctaatcacaaaattgagaaacaaacattatcccttgaccatgtaaattttacaccacattatgtcaacagcatgtaccttccacattgagtattcagaaagaagtgatctgaactctgaccattctttatggatacattaagtcaaatataagagtctgactacttgacacactggctcgagcaaacatgaacgttggagttgcccacagtgaagtgaatccaaatacccgtgtcatgaacagccggggtatgtggctgacatatgcattgggagttggcttgcttcatattgtcttactcagcattcccttcttcagtgttcctgttgcttggactttaacaaatattatacataatctggggatgtacgtatttttgcatgcagtgaaaggaacacctttcgaaactcctgaccagggtaaagcaaggctcctaactcattgggaacaactggactatggagtacagtttacatcttcacggaagtttttcacaatttctccaataattctatattttctggcaagtttctatacgaagtatgatccaactcacttcatcctaaacacagcttctctcctgagtgtactaattcccaaaatgccacaactacatggtgttcggatctttggaattaataagtattgaaatgttttgaaactgaaaaaaaattttacagctactgaatttcttataaggaaggagtggttagtaaactgcactgtttctctgataatgtgaaatgagaagtatttacattggagggccaatggctggtccttcaagtgctgttttgaagtgcagatttccattaaatgatgcctctgtttaatacacctggtacatttctgaagaggggctttataagcaggctgggcaggcccagcttataagttaaagggcatcacagtgagggtgtagtagataaattcaaggaaataagagatttgtaagaaactaggaccagcttaacttataatgaatgggcattgtgttaagaaaagaacatttccagtcattcagctgtggttatttaaagcagacttacatgtaaaccggaatcctctctatacaagtttattaaagattatttttattaccgtacatatttctcttgttttatgtaagtggatgtatatcctcttgttttatacaagccagttcccacttatgagggtacttttttggttttgctggcttaatattgtgtattggtcaatgaggccatttttacatttattacgttacagagttcatggaggttcacctttgtgactgattggtgataaaagatagccaagtgtcttacaagcagcctctgagtcaagtgttctaattttggaacaaagcaggttttactgcttttccagacacaaggctgctaaaccaattaagaaaataattaatttctttcaagcaactaaaaaatatatggtaatttaaaggtgtctgcttatttggttgaacaatttaattgggaaagtttgtcatcatttgaaaaaggaaatataaaaggaacaaccatatagccaacctgtggtctggcagaaacaacgtctctagcaatagtaccaaagtaagtaatggagtcttttttttggcaggtctgcagtaaaagataacattttcttttcttagtcctcctgctctcaacccccatattttgcctttgaatacgtgggttttagtatatatagcccaaaatggtaactgtctccagaacagcaaccacattgaattcttgtgacttaggaaagcttcttatagttgctgacattaattgcaagaaataactatatactactttgagaagtaaacatgtcaaaaaaaacaaagttcagatatgggacaaaatttaaaaattcagtaacatttataaacagaattgaatgaaaagagttacagaccaacttaaacatcaattcgtgtcagtaaactgacttttgggggtaatgatcattgttttgtatctcaaaagtattgagtttagaaatcagttgtatgatactacctttgtatgtctgtcttttcccgtgtatttttaaataactggtgatctataatttaataaaatttttcgttggtgtaatattatttcaaaagccctccaaatttagtcatcaaaattaaaatgacatttttcaagtttatttttaagcaactgaattcgtaaaattaaagtaacaaaaag

SEQ ID NO: 361556 - DNA, 2616 bp, Homo sapiens
agcttccgcaagctgcgcagcgccgggcctgagggcgtgtatccgcggccgtagcagccgggctggtcctgctgcgagccggcggcccggagtggggcggcgggtaagtgggcacgaacgcggtggacgctgtacagtcgccttcgtcggtagggaactgctggcggcctaggggtcgtcctgagagggaaaagcgggctccggctgcatctgcggcgccctgcgtggccgtaagagccaagtggcctcagaggctcgccccctacgcaaatcctcgttgtcttgccagggtcctgacgtgacgtgcggccgcgagaaggaaggggcgggttgggggaggcgctgaggtggtagcagcggcggcttttgctgagttttctctggcccagagcgctcgggctgtcggtctagcaggggggactcccctgaggggccgctgcgggtcgccgtcttcggaggcaccggcgagggcagagccaacagcctcttcacggcatgtaccttccacattgagtattcagaaagaagtgatctgaactctgaccattctttatggatacattaagtcaaatataagagtctgactacttgacacactggctcgagcaaacatgaacgttggagttgcccacagtgaagtgaatccaaatacccgtgtcatgaacagccggggtatgtggctgacatatgcattgggagttggcttgcttcatattgtcttactcagcattcccttcttcagtgttcctgttgcttggactttaacaaatattatacataatctggggatgtacgtatttttgcatgcagtgaaaggaacacctttcgaaactcctgaccagggtaaagcaaggctcctaactcattgggaacaactggactatggagtacagtttacatcttcacggaagtttttcacaatttctccaataattctatattttctggcaagtttctatacgaagtatgatccaactcacttcatcctaaacacagcttctctcctgagtgtactaattcccaaaatgccacaactacatggtgttcggatctttggaattaataagtattgaaatgttttgaaactgaaaaaaaattttacagctactgaatttcttataaggaaggagtggttagtaaactgcactgtttctctgataatgtgaaatgagaagtatttacattggagggccaatggctggtccttcaagtgctgttttgaagtgcagatttccattaaatgatgcctctgtttaatacacctggtacatttctgaagaggggctttataagcaggctgggcaggcccagcttataagttaaagggcatcacagtgagggtgtagtagataaattcaaggaaataagagatttgtaagaaactaggaccagcttaacttataatgaatgggcattgtgttaagaaaagaacatttccagtcattcagctgtggttatttaaagcagacttacatgtaaaccggaatcctctctatacaagtttattaaagattatttttattaccgtacatatttctcttgttttatgtaagtggatgtatatcctcttgttttatacaagccagttcccacttatgagggtacttttttggttttgctggcttaatattgtgtattggtcaatgaggccatttttacatttattacgttacagagttcatggaggttcacctttgtgactgattggtgataaaagatagccaagtgtcttacaagcagcctctgagtcaagtgttctaattttggaacaaagcaggttttactgcttttccagacacaaggctgctaaaccaattaagaaaataattaatttctttcaagcaactaaaaaatatatggtaatttaaaggtgtctgcttatttggttgaacaatttaattgggaaagtttgtcatcatttgaaaaaggaaatataaaaggaacaaccatatagccaacctgtggtctggcagaaacaacgtctctagcaatagtaccaaagtaagtaatggagtcttttttttggcaggtctgcagtaaaagataacattttcttttcttagtcctcctgctctcaacccccatattttgcctttgaatacgtgggttttagtatatatagcccaaaatggtaactgtctccagaacagcaaccacattgaattcttgtgacttaggaaagcttcttatagttgctgacattaattgcaagaaataactatatactactttgagaagtaaacatgtcaaaaaaaacaaagttcagatatgggacaaaatttaaaaattcagtaacatttataaacagaattgaatgaaaagagttacagaccaacttaaacatcaattcgtgtcagtaaactgacttttgggggtaatgatcattgttttgtatctcaaaagtattgagtttagaaatcagttgtatgatactacctttgtatgtctgtcttttcccgtgtatttttaaataactggtgatctataatttaataaaatttttcgttggtgtaatattatttcaaaagccctccaaatttagtcatcaaaattaaaatgacatttttcaagtttatttttaagcaactgaattcgtaaaattaaagtaacaaaaag

SEQ ID NO: 361557 - DNA, 3169 bp, Homo sapiens
agcttccgcaagctgcgcagcgccgggcctgagggcgtgtatccgcggccgtagcagccgggctggtcctgctgcgagccggcggcccggagtggggcggcgggtaagtgggcacgaacgcggtggacgctgtacagtcgccttcgtcggtagggaactgctggcggcctaggggtcgtcctgagagggaaaagcgggctccggctgcatctgcggcgccctgcgtggccgtaagagccaagtggcctcagaggctcgccccctacgcaaatcctcgttgtcttgccagggtcctgacgtgacgtgcggccgcgagaaggaaggggcgggttgggggaggcgctgaggtggtagcagcggcggcttttgctgagttttctctggcccagagcgctcgggctgtcggtctagcaggggggactcccctgaggggccgctgcgggtcgccgtcttcggaggcaccggcgagggcagagccaacagcctcttcacggtctgtaaggtcattgtttgccagtcgtgggcagcgcggcaaacctgctgggaaaaggttttctggttggaataggatgagtaccgcaccagctttgccttccagctgagatgtaaatttcaggcctccatcctgtggaacgtgggaaaactatcttgagtgttggcatgttctaagtatgacataatagtttaatgtatgataaatcatgggtgtttagacgaaagatttacacatataaattggaggctttagcggtcttagtgtaactaacttttcgtccccttaacccttgatgcctgttctatgggtctctagagcggaaggagcattatactccggaaacatttgctggaaggggttatgagaaattcctctctgtatgctaactccgtaatacaagcgtttgtgtattttaaaatcacagctgttccaaatataatctagcctcgttttccccctccgtcggatgataggtgttcttcaggacagttttattttaagcaattcttagtctcaagtaaacaccatcattaaaagaactgagaactattatcaattcttcctttggagtccatcttcaatggaaaggagaagggaaaaccttttttaaaaagaagaaagaaaactgaagtttttgatttgactagagaaatattcagaagactccttattttcacctagtctaatcacaaaattgagaaacaaacattatcccttgaccatgtaaattttacaccacattatgtcaacagcatgtaccttccacattgagtattcagaaagaagtgatctgaactctgaccattctttatggatacattaagtcaaatataagagtctgactacttgacacactggctcggtgagttctgctttttctttttaatataaatttattatgttggtaaatttagcttttggcttttcactttgctctcatgatataagaaaatgtaggttttctctttcagtttgaattttcctattcagtaaaacaacatgctagaaaacaaacttttggaaaggcattgtaactattttttcaaatagaaccataataacaagtcttgtcttaccctaaagtcaaatgctgaagattctttactgctgtcatcagcatctacaagtagcatattttggatggtgtttgtgtgctacttcaaagtaactaggaaaaaataatcctcgcaacacaggtaccttgtcatgtcagaattgggggtgttaggttgccagttgtatcagtgttgattcatttcattacttcctacagagcaaacatgaacgttggagttgcccacagtgaagtgaatccaaatacccgtgtcatgaacagccggggtatgtggctgacatatgcattgggagttggcttgcttcatattgtcttactcagcattcccttcttcagtgttcctgttgcttggactttaacaaatattatacataatctggggatgtacgtatttttgcatgcagtgaaaggaacacctttcgaaactcctgaccagggtaaagcaaggctcctaactcattgggaacaactggactatggagtacagtttacatcttcacggaagtttttcacaatttctccaataattctatattttctggcaagtttctatacgaagtatgatccaactcacttcatcctaaacacagcttctctcctgagtgtactaattcccaaaatgccacaactacatggtgttcggatctttggaattaataagtattgaaatgttttgaaactgaaaaaaaattttacagctactgaatttcttataaggaaggagtggttagtaaactgcactgtttctctgataatgtgaaatgagaagtatttacattggagggccaatggctggtccttcaagtgctgttttgaagtgcagatttccattaaatgatgcctctgtttaatacacctggtacatttctgaagaggggctttataagcaggctgggcaggcccagcttataagttaaagggcatcacagtgagggtgtagtagataaattcaaggaaataagagatttgtaagaaactaggaccagcttaacttataatgaatgggcattgtgttaagaaaagaacatttccagtcattcagctgtggttatttaaagcagacttacatgtaaaccggaatcctctctatacaagtttattaaagattatttttaaaaaaaaaaaaaaaaaaaaaaaaaaaaaaaaaaaaaaaaaaaaaaaaaaaaaacaaaaaaaaaaaaaaaaaaaaaaaaaaaaaaaaaaaaaaaaaagaaaaaacaacaaaaaacaaaaaaaacaaagacgaaagaaaccacgaacggaggagaacaaagagagaaaggaaggagaaagaataaaaaaagaaaaaagataggggagaggaggtaagaagagaagaggagagagtcagatagagaaggaagaggagaagtaacagaaagcaaaggatgagtgaggactataaagacaagcaaagaaggagaggagaacgaagacagacgagaacagcgaacgcagcaacggacgggagcggaggaagagaggcaaaagagatgagacggaacacaagcagaggagaggagggaccagagcgaaggaggaggagaggagcagaacacggagaagagggagagaggcaaaaaagacacagggggggg

SEQ ID NO: 361558 - DNA, 2024 bp, Homo sapiens
ctttttcagaaacatacatggaaatacagaactacacctgtaattacagagggcatatgaaccctagtttgataagccttgctttaaaggatgcagtgtgttctattaaatgtatttaatacaattgcagaaatggaaaatgtggacctccattaaacaaattttttagttcctaatgagataaacttgggaccaaaccgattcctcttgttttagtgctcaaaaatagtttcatttttaggtatttatgctttagtggcctttttttctacctttaaaattgtttaagttccaagtaattttatttttggatgttatatatattcttaacttttatctctacagatattttctggcaagtttctatacgaagtatgatccaactcacttcatcctaaacacagcttctctcctgagtgtactaattcccaaaatgccacaactacatggtgttcggatctttggaattaataagtattgaaatgttttgaaactgaaaaaaaattttacagctactgaatttcttataaggaaggagtggttagtaaactgcactgtttctctgataatgtgaaatgagaagtatttacattggagggccaatggctggtccttcaagtgctgttttgaagtgcagatttccattaaatgatgcctctgtttaatacacctggtacatttctgaagaggggctttataagcaggctgggcaggcccagcttataagttaaagggcatcacagtgagggtgtagtagataaattcaaggaaataagagatttgtaagaaactaggaccagcttaacttataatgaatgggcattgtgttaagaaaagaacatttccagtcattcagctgtggttatttaaagcagacttacatgtaaaccggaatcctctctatacaagtttattaaagattatttttattaccgtacatatttctcttgttttatgtaagtggatgtatatcctcttgttttatacaagccagttcccacttatgagggtacttttttggttttgctggcttaatattgtgtattggtcaatgaggccatttttacatttattacgttacagagttcatggaggttcacctttgtgactgattggtgataaaagatagccaagtgtcttacaagcagcctctgagtcaagtgttctaattttggaacaaagcaggttttactgcttttccagacacaaggctgctaaaccaattaagaaaataattaatttctttcaagcaactaaaaaatatatggtaatttaaaggtgtctgcttatttggttgaacaatttaattgggaaagtttgtcatcatttgaaaaaggaaatataaaaggaacaaccatatagccaacctgtggtctggcagaaacaacgtctctagcaatagtaccaaagtaagtaatggagtcttttttttggcaggtctgcagtaaaagataacattttcttttcttagtcctcctgctctcaacccccatattttgcctttgaatacgtgggttttagtatatatagcccaaaatggtaactgtctccagaacagcaaccacattgaattcttgtgacttaggaaagcttcttatagttgctgacattaattgcaagaaataactatatactactttgagaagtaaacatgtcaaaaaaaacaaagttcagatatgggacaaaatttaaaaattcagtaacatttataaacagaattgaatgaaaagagttacagaccaacttaaacatcaattcgtgtcagtaaactgacttttgggggtaatgatcattgttttgtatctcaaaagtattgagtttagaaatcagttgtatgatactacctttgtatgtctgtcttttcccgtgtatttttaaataactggtgatctataatttaataaaatttttcgttggtgtaatattatttcaaaagccctccaaatttagtcatcaaaattaaaatgacatttttcaagtttatttttaagcaactgaattcgtaaaattaaagtaacaaaaag

SEQ ID NO: 361559 - DNA, 2128 bp, Homo sapiens
agcttccgcaagctgcgcagcgccgggcctgagggcgtgtatccgcggccgtagcagccgggctggtcctgctgcgagccggcggcccggagtggggcggcgggtaagtgggcacgaacgcggtggacgctgtacagtcgccttcgtcggtagggaactgctggcggcctaggggtcgtcctgagagggaaaagcgggctccggctgcatctgcggcgccctgcgtggccgtaagagccaagtggcctcagaggctcgccccctacgcaaatcctcgttgtcttgccagggtcctgacgtgacgtgcggccgcgagaaggaaggggcgggttgggggaggcgctgaggtggtagcagcggcggcttttgctgagttttctctggcccagagcgctcgggctgtcggtctagcaggggggactcccctgaggggccgctgcgggtcgccgtcttcggaggcaccggcgagggcagagccaacagcctcttcacggtctgtaaggtcattgtttgccagtcgtgggcagcgcggcaaacctgctgggaaaaggttttctggttggaataggatgagtaccgcaccagctttgccttccagctgagatgtaaatttcaggcctccatcctgtggaacgtgggaaaactatcttgagtgttggcatgttctaagtatgacataatagtttaatgtatgataaatcatgggtgtttagacgaaagatttacacatataaattggaggctttagcggtcttagtgtaactaacttttcgtccccttaacccttgatgcctgttctatgggtctctagagcggaaggagcattatactccggaaacatttgctggaaggggttatgagaaattcctctctgtatgctaactccgtaatacaagcgtttgtgtattttaaaatcacagctgttccaaatataatctagcctcgttttccccctccgtcggatgataggtgttcttcaggacagttttattttaagcaattcttagtctcaagtaaacaccatcattaaaagaactgagaactattatcaattcttcctttggagtccatcttcaatggaaaggagaagggaaaaccttttttaaaaagaagaaagaaaactgaagtttttgatttgactagagaaatattcagaagactccttattttcacctagtctaatcacaaaattgagaaacaaacattatcccttgaccatgtaaattttacaccacattatgtcaacagcatgtaccttccacattgagtattcagaaagaagtgatctgaactctgaccattctttatggatacattaagtcaaatataagagtctgactacttgacacactggctcggtgagttctgctttttctttttaatataaatttattatgttggtaaatttagcttttggcttttcactttgctctcatgatataagaaaatgtaggttttctctttcagtttgaattttcctattcagtaaaacaacatgctagaaaacaaacttttggaaaggcattgtaactattttttcaaatagaaccataataacaagtcttgtcttaccctaaagtcaaatgctgaagattctttactgctgtcatcagcatctacaagtagcatattttggatggtgtttgtgtgctacttcaaagtaactaggaaaaaataatcctcgcaacacaggtaccttgtcatgtcagaattgggggtgttaggttgccagttgtatcagtgttgattcatttcattacttcctacagagcaaacatgaacgttggagttgcccacagtgaagtgaatccaaatacccgtgtcatgaacagccggggtatgtggctgacatatgcattgggagttggcttgcttcatattgtcttactcagcattcccttcttcagtgttcctgttgcttggactttaacaaatattatacataatctggggatgtacgtatttttgcatgcagtgaaaggaacacctttcgaaactcctgaccagggtaaagcaaggctcctaactcattgggaacaactggactatggagtacagtttacatcttcacggaagtttttcacaatttctccaataattctgtaagtggcagaaatttttaggtatg

SEQ ID NO: 361560 - DNA, 1875 bp, Homo sapiens
agcttccgcaagctgcgcagcgccgggcctgagggcgtgtatccgcggccgtagcagccgggctggtcctgctgcgagccggcggcccggagtggggcggcgggtaagtgggcacgaacgcggtggacgctgtacagtcgccttcgtcggtagggaactgctggcggcctaggggtcgtcctgagagggaaaagcgggctccggctgcatctgcggcgccctgcgtggccgtaagagccaagtggcctcagaggctcgccccctacgcaaatcctcgttgtcttgccagggtcctgacgtgacgtgcggccgcgagaaggaaggggcgggttgggggaggcgctgaggtggtagcagcggcggcttttgctgagttttctctggcccagagcgctcgggctgtcggtctagcaggggggactcccctgaggggccgctgcgggtcgccgtcttcggaggcaccggcgagggcagagccaacagcctcttcacggtctgtaaggtcattgtttgccagtcgtgggcagcgcggcaaacctgctgggaaaaggttttctggttggaataggatgagtaccgcaccagctttgccttccagctgagatgtaaatttcaggcctccatcctgtggaacgtgggaaaactatcttgagtgttggcatgttctaagtatgacataatagtttaatgtatgataaatcatgggtgtttagacgaaagatttacacatataaattggaggctttagcggtcttagtgtaactaacttttcgtccccttaacccttgatgcctgttctatgggtctctagagcggaaggagcattatactccggaaacatttgctggaaggggttatgagaaattcctctctgtatgctaactccgtaatacaagcgtttgtgtattttaaaatcacagctgttccaaatataatctagcctcgttttccccctccgtcggatgataggtgttcttcaggacagttttattttaagcaattcttagtctcaagtaaacaccatcattaaaagaactgagaactattatcaattcttcctttggagtccatcttcaatggaaaggagaagggaaaaccttttttaaaaagaagaaagaaaactgaagtttttgatttgactagagaaatattcagaagactccttattttcacctagtctaatcacaaaattgagaaacaaacattatcccttgaccatgtaaattttacaccacattatgtcaacagcatgtaccttccacattgagtattcagaaagaagtgatctgaactctgaccattctttatggatacattaagtcaaatataagagtctgactacttgacacactggctcggtgagttctgctttttctttttaatataaatttattatgttggtaaatttagcttttggcttttcactttgctctcatgatataagaaaatgtaggttttctctttcagtttgaattttcctattcagtaaaacaacatgctagaaaacaaacttttggaaaggcattgtaactattttttcaaatagaaccataataacaagtcttgtcttaccctaaagtcaaatgctgaagattctttactgctgtcatcagcatctacaagtagcatattttggatggtgtttgtgtgctacttcaaagtaactaggaagttgccagttgtatcagtgttgattcatttcattacttcctacagagcaaacatgaacgttggagttgcccacagtgaagtgaatccaaatacccgtgtcatgaacagccggggtatgtggctgacatatgcattgggagttggcttgcttcatatcccctaatcagacctcctccttaccgtcccgctctcgcatttataacg

SEQ ID NO: 361561 - DNA, 1886 bp, Homo sapiens
cacgcgtccgcggacgcgtggggcttggactttaacaaatattatacataatctggggatgtacgtatttttgcatgcagtgaaaggaacacctttcgaaactcctgaccagggtaaagcaaggctcctaactcattgggaacaactggactatggagtacagtttacatcttcacggaagtttttcacaatttctccaataattctatattttctggcaagtttctatacgaagtatgatccaactcacttcatcctaaacacagcttctctcctgagtgtactaattcccaaaatgccacaactacatggtgttcggatctttggaattaataagtattgaaatgttttgaaactgaaaaaaaattttacagctactgaatttcttataaggaaggagtggttagtaaactgcactgtttctctgataatgtgaaatgagaagtatttacattggagggccaatggctggtccttcaagtgctgttttgaagtgcagatttccattaaatgatgcctctgtttaatacacctggtacatttctgaagaggggctttataagcaggctgggcaggcccagcttataagttaaagggcatcacagtgagggtgtagtagataaattcaaggaaataagagatttgtaagaaactaggaccagcttaacttataatgaatgggcattgtgttaagaaaagaacatttccagtcattcagctgtggttatttaaagcagacttacatgtaaaccggaatcctctctatacaagtttattaaagattatttttattaccgtacatatttctcttgttttatgtaagtggatgtatatcctcttgttttatacaagccagttcccacttatgagggtacttttttggttttgctggcttaatattgtgtattggtcaatgaggccatttttacatttattacgttacagagttcatggaggttcacctttgtgactgattggtgataaaagatagccaagtgtcttacaagcagcctctgagtcaagtgttctaattttggaacaaagcaggttttactgcttttccagacacaaggctgctaaaccaattaagaaaataattaatttctttcaagcaactaaaaaatatatggtaatttaaaggtgtctgcttatttggttgaacaatttaattgggaaagtttgtcatcatttgaaaaaggaaatataaaaggaacaaccatatagccaacctgtggtctggcagaaacaacgtctctagcaatagtaccaaagtaagtaatggagtcttttttttggcaggtctgcagtaaaagataacattttcttttcttagtcctcctgctctcaacccccatattttgcctttgaatacgtgggttttagtatatatagcccaaaatggtaactgtctccagaacagcaaccacattgaattcttgtgacttaggaaagcttcttatagttgctgacattaattgcaagaaataactatatactactttgagaagtaaacatgtcaaaaaaaacaaagttcagatatgggacaaaatttaaaaattcagtaacatttataaacagaattgaatgaaaagagttacagaccaacttaaacatcaattcgtgtcagtaaactgacttttgggggtaatgatcattgttttgtatctcaaaagtattgagtttagaaatcagttgtatgatactacctttgtatgtctgtcttttcccgtgtatttttaaataactggtgatctataatttaataaaatttttcgttggtgtaatattatttcaaaagccctccaaatttagtcatcaaaattaaaatgacatttttcaagtttatttttaagcaactgaattcgtaaaattaaagtaacaaaaag

SEQ ID NO: 361562 - DNA, 3728 bp, Homo sapiens
agcttccgcaagctgcgcagcgccgggcctgagggcgtgtatccgcggccgtagcagccgggctggtcctgctgcgagccggcggcccggagtggggcggcgggtaagtgggcacgaacgcggtggacgctgtacagtcgccttcgtcggtagggaactgctggcggcctaggggtcgtcctgagagggaaaagcgggctccggctgcatctgcggcgccctgcgtggccgtaagagccaagtggcctcagaggctcgccccctacgcaaatcctcgttgtcttgccagggtcctgacgtgacgtgcggccgcgagaaggaaggggcgggttgggggaggcgctgaggtggtagcagcggcggcttttgctgagttttctctggcccagagcgctcgggctgtcggtctagcaggggggactcccctgaggggccgctgcgggtcgccgtcttcggaggcaccggcgagggcagagccaacagcctcttcacggtctgtaaggtcattgtttgccagtcgtgggcagcgcggcaaacctgctgggaaaaggttttctggttggaataggatgagtaccgcaccagctttgccttccagctgagatgtaaatttcaggcctccatcctgtggaacgtgggaaaactatcttgagtgttggcatgttctaagtatgacataatagtttaatgtatgataaatcatgggtgtttagacgaaagatttacacatataaattggaggctttagcggtcttagtgtaactaacttttcgtccccttaacccttgatgcctgttctatgggtctctagagcggaaggagcattatactccggaaacatttgctggaaggggttatgagaaattcctctctgtatgctaactccgtaatacaagcgtttgtgtattttaaaatcacagctgttccaaatataatctagcctcgttttccccctccgtcggatgataggtgttcttcaggacagttttattttaagcaattcttagtctcaagtaaacaccatcattaaaagaactgagaactattatcaattcttcctttggagtccatcttcaatggaaaggagaagggaaaaccttttttaaaaagaagaaagaaaactgaagtttttgatttgactagagaaatattcagaagactccttattttcacctagtctaatcacaaaattgagaaacaaacattatcccttgaccatgtaaattttacaccacattatgtcaacagcatgtaccttccacattgagtattcagaaagaagtgatctgaactctgaccattctttatggatacattaagtcaaatataagagtctgactacttgacacactggctcggtgagttctgctttttctttttaatataaatttattatgttggtaaatttagcttttggcttttcactttgctctcatgatataagaaaatgtaggttttctctttcagtttgaattttcctattcagtaaaacaacatgctagaaaacaaacttttggaaaggcattgtaactattttttcaaatagaaccataataacaagtcttgtcttaccctaaagtcaaatgctgaagattctttactgctgtcatcagcatctacaagtagcatattttggatggtgtttgtgtgctacttcaaagtaactaggaagttgccagttgtatcagtgttgattcatttcattacttcctacagagcaaacatgaacgttggagttgcccacagtgaagtgaatccaaatacccgtgtcatgaacagccggggtatgtggctgacatatgcattgggagttggcttgcttcatattgtcttactcagcattcccttcttcagtgttcctgttgcttggactttaacaaatattatacataatctggggatgtacgtatttttgcatgcagtgaaaggaacacctttcgaaactcctgaccagggtaaagcaaggctcctaactcattgggaacaactggactatggagtacagtttacatcttcacggaagtttttcacaatttctccaataattctatattttctggcaagtttctatacgaagtatgatccaactcacttcatcctaaacacagcttctctcctgagtgtactaattcccaaaatgccacaactacatggtgttcggatctttggaattaataagtattgaaatgttttgaaactgaaaaaaaattttacagctactgaatttcttataaggaaggagtggttagtaaactgcactgtttctctgataatgtgaaatgagaagtatttacattggagggccaatggctggtccttcaagtgctgttttgaagtgcagatttccattaaatgatgcctctgtttaatacacctggtacatttctgaagaggggctttataagcaggctgggcaggcccagcttataagttaaagggcatcacagtgagggtgtagtagataaattcaaggaaataagagatttgtaagaaactaggaccagcttaacttataatgaatgggcattgtgttaagaaaagaacatttccagtcattcagctgtggttatttaaagcagacttacatgtaaaccggaatcctctctatacaagtttattaaagattatttttattaccgtacatatttctcttgttttatgtaagtggatgtatatcctcttgttttatacaagccagttcccacttatgagggtacttttttggttttgctggcttaatattgtgtattggtcaatgaggccatttttacatttattacgttacagagttcatggaggttcacctttgtgactgattggtgataaaagatagccaagtgtcttacaagcagcctctgagtcaagtgttctaattttggaacaaagcaggttttactgcttttccagacacaaggctgctaaaccaattaagaaaataattaatttctttcaagcaactaaaaaatatatggtaatttaaaggtgtctgcttatttggttgaacaatttaattgggaaagtttgtcatcatttgaaaaaggaaatataaaaggaacaaccatatagccaacctgtggtctggcagaaacaacgtctctagcaatagtaccaaagtaagtaatggagtcttttttttggcaggtctgcagtaaaagataacattttcttttcttagtcctcctgctctcaacccccatattttgcctttgaatacgtgggttttagtatatatagcccaaaatggtaactgtctccagaacagcaaccacattgaattcttgtgacttaggaaagcttcttatagttgctgacattaattgcaagaaataactatatactactttgagaagtaaacatgtcaaaaaaaacaaagttcagatatgggacaaaatttaaaaattcagtaacatttataaacagaattgaatgaaaagagttacagaccaacttaaacatcaattcgtgtcagtaaactgacttttgggggtaatgatcattgttttgtatctcaaaagtattgagtttagaaatcagttgtatgatactacctttgtatgtctgtcttttcccgtgtatttttaaataactggtgatctataatttaataaaatttttcgttggtgtaatattatttcaaaagccctccaaatttagtcatcaaaattaaaatgacatttttcaagtttatttttaagcaactgaattcgtaaaattaaagtaacaaaaag

SEQ ID NO: 361563 - DNA, 2894 bp, Homo sapiens
agcttccgcaagctgcgcagcgccgggcctgagggcgtgtatccgcggccgtagcagccgggctggtcctgctgcgagccggcggcccggagtggggcggcgggtaagtgggcacgaacgcggtggacgctgtacagtcgccttcgtcggtagggaactgctggcggcctaggggtcgtcctgagagggaaaagcgggctccggctgcatctgcggcgccctgcgtggccgtaagagccaagtggcctcagaggctcgccccctacgcaaatcctcgttgtcttgccagggtcctgacgtgacgtgcggccgcgagaaggaaggggcgggttgggggaggcgctgaggtggtagcagcggcggcttttgctgagttttctctggcccagagcgctcgggctgtcggtctagcaggggggactcccctgaggggccgctgcgggtcgccgtcttcggaggcaccggcgagggcagagccaacagcctcttcacggtgttcttcaggacagttttattttaagcaattcttagtctcaagtaaacaccatcattaaaagaactgagaactattatcaattcttcctttggagtccatcttcaatggaaaggagaagggaaaaccttttttaaaaagaagaaagaaaactgaagtttttgatttgactagagaaatattcagaagactccttattttcacctagtctaatcacaaaattgagaaacaaacattatcccttgaccatgtaaattttacaccacattatgtcaacagcatgtaccttccacattgagtattcagaaagaagtgatctgaactctgaccattctttatggatacattaagtcaaatataagagtctgactacttgacacactggctcgagcaaacatgaacgttggagttgcccacagtgaagtgaatccaaatacccgtgtcatgaacagccggggtatgtggctgacatatgcattgggagttggcttgcttcatattgtcttactcagcattcccttcttcagtgttcctgttgcttggactttaacaaatattatacataatctggggatgtacgtatttttgcatgcagtgaaaggaacacctttcgaaactcctgaccagggtaaagcaaggctcctaactcattgggaacaactggactatggagtacagtttacatcttcacggaagtttttcacaatttctccaataattctatattttctggcaagtttctatacgaagtatgatccaactcacttcatcctaaacacagcttctctcctgagtgtactaattcccaaaatgccacaactacatggtgttcggatctttggaattaataagtattgaaatgttttgaaactgaaaaaaaattttacagctactgaatttcttataaggaaggagtggttagtaaactgcactgtttctctgataatgtgaaatgagaagtatttacattggagggccaatggctggtccttcaagtgctgttttgaagtgcagatttccattaaatgatgcctctgtttaatacacctggtacatttctgaagaggggctttataagcaggctgggcaggcccagcttataagttaaagggcatcacagtgagggtgtagtagataaattcaaggaaataagagatttgtaagaaactaggaccagcttaacttataatgaatgggcattgtgttaagaaaagaacatttccagtcattcagctgtggttatttaaagcagacttacatgtaaaccggaatcctctctatacaagtttattaaagattatttttattaccgtacatatttctcttgttttatgtaagtggatgtatatcctcttgttttatacaagccagttcccacttatgagggtacttttttggttttgctggcttaatattgtgtattggtcaatgaggccatttttacatttattacgttacagagttcatggaggttcacctttgtgactgattggtgataaaagatagccaagtgtcttacaagcagcctctgagtcaagtgttctaattttggaacaaagcaggttttactgcttttccagacacaaggctgctaaaccaattaagaaaataattaatttctttcaagcaactaaaaaatatatggtaatttaaaggtgtctgcttatttggttgaacaatttaattgggaaagtttgtcatcatttgaaaaaggaaatataaaaggaacaaccatatagccaacctgtggtctggcagaaacaacgtctctagcaatagtaccaaagtaagtaatggagtcttttttttggcaggtctgcagtaaaagataacattttcttttcttagtcctcctgctctcaacccccatattttgcctttgaatacgtgggttttagtatatatagcccaaaatggtaactgtctccagaacagcaaccacattgaattcttgtgacttaggaaagcttcttatagttgctgacattaattgcaagaaataactatatactactttgagaagtaaacatgtcaaaaaaaacaaagttcagatatgggacaaaatttaaaaattcagtaacatttataaacagaattgaatgaaaagagttacagaccaacttaaacatcaattcgtgtcagtaaactgacttttgggggtaatgatcattgttttgtatctcaaaagtattgagtttagaaatcagttgtatgatactacctttgtatgtctgtcttttcccgtgtatttttaaataactggtgatctataatttaataaaatttttcgttggtgtaatattatttcaaaagccctccaaatttagtcatcaaaattaaaatgacatttttcaagtttatttttaagcaactgaattcgtaaaattaaagtaacaaaaag

SEQ ID NO: 361564 - DNA, 2748 bp, Homo sapiens
agcttccgcaagctgcgcagcgccgggcctgagggcgtgtatccgcggccgtagcagccgggctggtcctgctgcgagccggcggcccggagtggggcggcgggtaagtgggcacgaacgcggtggacgctgtacagtcgccttcgtcggtagggaactgctggcggcctaggggtcgtcctgagagggaaaagcgggctccggctgcatctgcggcgccctgcgtggccgtaagagccaagtggcctcagaggctcgccccctacgcaaatcctcgttgtcttgccagggtcctgacgtgacgtgcggccgcgagaaggaaggggcgggttgggggaggcgctgaggtggtagcagcggcggcttttgctgagttttctctggcccagagcgctcgggctgtcggtctagcaggggggactcccctgaggggccgctgcgggtcgccgtcttcggaggcaccggcgagggcagagccaacagcctcttcacggtctgtaaggtcattgtttgccagtcgtgggcagcgcggcaaacctgctgggaaaaggttttctggttggaataggatgagtaccgcaccagctttgccttccagctgagatgtaaatttcaggcctccatcctgtggaacgtgggaaaactatcttgagtgttggcatgttctaagtatgacataatagtttaatgtatgataaatcatgggtgtttagacgaaagatttacacatataaattggaggctttagcggtcttagtgtaactaacttttcgtccccttaacccttgatgcctgttctatgggtctctagagcggaaggagcattatactccggaaacatttgctggaaggggttatgagaaattcctctctgtatgctaactccgtaatacaagcgtttgtgtattttaaaatcacagctgttccaaatataatctagcctcgttttccccctccgtcggatgataggtgttcttcaggacagttttattttaagcaattcttagtctcaagtaaacaccatcattaaaagaactgagaactattatcaattcttcctttggagtccatcttcaatggaaaggagaagggaaaaccttttttaaaaagaagaaagaaaactgaagtttttgatttgactagagaaatattcagaagactccttattttcacctagtctaatcacaaaattgagaaacaaacattatcccttgaccatgtaaattttacaccacattatgtcaacagcatgtaccttccacattgagtattcagaaagaagtgatctgaactctgaccattctttatggatacattaagtcaaatataagagtctgactacttgacacactggctcggtgagttctgctttttctttttaatataaatttattatgttggtaaatttagcttttggcttttcactttgctctcatgatataagaaaatgtaggttttctctttcagtttgaattttcctattcagtaaaacaacatgctagaaaacaaacttttggaaaggcattgtaactattttttcaaatagaaccataataacaagtcttgtcttaccctaaagtcaaatgctgaagattctttactgctgtcatcagcatctacaagtagcatattttggatggtgtttgtgtgctacttcaaagtaactaggaaaaaataatcctcgcaacacaggtaccttgtcatgtcagaattgggggtgttaggttgccagttgtatcagtgttgattcatttcattacttcctacagagcaaacatgaacgttggagttgcccacagtgaagtgaatccaaatacccgtgtcatgaacagccggggtatgtggctgacatatgcattgggagttggcttgcttcatattgtcttactcagcattcccttcttcagtgttcctgttgcttggactttaacaaatattatacataatctggggatgtacgtatttttgcatgcagtgaaaggaacacctttcgaaactcctgaccagggtaaagcaaggctcctaactcattgggaacaactggactatggagtacagtttacatcttcacggaagtttttcacaatttctccaataattctatattttctggcaagtttctatacgaagtatgatccaactcacttcatcctaaacacagcttctctcctgagtgtactaattcccaaaatgccacaactacatggtgttcggatctttggaattaataagtattgaaatgttttgaaactgaaaaaaaattttacagctactgaatttcttataaggaaggagtggttagtaaactgcactgtttctctgataatgtgaaatgagaagtatttacattggagggccaatggctggtccttcaagtgctgttttgaagtgcagatttccattaaatgatgcctctgtttaatacacctggtacatttctgaagaggggctttataagcaggctgggcaggcccagcttataagttaaagggcatcacagtgagggtgtagtagataaattcaaggaaataagagatttgtaagaaactaggaccagcttaacttataatgaatgggcattgtgttaagaaaagaacatttccagtcattcagctgtggttatttaaagcagacttacatgtaaaccggaatcctctctatacaagtttattaaagattatttttcggtaataaaaataatctttaataaacttgtatagagaggattatttttattaccgtaaaaaa

SEQ ID NO: 361565 - DNA, 1374 bp, Homo sapiens
gcggggcgccgggccctgggcggggccttcccggctgacggcctgcgtgcactgcgcttgcgcgggttgagggcggtggctcaggctcctggaaaggaccgtccacccctccgcgctggcggtgtggacgcggaactcagcggagaaacgcgattgagaaatggaaaagaaaatgaaataaatcagcagttatgaggcagagcctaagagaactatggcaacatcaggtgactgtcccagaagtgaatcgcagggagaagagcctgctgagtgcagtgaggcgggtctcctgcaggagggagtacagccagaggagtttgtggccatcgcggactacgctgccaccgatgagacccagctcagttttttgagaggagaaaaaattcttatcctgagacaaaccactgcagattggtggtggggtgagcgtgcgggctgctgtgggtacattccggcaaaccatgtggggaagcacgtggatgagtacgaccccgaggacacgtggcaggatgaagagtacttcggcagctatggaactctgaaactccacttggagatgttggcagaccagccacgaacaactaaataccacagtgtcatcctgcagaataaagaatccctgacggataaagtcatcctggacgtgggctgtgggactgggatcatcagtctcttctgtgcacactatgcgcggcctagagcggtgtacgcggtggaggccagtgagatggcacagcacacggggcagctggtcctgcagaacggctttgctgacatcatcaccgtgtaccagcagaaggtggaggatgtggtgctgcccgagaaggtggacgtgctggtgtctgagtggatggggacctgcctgctggctgcgcctctcctgagctgccgcattctcccctgcacctgtgcgtctggccctcttcacgtcctcctggcctgctgtctgcctctcccctgcacctgtgcgtctgtccctcttcatgtcctccttgcctgctgtctgcctgttctcagagcccctcagccctcaggccttcatctctcctggcccatcttcctactctgacgctgacatgtagtaaaagtctgaagacagagaagagtgcatgtgcgtttagcataggaggggcagctttcagtcagtgcagcaagggcatgtagttgttcagagatggtgctggaacgactgatttggagaaaagaggcccttcttcacaccatctgctaaaataaacctcagatgggctcaagagttaaatatttaagaaaaggaggaaacaaaaaaattgctacaagtttatttgttgttaggatgggaaaggtttttctaagaaccaagttcataatgaagctgtcaaataaaatacttga

SEQ ID NO: 361566 - DNA, 4046 bp, Homo sapiens
gcggggcgccgggccctgggcggggccttcccggctgacggcctgcgtgcactgcgcttgcgcgggttgagggcggtggctcaggctcctggaaaggaccgtccacccctccgcgctggcggtgtggacgcggaactcagcggagaaacgcgattgagaaatggaaaagaaaatgaaataaatcagcagttatgaggcagagcctaagagaactatggcaacatcaggtgactgtcccagaagtgaatcgcagggagaagagcctgctgagtgcagtgaggcgggtctcctgcaggagggagtacagccagaggagtttgtggccatcgcggactacgctgccaccgatgagacccagctcagttttttgagaggagaaaaaattcttatcctgagacaaaccactgcagattggtggtggggtgagcgtgcgggctgctgtgggtacattccggcaaaccatgtggggaagcacgtggatgagtacgaccccgaggacacgtggcaggatgaagagtacttcggcagctatggaactctgaaactccacttggagatgttggcagaccagccacgaacaactaaataccacagtgtcatcctgcagaataaagaatccctgacggataaagtcatcctggacgtgggctgtgggactgggatcatcagtctcttctgtgcacactatgcgcggcctagagcggtgtacgcggtggaggccagtgagatggcacagcacacggggcagctggtcctgcagaacggctttgctgacatcatcaccgtgtaccagcagaaggtggaggatgtggtgctgcccgagaaggtggacgtgctggtgtctgagtggatggggacctgcctgctgtttgagttcatgatcgagtccatcctgtatgcccgggatgcctggctgaaggaggacggggtcatttggcccaccatggctgcgttgcaccttgtgccctgcagtgctgataaggattatcgtagcaaggtgctcttctgggacaacgcgtacgagttcaacctcagcgctctgaagtaagtgtccacagctgggactggcaccgtcttgtggggcctcctggtccacagtctgcaggtgggccaaggccctgggagatcccatacgacggttggataaatgagggtacctgtgcacccagataggacaatctgttgtagcattggagtaattaaagcagtatggtgctataacaagacagatgggcagagcagggtagaatgcaaggaacaaaaattttcgtatgtgaaaaaggtggcattacgattaggagggagtgagggccaagtcagcaaattattctggagcagttgattagcccttgttctctcacgccatacgtgaaaacttaattctgcatggaatcagcgtcagcgacagacatccatgggggcctgtgtgcaccatcttaggtggagaaatgagcagcaacaatggatggaatggaccctgggctagatagaatctggcagtctatgtggcagaaatcagcaaaaacacgattgtaaaagcaaacaagtaattagagaaatcacgtgctgtcaggtcttggaatcaattagaaagagatgactagccagatggaattgcagcccaatcatgtgaacaggcaaaccgcaaaaaataaataaaattaccaataaatacatgaaaaattataatgttgttagtagttaaaatgcgaattaaaatacatgctgttttccctaccagacaagcaaagagtaaattaaaatagtagcccaggcttgcctggcagtggcagggaggtgtggctgccagggccttagaggttggcatcaggctgcccaccccagtcactgccagagcctcccacctgagtgttcctcccggcactggaagccagtggccgtccagaggaacgtgattgaattgctgtatatccatctggtggagcactgctgtgtgtctgttaaaaaagaaaccataggtttttagggatatgtaatgatatttagaaagggtttaagagacagtaaagcttggcagaataaaccgtgtatacagaatggatgtttgcttgcataaataaatttatataaatatgtctgggggataaaaataagtatatcacaatgctaagacaggcatatggggaatttaagcttttctttatacttgtccatagtttccaatttttaaatttgtaattttttatcagaaaaataaatgtgtaaatatagtggaatctttattaaaacattcacttttatttgctatttcagaagttactgctttgcttattttttacaacatttctgtggtaaataatcggtgacttacaagcctagtgcagccagtgatgggggttggcaaacggtgacatgcaggggccatgcggcgtctagtgtctgtttctgtgttgaatttgtgtagcaacagagcaagtatttctcctgaaactcagactcactcaggccacctcagcccttctagttcctttcgtttattatagagtaacctacagcaggaataccgcgttcatttactgttaatagaagatccacaaaagattttgaaatcaaatacattctaaaactaggcaagacacgctgcaactccccttgtcctctgggttatgaggggtgagcgttggtttccgtgtgctcagatcccatgaatgagacctcacagggaagcgcccagtgactggcaggctccttaatgcctccaggtcaggctcaggaagtctctggatgcctgggtagagtctgggtcttctcagagcgggaggcacccagggcctgtggaggcctgagggctgctctggggttccagggccccagatagtggcttagcatcctggtgacacagaagggagagcactcaccgcggtcccacgtgtgtgttttgaagcctaagatgtttgcaatgactctcaacagtcgctttgaccttttcccctagatctttagcagttaaggagtttttttcaaagcccaagtataaccacattttgaaaccagaagactgtctctctgaaccgtgcactatattgcagttggacatgagaaccgtgcaaatttctgatctagagaccctgaggggcgagctgcgcttcgacatcaggaaggcggggaccctgcacggcttcacggcctggtttagcgtccacttccagagcctgcaggaggggcagccgccgcaggtgctcagcaccgggcccttccaccccaccacacactggaagcagacgctgttcatgatggacgacccagtccctgtccatacaggagacgtggtcacgggttcagttgtgttgcagagaaacccagtgtggagaaggcacatgtctgtggctctgagctgggctgtcacttccagacaagaccccacatctcaaaaagttggagaaaaagtcttccccatctggagatgacagttgatgctttatttggaaagcagtgtgcatatcttgaggggtgatgaacacaagcaaaccaagttgcacctggcttctgcacactcctgcgaaagtcggtgaacattcactccacattgacccctccctagcctggcaggtgacgtcagggtccttcacagacaaacacgcttgggctcggcaggagctgccgtggccacccccgctgcccagtgtctgccctctagaagtaggctgtgtttccaggtgttcacccgtggtgcccacagtgccgacccgtggctgggtcggagctccatgttcctaagctaggtctaggtctacactcctaggacgcacgcatatcagcccgtgtaccctgtgacagtgactgtccccacctcctgtgttagtggtgcccttactgccgtcgctcatccactcgtgtgggacgtaggattgcacagggctgtgccagtggcgtgtagggaacactgccctggctcagcgtgcgagctaaggtggcgatgtatgcgatgggactctgcatgggatagtacagttgtgtagacgtcttccaaataaattatgtgttggtgcatcgcacatgctcaataaatatttttaaatgagtga

SEQ ID NO: 361567 - DNA, 3146 bp, Homo sapiens
gcggggcgccgggccctgggcggggccttcccggctgacggcctgcgtgcactgcgcttgcgcgggttgagggcggtggctcaggctcctggaaaggaccgtccacccctccgcgctggcggtgtggacgcggaactcagcggagaaacgcgattgagaaatggaaaagaaaatgaaataaatcagcagttatgaggcagagcctaagagaactatggcaacatcaggtgactgtcccagaagtgaatcgcagggagaagagcctgctgagtgcagtgaggcgggtctcctgcaggagggagtacagccagaggagtttgtggccatcgcggactacgctgccaccgatgagacccagctcagttttttgagaggagaaaaaattcttatcctgagacaaaccactgcagattggtggtggggtgagcgtgcgggctgctgtgggtacattccggcaaaccatgtggggaagcacgtggatgagtacgaccccgaggacacgtggcaggatgaagagtacttcggcagctatggaactctgaaactccacttggagatgttggcagaccagccacgaacaactaaataccacagtgtcatcctgcagaataaagaatccctgacggataaagtcatcctggacgtgggctgtgggactgggatcatcagtctcttctgtgcacactatgcgcggcctagagcggtgtacgcggtggaggccagtgagatggcacagcacacggggcagctggtcctgcagaacggctttgctgacatcatcaccgtgtaccagcagaaggtggaggatgtggtgctgcccgagaaggtggacgtgctggtgtctgagtggatggggacctgcctgctgtttgagttcatgatcgagtccatcctgtatgcccgggatgcctggctgaaggaggacggggtcatttggcccaccatggctgcgttgcaccttgtgccctgcagtgctgataaggattatcgtagcaaggtgctcttctgggacaacgcgtacgagttcaacctcagcgctctgaaatctttagcagttaaggagtttttttcaaagcccaagtataaccacattttgaaaccagaagactgtctctctgaaccgtgcactatattgcagttggacatgagaaccgtgcaaatttctgatctagagaccctgaggggcgagctgcgcttcgacatcaggaaggcggggaccctgcacggcttcacggcctggtttagcgtccacttccagagcctgcaggaggggcagccgccgcaggtgctcagcaccgggcccttccaccccaccacacactggaagcagacgctgttcatgatggacgacccagtccctgtccatacaggagacgtggtcacgggttcagttgtgttgcagagaaacccagtgtggagaaggcacatgtctgtggctctgagctgggctgtcacttccagacaagaccccacatctcaaaaagttggagaaaaagtcttccccatctggagatgacagttgatgctttatttggaaagcagtgtgcatatcttgaggggtgatgaacacaagcaaaccaagttgcacctggcttctgcacactcctgcgaaagtcggtgaacattcactccacattgacccctccctagcctggcaggtgacgtcagggtccttcacagacaaacacgcttgggctcggcaggagctgccgtggccacccccgctgcccagtgtctgccctctagaagtaggctgtgtttccaggtgttcacccgtggtgcccacagtgccgacccgtggctgggtcggagctccatgttcctaagctaggtctaggtctacactcctaggacgcacgcatatcagcccgtgtaccctgtgacagtgactgtccccacctcctgtgttagtggtgcccttactgccgtcgctcatccactcgtgtgggacgtaggattgcacagggctgtgccagtggcgtgtagggaacactgccctggctcagcgtgcgagctaaggtggcgatgtatgcgatgggactctgcatgggatagtacagttgtgtagacgtcttccaaataaattatgtgttggtgcatcgcacatgctcaataaatatttttaaatgagtgaatgtcattgtgtatcctgttttatgcatatatgttattttttgtaattacaggatcatactatatgcattgctttataagtttttctcaatattgtgaaaaaacttccacatcagtagatacatgtccataatttttttttgtattgttttgatttttattaaattttattgaaatataggctgggtgcagtggcttacctctgtaatcccaacactttgagaggctgaggtgggatgattccttgagctcaggagttcaagaccaccctgggcaacacagcgagatactatctctacaaaaaaaatagaaaaattagctgggcatggtggcgtgtgcctgtagtcccagctactcgggaggctgaggcggggggatcacttgagcccaggaggttgaggctgcagtgatctaggattgcactgctgcactccagcgtgggtgacagagcaagaccctgtctcaaaaaccccaaaaaacaaaactgaaatatcaaatatatattgaaaacagtgctagtcatgggtacatagatgatggcattttataaagtggacgcacatgtaaccagcatccaggccaggacacactacagattccccgattccccttccactcagtgcccaccctctcaagggtgatgtcctgacttgtaactgtcgattactcttgcctgaatggagttgtacacgtgttcttttgtgtctgccttctttaattaaacattgtttgtgagactcatctatgaattttagacagtgtggttgtggttgactttttcattgtggcatagtattcaactgcatgaatagaccacagtttatgatcttgtttcacatggtgtccttttgggttgttgccatggtttagctatgatgattactgagactgtggacatttctgtgtatgtgttttggtgcatgtatgtacacatttctgttgggtgtacactgtataccaggttttcaagtcaaggaatctaatatccctgccagctgtgcatgagagttggc

SEQ ID NO: 361568 - DNA, 2382 bp, Homo sapiens
gcggggcgccgggccctgggcggggccttcccggctgacggcctgcgtgcactgcgcttgcgcgggttgagggcggtggctcaggctcctggaaaggaccgtccacccctccgcgctggcggtgtggacgcggaactcagcggagaaacgcgattgagagcagtgtgtggattacactatcactggaaaaatacgaattgagaagaaggaaaagactggaagatgcagaccttggttcctgttagtggaaacactgtaaggtcccagaaatggaaaagaaaatgaaataaatcagcagttatgaggcagagcctaagagaactatggcaacatcaggtgactgtcccagaagtgaatcgcagggagaagagcctgctgagtgcagtgaggcgggtctcctgcaggagggagtacagccagaggagtttgtggccatcgcggactacgctgccaccgatgagacccagctcagttttttgagaggagaaaaaattcttatcctgagacaaaccactgcagattggtggtggggtgagcgtgcgggctgctgtgggtacattccggcaaaccatgtggggaagcacgtggatgagtacgaccccgaggacacgtggcaggatgaagagtacttcggcagctatggaactctgaaactccacttggagatgttggcagaccagccacgaacaactaaataccacagtgtcatcctgcagaataaagaatccctgacggataaagtcatcctggacgtgggctgtgggactgggatcatcagtctcttctgtgcacactatgcgcggcctagagcggtgtacgcggtggaggccagtgagatggcacagcacacggggcagctggtcctgcagaacggctttgctgacatcatcaccgtgtaccagcagaaggtggaggatgtggtgctgcccgagaaggtggacgtgctggtgtctgagtggatggggacctgcctgctgtttgagttcatgatcgagtccatcctgtatgcccgggatgcctggctgaaggaggacggggtcatttggcccaccatggctgcgttgcaccttgtgccctgcagtgctgataaggattatcgtagcaaggtgctcttctgggacaacgcgtacgagttcaacctcagcgctctgaagtaagtgtccacagctgggactggcaccgtcttgtggggcctcctggtccacagtctgcaggtgggccaaggccctgggagatcccatacgacggttggataaatgagggtacctgtgcacccagataggacaatctgttgtagcattggagtaattaaagcagtatggtgctataacaagacagatgggcagagcagggtagaatgcaaggaacaaaaattttcgtatgtgaaaaaggtggcattacgattaggagggagtgagggccaagtcagcaaattattctggagcagttgattagcccttgttctctcacgccatacgtgaaaacttaattctgcatggaatcagcgtcagcgacagacatccatgggggcctgtgtgcaccatcttaggtggagaaatgagcagcaacaatggatggaatggaccctgggctagatagaatctggcagtctatgtggcagaaatcagcaaaaacacgattgtaaaagcaaacaagtaattagagaaatcacgtgctgtcaggtcttggaatcaattagaaagagatgactagccagatggaattgcagcccaatcatgtgaacaggcaaaccgcaaaaaataaataaaattaccaataaatacatgaaaaattataatgttgttagtagttaaaatgcgaattaaaatacatgctgttttccctaccagacaagcaaagagtaaattaaaatagtagcccaggcttgcctggcagtggcagggaggtgtggctgccagggccttagaggttggcatcaggctgcccaccccagtcactgccagagcctcccacctgagtgttcctcccggcactggaagccagtggccgtccagaggaacgtgattgaattgctgtatatccatctggtggagcactgctgtgtgtctgttaaaaaagaaaccataggtttttagggatatgtaatgatatttagaaagggtttaagagacagtaaagcttggcagaataaaccgtgtatacagaatggatgtttgcttgcataaataaatttatataaatatgtctgggggataaaaataagtatatcacaatgctaagacaggcatatggggaatttaagcttttctttatacttgtccatagtttccaatttttaaatttgtaattttttatcagaaaaataaatgtgtaaatatagtggaatctttattaaaacattcacttttatttgctatttca

SEQ ID NO: 361569 - DNA, 3866 bp, Homo sapiens
gcggggcgccgggccctgggcggggccttcccggctgacggcctgcgtgcactgcgcttgcgcgggttgagggcggtggctcaggctcctggaaaggaccgtccacccctccgcgctggcggtgtggacgcggaactcagcggagaaacgcgattgagaaatggaaaagaaaatgaaataaatcagcagttatgaggcagagcctaagagaactatggcaacatcaggtgactgtcccagaagtgaatcgcagggagaagagcctgctgagtgcagtgaggcgggtctcctgcaggagggagtacagccagaggagtttgtggccatcgcggactacgctgccaccgatgagacccagctcagttttttgagaggagaaaaaattcttatcctgagacaaaccactgcagattggtggtggggtgagcgtgcgggctgctgtgggtacattccggcaaaccatgtggggaagcacgtggatgagtacgaccccgaggacacgtggcaggatgaagagtacttcggcagctatggaactctgaaactccacttggagatgttggcagaccagccacgaacaactaaataccacagtgtcatcctgcagaataaagaatccctgacggataaagtcatcctggacgtgggctgtgggactgggatcatcagtctcttctgtgcacactatgcgcggcctagagcggtgtacgcggtggaggccagtgagatggcacagcacacggggcagctggtcctgcagaacggctttgctgacatcatcaccgtgtaccagcagaaggtggaggatgtggtgctgcccgagaaggtggacgtgctggtgtctgagtggatggggacctgcctgctgtttgagttcatgatcgagtccatcctgtatgcccgggatgcctggctgaaggaggacggggtcatttggcccaccatggctgcgttgcaccttgtgccctgcagtgctgataaggattatcgtagcaaggtgctcttctgggacaacgcgtacgagttcaacctcagcgctctgaagtaagtgtccacagctgggactggcaccgtcttgtggggcctcctggtccacagtctgcaggtgggccaaggccctgggagatcccatacgacggttggataaatgagggtacctgtgcacccagataggacaatctgttgtagcattggagtaattaaagcagtatggtgctataacaagacagatgggcagagcagggtagaatgcaaggaacaaaaattttcgtatgtgaaaaaggtggcattacgattaggagggagtgagggccaagtcagcaaattattctggagcagttgattagcccttgttctctcacgccatacgtgaaaacttaattctgcatggaatcagcgtcagcgacagacatccatgggggcctgtgtgcaccatcttaggtggagaaatgagcagcaacaatggatggaatggaccctgggctagatagaatctggcagtctatgtggcagaaatcagcaaaaacacgattgtaaaagcaaacaagtaattagagaaatcacgtgctgtcaggtcttggaatcaattagaaagagatgactagccagatggaattgcagcccaatcatgtgaacaggcaaaccgcaaaaaataaataaaattaccaataaatacatgaaaaattataatgttgttagtagttaaaatgcgaattaaaatacatgctgttttccctaccagacaagcaaagagtaaattaaaatagtagcccaggcttgcctggcagtggcagggaggtgtggctgccagggccttagaggttggcatcaggctgcccaccccagtcactgccagagcctcccacctgagtgttcctcccggcactggaagccagtggccgtccagaggaacgtgattgaattgctgtatatccatctggtggagcactgctgtgtgtctgttaaaaaagaaaccataggtttttagggatatgtaatgatatttagaaagggtttaagagacagtaaagcttggcagaataaaccgtgtatacagaatggatgtttgcttgcataaataaatttatataaatatgtctgggggataaaaataagtatatcacaatgctaagacaggcatatggggaatttaagcttttctttatacttgtccatagtttccaatttttaaatttgtaattttttatcagaaaaataaatgtgtaaatatagtggaatctttattaaaacattcacttttatttgctatttcagaagttactgctttgcttattttttacaacatttctgtggtaaataatcggtgacttacaagcctagtgcagccagtgatgggggttggcaaacggtgacatgcaggggccatgcggcgtctagtgtctgtttctgtgttgaatttgtgtagcaacagagcaagtatttctcctgaaactcagactcactcaggccacctcagcccttctagttcctttcgtttattatagagtaacctacagcaggaataccgcgttcatttactgttaatagaagatccacaaaagattttgaaatcaaatacattctaaaactaggcaagacacgctgcaactccccttgtcctctgggttatgaggggtgagcgttggtttccgtgtgctcagatcccatgaatgagacctcacagggaagcgcccagtgactggcaggctccttaatgcctccaggtcaggctcaggaagtctctggatgcctgggtagagtctgggtcttctcagagcgggaggcacccagggcctgtggaggcctgagggctgctctggggttccagggccccagatagtggcttagcatcctggtgacacagaagggagagcactcaccgcggtcccacgtgtgtgttttgaagcctaagatgtttgcaatgactctcaacagtcgctttgaccttttcccctagatctttagcagttaaggagtttttttcaaagcccaagtataaccacattttgaaaccagaagactgtctctctgaaccgtgcactatattgcagttggacatgagaaccgtgcaaatttctgatctagagaccctgaggggcgagctgcgcttcgacatcaggaaggcggggaccctgcacggcttcacggcctggtttagcgtccacttccagagcctgcaggaggggcagccgccgcaggtgctcagcaccgggcccttccaccccaccacacactggaagcagacgctgttcatgatggacgacccagtccctgtccatacaggagacgtggtcacgggttcagttgtgttgcagagaaacccagtgtggagaaggcacatgtctgtggctctgagctgggctgtcacttccagacaagaccccacatctcaaaaagttggagaaaaagtcttccccatctggagatgacagttgatgctttatttggaaagcagtgtgcatatcttgaggggtgatgaacacaagcaaaccaagttgcacctggcttctgcacactcctgcgaaagtcggtgaacattcactccacattgacccctccctagcctggcaggtgacgtcagggtccttcacagacaaacacgcttgggctcggcaggagctgccgtggccacccccgctgcccagtgtctgccctctagaagtaggctgtgtttccaggtgttcacccgtggtgcccacagtgccgacccgtggctgggtcggagctccatgttcctaagctaggtctaggtctacactcctaggacgcacgcatatcagcccgtgtaccctgtgacagtgactgtccccacctcctgtgttagtggtgcccttactgtcgggctagtcgggggggtacccgagctc

SEQ ID NO: 361570 - DNA, 2873 bp, Homo sapiens
tggccctctcgcttcctgcccccttctcaccccccttcactggccacctgttccaaccctccatgatcctgttcctcccgagggcatcttaggagggcagggtcctgcgcgcactgcggcctccactccgaccccgtcccagtttggacccaggtcttccaatgaaaatataattatgcaaatcagtaagcatttgtaactacgaatatcacaaaaataagcttcaagtctggatttagaagtgaagcatgcattttaaacaaagaattgctatgcaattttaaaaacacattgatcccagagcagtgtgtggattacactatcactggaaaaatacgaattgagaagaaggaaaagactggaagatgcagaccttggttcctgttagtggaaacactgtaaggtcccaggtagggacttttaattggaattaaagctatcacacttctaagaaattaatgaatactgatttattgccttaagtcgacacctgatctaacagaaactaacaggcttcagcaaatgaacaagattaacaccttgcagactagtgaagaaaacacactatttgaagtttatgatttttaaatgcttttgtctctgtaaagtattgtaaattttcatttctacactaatcttcacacatacacattttacttctatttggtagaggacatcatgcacattagaagttaagtgaactcaattattaagcaatgtaacaagtactttgtgtctccttctctttttaaaagtagaaatggaaaagaaaatgaaataaatcagcagttatgaggcagagcctaagagaactatggcaacatcaggtgactgtcccagaagtgaatcgcagggagaagagcctgctgagtgcagtgaggcgggtctcctgcaggagggagtacagccagaggagtttgtggccatcgcggactacgctgccaccgatgagacccagctcagttttttgagaggagaaaaaattcttatcctgagacaaaccactgcagattggtggtggggtgagcgtgcgggctgctgtgggtacattccggcaaaccatgtggggaagcacgtggatgagtacgaccccgaggacacgtggcaggatgaagagtacttcggcagctatggaactctgaaactccacttggagatgttggcagaccagccacgaacaactaaataccacagtgtcatcctgcagaataaagaatccctgacggataaagtcatcctggacgtgggctgtgggactgggatcatcagtctcttctgtgcacactatgcgcggcctagagcggtgtacgcggtggaggccagtgagatggcacagcacacggggcagctggtcctgcagaacggctttgctgacatcatcaccgtgtaccagcagaaggtggaggatgtggtgctgcccgagaaggtggacgtgctggtgtctgagtggatggggacctgcctgctgtttgagttcatgatcgagtccatcctgtatgcccgggatgcctggctgaaggaggacggggtcatttggcccaccatggctgcgttgcaccttgtgccctgcagtgctgataaggattatcgtagcaaggtgctcttctgggacaacgcgtacgagttcaacctcagcgctctgaagtaagtgtccacagctgggactggcaccgtcttgtggggcctcctggtccacagtctgcaggtgggccaaggccctgggagatcccatacgacggttggataaatgagggtacctgtgcacccagataggacaatctgttgtagcattggagtaattaaagcagtatggtgctataacaagacagatgggcagagcagggtagaatgcaaggaacaaaaattttcgtatgtgaaaaaggtggcattacgattaggagggagtgagggccaagtcagcaaattattctggagcagttgattagcccttgttctctcacgccatacgtgaaaacttaattctgcatggaatcagcgtcagcgacagacatccatgggggcctgtgtgcaccatcttaggtggagaaatgagcagcaacaatggatggaatggaccctgggctagatagaatctggcagtctatgtggcagaaatcagcaaaaacacgattgtaaaagcaaacaagtaattagagaaatcacgtgctgtcaggtcttggaatcaattagaaagagatgactagccagatggaattgcagcccaatcatgtgaacaggcaaaccgcaaaaaataaataaaattaccaataaatacatgaaaaattataatgttgttagtagttaaaatgcgaattaaaatacatgctgttttccctaccagacaagcaaagagtaaattaaaatagtagcccaggcttgcctggcagtggcagggaggtgtggctgccagggccttagaggttggcatcaggctgcccaccccagtcactgccagagcctcccacctgagtgttcctcccggcactggaagccagtggccgtccagaggaacgtgattgaattgctgtatatccatctggtggagcactgctgtgtgtctgttaaaaaagaaaccataggtttttagggatatgtaatgatatttagaaagggtttaagagacagtaaagcttggcagaataaaccgtgtatacagaatggatgtttgcttgcataaataaatttatataaatatgtctgggggataaaaataagtatatcacaatgctaagacaggcatatggggaatttaagcttttctttatacttgtccatagtttccaatttttaaatttgtaattttttatcagaaaaataaatgtgtaaatatagtggaatctttattaaaacattcacttttatttgctatttca

SEQ ID NO: 361571 - DNA, 2337 bp, Homo sapiens
  misc_feature (32)..(32): n is a, c, g, or t
  misc_feature (42)..(42): n is a, c, g, or t
  misc_feature (44)..(44): n is a, c, g, or t
  misc_feature (46)..(46): n is a, c, g, or t
  misc_feature (51)..(51): n is a, c, g, or t
aagtcatcctggacgtgggctgtgggactggnatcatcagtntntnctgtncacactatgcgcggcctagagcggtgtacgcggtggaggccagtaagatggcacagcacacggggcagctggtcctgcagaacggctttcctgacatcatcaccgtgtaccagcagagactggaagatgcagaccttggttcctgttagtggaaacactgtaaggtcccagaaatggaaaagaaaatgaaataaatcagcagttatgaggcagagcctaagagaactatggcaacatcaggtgactgtcccagaagtgaatcgcagggagaagagcctgctgagtgcagtgaggcgggtctcctgcaggagggagtacagccagaggagtttgtggccatcgcggactacgctgccaccgatgagacccagctcagttttttgagaggagaaaaaattcttatcctgagacaaaccactgcagattggtggtggggtgagcgtgcgggctgctgtgggtacattccggcaaaccatgtggggaagcacgtggatgagtacgaccccgaggacacgtggcaggatgaagagtacttcggcagctatggaactctgaaactccacttggagatgttggcagaccagccacgaacaactaaataccacagtgtcatcctgcagaataaagaatccctgacggataaagtcatcctggacgtgggctgtgggactgggatcatcagtctcttctgtgcacactatgcgcggcctagagcggtgtacgcggtggaggccagtgagatggcacagcacacggggcagctggtcctgcagaacggctttgctgacatcatcaccgtgtaccagcagaaggtggaggatgtggtgctgcccgagaaggtggacgtgctggtgtctgagtggatggggacctgcctgctgtttgagttcatgatcgagtccatcctgtatgcccgggatgcctggctgaaggaggacggggtcatttggcccaccatggctgcgttgcaccttgtgccctgcagtgctgataaggattatcgtagcaaggtgctcttctgggacaacgcgtacgagttcaacctcagcgctctgaagtaagtgtccacagctgggactggcaccgtcttgtggggcctcctggtccacagtctgcaggtgggccaaggccctgggagatcccatacgacggttggataaatgagggtacctgtgcacccagataggacaatctgttgtagcattggagtaattaaagcagtatggtgctataacaagacagatgggcagagcagggtagaatgcaaggaacaaaaattttcgtatgtgaaaaaggtggcattacgattaggagggagtgagggccaagtcagcaaattattctggagcagttgattagcccttgttctctcacgccatacgtgaaaacttaattctgcatggaatcagcgtcagcgacagacatccatgggggcctgtgtgcaccatcttaggtggagaaatgagcagcaacaatggatggaatggaccctgggctagatagaatctggcagtctatgtggcagaaatcagcaaaaacacgattgtaaaagcaaacaagtaattagagaaatcacgtgctgtcaggtcttggaatcaattagaaagagatgactagccagatggaattgcagcccaatcatgtgaacaggcaaaccgcaaaaaataaataaaattaccaataaatacatgaaaaattataatgttgttagtagttaaaatgcgaattaaaatacatgctgttttccctaccagacaagcaaagagtaaattaaaatagtagcccaggcttgcctggcagtggcagggaggtgtggctgccagggccttagaggttggcatcaggctgcccaccccagtcactgccagagcctcccacctgagtgttcctcccggcactggaagccagtggccgtccagaggaacgtgattgaattgctgtatatccatctggtggagcactgctgtgtgtctgttaaaaaagaaaccataggtttttagggatatgtaatgatatttagaaagggtttaagagacagtaaagcttggcagaataaaccgtgtatacagaatggatgtttgcttgcataaataaatttatataaatatgtctgggggataaaaataagtatatcacaatgctaagacaggcatatggggaatttaagcttttctttatacttgtccatagtttccaatttttaaatttgtaattttttatcagaaaaataaatgtgtaaatatagtggaatctttattaaaacattcacttttatttgctatttca

SEQ ID NO: 361572 - DNA, 2132 bp, Homo sapiens
gcggggcgccgggccctgggcggggccttcccggctgacggcctgcgtgcactgcgcttgcgcgggttgagggcggtggctcaggctcctggaaaggaccgtccacccctccgcgctggcggtgtggacgcggaactcagcggagaaacgcgattgagaaatggaaaagaaaatgaaataaatcagcagttatgaggcagagcctaagagaactatggcaacatcaggtgactgtcccagaagtgaatcgcagggagaagagcctgctgagtgcagtgaggcgggtctcctgcaggagggagtacagccagaggagtttgtggccatcgcggactacgctgccaccgatgagacccagctcagttttttgagaggagaaaaaattcttatcctgagacaaaccactgcagattggtggtggggtgagcgtgcgggctgctgtgggtacattccggcaaaccatgtggggaagcacgtggatgagtacgaccccgaggacacgtggcaggatgaagagtacttcggcagctatggaactctgaaactccacttggagatgttggcagaccagccacgaacaactaaataccacagtgtcatcctgcagaataaagaatccctgacggataaagtcatcctggacgtgggctgtgggactgggatcatcagtctcttctgtgcacactatgcgcggcctagagcggtgtacgcggtggaggccagtgagatggcacagcacacggggcagctggtcctgcagaacggctttgctgacatcatcaccgtgtaccagcagaaggtggaggatgtggtgctgcccgagaaggtggacgtgctggtgtctgagtggatggggacctgcctgctgtttgagttcatgatcgagtccatcctgtatgcccgggatgcctggctgaaggaggacggggtcatttggcccaccatggctgcgttgcaccttgtgccctgcagtgctgataaggattatcgtagcaaggtgctcttctgggacaacgcgtacgagttcaacctcagcgctctgaagtaagtgtccacagctgggactggcaccgtcttgtggggcctcctggtccacagtctgcaggtgggccaaggccctgggagatcccatacgacggttggataaatgagggtacctgtgcacccagataggacaatctgttgtagcattggagtaattaaagcagtatggtgctataacaagacagatgggcagagcagggtagaatgcaaggaacaaaaattttcgtatgtgaaaaaggtggcattacgattaggagggagtgagggccaagtcagcaaattattctggagcagttgattagcccttgttctctcacgccatacgtgaaaacttaattctgcatggaatcagcgtcagcgacagacatccatgggggcctgtgtgcaccatcttaggtggagaaatgagcagcaacaatggatggaatggaccctgggctagatagaatctggcagtctatgtggcagaaatcagcaaaaacacgattgtaaaagcaaacaagtaattagagaaatcacgtgctgtcaggtcttggaatcaattagaaagagatgactagccagatggaattgcagcccaatcatgtgaacaggcaaaccgcaaaaaataaataaaattaccaataaatacatgaaaaattataatgttgttagtagttaaaatgcgaattaaaatacatgctgttttccctaccagacaagcaaagagtaaattaaaatagtagcccaggcttgcctggcagtggcagggaggtgtggctgccagggccttagaggttggcatcaggctgcccaccccagtcactgccagagcctcccacctgagtgttcctcccggcactggaagccagtggccgtccagaggaacgtgattgaattgctgtatatccatctggtggagcactgctgtgtgtctgttaaaaaagaaaccataggtttttagggatatgtaatgatatttagaaagggtttaagagacagtaaagcttggcagaataaaccgtgtatacagaatggatgtttgcttgcataaataaatttatataaatatgtctgggggtggtagttctagatcgcgagcggccgct

SEQ ID NO: 361573 - DNA, 1909 bp, Homo sapiens
  misc_feature (9)..(9): n is a, c, g, or t
  misc_feature (21)..(21): n is a, c, g, or t
  misc_feature (34)..(34): n is a, c, g, or t
  misc_feature (36)..(36): n is a, c, g, or t
ggccagtgntgcctgcggttnatggggggggggnantttcccttccccttggtgtggggtgagcgtgcgggctgctgtgggtacattccggcaaaccatgtggggaagcacgtggatgagtacgaccccgaggacacgtggcaggatgaagagtacttcggcagctatggaactctgaaactccacttggagatgttggcagaccagccacgaacaactaaataccacagtgtcatcctgcagaataaagaatccctgacggataaagtcatcctggacgtgggctgtgggactgggatcatcagtctcttctgtgcacactatgcgcggcctagagcggtgtacgcggtggaggccagtgagatggcacagcacacggggcagctggtcctgcagaacggctttgctgacatcatcaccgtgtaccagcagaaggtggaggatgtggtgctgcccgagaaggtggacgtgctggtgtctgagtggatggggacctgcctgctgtttgagttcatgatcgagtccatcctgtatgcccgggatgcctggctgaaggaggacggggtcatttggcccaccatggctgcgttgcaccttgtgccctgcagtgctgataaggattatcgtagcaaggtgctcttctgggacaacgcgtacgagttcaacctcagcgctctgaagtaagtgtccacagctgggactggcaccgtcttgtggggcctcctggtccacagtctgcaggtgggccaaggccctgggagatcccatacgacggttggataaatgagggtacctgtgcacccagataggacaatctgttgtagcattggagtaattaaagcagtatggtgctataacaagacagatgggcagagcagggtagaatgcaaggaacaaaaattttcgtatgtgaaaaaggtggcattacgattaggagggagtgagggccaagtcagcaaattattctggagcagttgattagcccttgttctctcacgccatacgtgaaaacttaattctgcatggaatcagcgtcagcgacagacatccatgggggcctgtgtgcaccatcttaggtggagaaatgagcagcaacaatggatggaatggaccctgggctagatagaatctggcagtctatgtggcagaaatcagcaaaaacacgattgtaaaagcaaacaagtaattagagaaatcacgtgctgtcaggtcttggaatcaattagaaagagatgactagccagatggaattgcagcccaatcatgtgaacaggcaaaccgcaaaaaataaataaaattaccaataaatacatgaaaaattataatgttgttagtagttaaaatgcgaattaaaatacatgctgttttccctaccagacaagcaaagagtaaattaaaatagtagcccaggcttgcctggcagtggcagggaggtgtggctgccagggccttagaggttggcatcaggctgcccaccccagtcactgccagagcctcccacctgagtgttcctcccggcactggaagccagtggccgtccagaggaacgtgattgaattgctgtatatccatctggtggagcactgctgtgtgtctgttaaaaaagaaaccataggtttttagggatatgtaatgatatttagaaagggtttaagagacagtaaagcttggcagaataaaccgtgtatacagaatggatgtttgcttgcataaataaatttatataaatatgtctgggggataaaaataagtatatcacaatgctaagacaggcatatggggaatttaagcttttctttatacttgtccatagtttccaatttttaaatttgtaattttttatcagaaaaataaatgtgtaaatatagtggaatctttattaaaacattcacttttatttgctatttca

SEQ ID NO: 361574 - DNA, 1500 bp, Homo sapiens
gcggggcgccgggccctgggcggggccttcccggctgacggcctgcgtgcactgcgcttgcgcgggttgagggcggtggctcaggctcctggaaaggaccgtccacccctccgcgctggcggtgtggacgcggaactcagcggagaaacgcgattgagaaatggaaaagaaaatgaaataaatcagcagttatgaggcagagcctaagagaactatggcaacatcaggtgactgtcccagaagtgaatcgcagggagaagagcctgctgagtgcagtgaggcgggtctcctgcaggagggagtacagccagaggagtttgtggccatcgcggactacgctgccaccgatgagacccagctcagttttttgagaggagaaaaaattcttatcctgagacaaaccactgcagattggtggtggggtgagcgtgcgggctgctgtgggtacattccggcaaaccatgtggggaagcacgtggatgagtacgaccccgaggacacgtggcaggatgaagagtacttcggcagctatggaactctgaaactccacttggagatgttggcagaccagccacgaacaactaaataccacagtgtcatcctgcagaataaagaatccctgacggataaagtcatcctggacgtgggctgtgggactgggatcatcagtctcttctgtgcacactatgcgcggcctagagcggtgtacgcggtggaggccagtgagatggcacagcacacggggcagctggtcctgcagaacggctttgctgacatcatcaccgtgtaccagcagaaggtggaggatgtggtgctgcccgagaaggtggacgtgctggtgtctgagtggatggggacctgcctgctgtttgagttcatgatcgagtccatcctgtatgcccgggatgcctggctgaaggaggacggggtcatttggcccaccatggctgcgttgcaccttgtgccctgcagtgctgataaggattatcgtagcaaggtgctcttctgggacaacgcgtacgagttcaacctcagcgctctgaaatctttagcagttaaggagtttttttcaaagcccaagtataaccacattttgaaaccagaagactgtctctctgaaccgtgcactatattgcagttggacatgagaaccgtgcaaatttctgatctagaggtgagaaaaagatgaattgctccttacattcgataatcagtgaccacgaaacactcagaccagagcctggcttatcaaaaaccttcagtgagtgctgggggtgtgagtgaataactaattattttattatgcaaataagtgaatttataaaacgtttgctactgattttttccagtcttttttcttttttacgttctattttgattctttcatattgtacaccattttatgtctccagcgtcttcattttagatttatgtttaatattctcagcatcttcaaaatcaaataaattatatttcgtttcattatggtaaaaaattaca

SEQ ID NO: 361575 - DNA, 1927 bp, Homo sapiens
  misc_feature (1927)..(1927): n is a, c, g, or t
gcggggcgccgggccctgggcggggccttcccggctgacggcctgcgtgcactgcgcttgcgcgggttgagggcggtggctcaggctcctggaaaggaccgtccacccctccgcgctggcggtgtggacgcggaactcagcggagaaacgcgattgagaaatggaaaagaaaatgaaataaatcagcagttatgaggcagagcctaagagaactatggcaacatcaggtgactgtcccagaagtgaatcgcagggagaagagcctgctgagtgcagtgaggcgggtctcctgcaggagggagtacagccagaggagtttgtggccatcgcggactacgctgccaccgatgagacccagctcagttttttgagaggagaaaaaattcttatcctgagacaaaccactgcagattggtggtggggtgagcgtgcgggctgctgtgggtacattccggcaaaccatgtggggaagcacgtggatgagtacgaccccgaggacacgtggcaggatgaagagtacttcggcagctatggaactctgaaactccacttggagatgttggcagaccagccacgaacaactaaataccacagtgtcatcctgcagaataaagaatccctgacggataaagtcatcctggacgtgggctgtgggactgggatcatcagtctcttctgtgcacactatgcgcggcctagagcggtgtacgcggtggaggccagtgagatggcacagcacacggggcagctggtcctgcagaacggctttgctgacatcatcaccgtgtaccagcagaaggtggaggatgtggtgctgcccgagaaggtggacgtgctggtgtctgagtggatggggacctgcctgctgtttgagttcatgatcgagtccatcctgtatgcccgggatgcctggctgaaggaggacggggtcatttggcccaccatggctgcgttgcaccttgtgccctgcagtgctgataaggattatcgtagcaaggtgctcttctgggacaacgcgtacgagttcaacctcagcgctctgaaatctttagcagttaaggagtttttttcaaagcccaagtataaccacattttgaaaccagaagactgtctctctgaaccgtgcactatattgcagttggacatgagaaccgtgcaaatttctgatctagagaccctgaggggcgagctgcgcttcgacatcaggaaggcggggaccctgcacggcttcacggcctggtttagcgggtacagtggatatagttgccatcaatgagcccttcattgacctcaaactacatggattttacatgttccacatatgattccacccatggcaaattccatggcaccgacaaggctgagaacgggaagcttgtcatcaatggacatccatcaccatcttccaaggaacgagatccctcccaaaatcacgtgggagcggaatgctggcgctgagtacgtccgtgggagtcaactgggagtcttcagcagcatgggagaaggctgaggtcatttgcaggggggaggccaaaagggtcatacacatctgccctctgcttgaatgcccaagtcggcatggttgtgaacaatggaacggatgtacaaaggcgtgcagagacatgagaaagcgcacgggaaacacaacagggaagcaaacacggaccaggccaagcaggacaagcagggagaagggaaaggacaagacccacaggcaaggaagaaggggcggcacaaagagagtaaagggcccaggaaaagagagtcaaggacgggagagcacagaaacaacacgcagcactggagacagagaggcgacgtacagacaaggagaatgaggcaacaacccacgaagatgcgaagcagcagaaacaacaaagcggagagccagacgcagagtacgctagctggtacgaaacgactaagn

SEQ ID NO: 361576 - DNA, 2760 bp, Homo sapiens
caaaacctggaaacaacccaagtgtccttcatctggataatccttaaggataaactggtgcgtccacacagtggaataccactgagcagtgaagaggagccagttattgaaacaggtaatttggaggaaccccagaaacggtacagtgagtgaaagaaacttgtcttgaaaggttatgtactgtttggttccatttgtatgatattctcaaaaagacacaagaccatggggatggagaccagatcggtggctggagaggctggggtcggggagggcatgaccaccagagaaaagggtgaagagtgttttgggtggcagagctgtgtgtatgctggctgtggttgtgaggacaaaatccacacaagcgctcaagttcgtaggctgtacgccagaaaagctgtttcactacataactgaaaaaataagattgaaaaataagatgtatatattttttgtgtgcgtgtgtagaaaaatacttgaaggtaaactgcagagtgataacagtggtttcttctaggtactgggttaatatgtgatttttatgtttgtttgagcttttctaagttttctacattttccgtacaaaacatgtattacttctgtaataaaagcagcttgagattatttaaggaagcaaaacacttctgttgtttctcatcaactacaggatgaagtgcaggctccctgggtggtttgcaggggccacaggccttggccccacctcgctggtgctccctctactcctttctgtgtttgaagcaagttctggttcagacagaaagcctggcctttgaagggcgttgggtccccacttcctcagtcatagatgtgatgtgcttcccttgacttgggaccttctgagggatgcaaggtggaccaaaggacccgtgaatggccagggcatgcctgcgtggctttcggtttcttaagcagtgatttcagtccacttaaagggtgtgaaaattctgagaatgctacggaccaaatatattttatgtaacagttgggacccggcaacacttcagggctctttcaaaatctggtagctacgagctcttccgtgactgagatgggacaagagtgaagatttgtccttgcttttagctctgctccagttcatagttctaatgggaaattatgtgacttaaacccaggctgtgagatgcatcagtgacgtgtgggcataaaataaaccctcgagatgttctcttgcatggtacactggcctaggcaggaatattcttgaggctaaaactgtagaactgtcagactagtgttacgaatgtggtggtgagaggcctgtgcagccgcggggcctgtgatgtgtctcctgtgtgtctttcactcctatgcagtttgagttcatgatcgagtccatcctgtatgcccgggatgcctggctgaaggaggacggggtcatttggcccaccatggctgcgttgcaccttgtgccctgcagtgctgataaggattatcgtagcaaggtgctcttctgggacaacgcgtacgagttcaacctcagcgctctgaagtaagtgtccacagctgggactggcaccgtcttgtggggcctcctggtccacagtctgcaggtgggccaaggccctgggagatcccatacgacggttggataaatgagggtacctgtgcacccagataggacaatctgttgtagcattggagtaattaaagcagtatggtgctataacaagacagatgggcagagcagggtagaatgcaaggaacaaaaattttcgtatgtgaaaaaggtggcattacgattaggagggagtgagggccaagtcagcaaattattctggagcagttgattagcccttgttctctcacgccatacgtgaaaacttaattctgcatggaatcagcgtcagcgacagacatccatgggggcctgtgtgcaccatcttaggtggagaaatgagcagcaacaatggatggaatggaccctgggctagatagaatctggcagtctatgtggcagaaatcagcaaaaacacgattgtaaaagcaaacaagtaattagagaaatcacgtgctgtcaggtcttggaatcaattagaaagagatgactagccagatggaattgcagcccaatcatgtgaacaggcaaaccgcaaaaaataaataaaattaccaataaatacatgaaaaattataatgttgttagtagttaaaatgcgaattaaaatacatgctgttttccctaccagacaagcaaagagtaaattaaaatagtagcccaggcttgcctggcagtggcagggaggtgtggctgccagggccttagaggttggcatcaggctgcccaccccagtcactgccagagcctcccacctgagtgttcctcccggcactggaagccagtggccgtccagaggaacgtgattgaattgctgtatatccatctggtggagcactgctgtgtgtctgttaaaaaagaaaccataggtttttagggatatgtaatgatatttagaaagggtttaagagacagtaaagcttggcagaataaaccgtgtatacagaatggatgtttgcttgcataaataaatttatataaatatgtctgggggataaaaataagtatatcacaatgctaagacaggcatatggggaatttaagcttttctttatacttgtccatagtttccaatttttaaatttgtaattttttatcagaaaaataaatgtgtaaatatagtggaatctttattaaaacattcacttttatttgctatttca

SEQ ID NO: 361577 - DNA, 1018 bp, Homo sapiens
gcggggcgccgggccctgggcggggccttcccggctgacggcctgcgtgcactgcgcttgcgcgggttgagggcggtggctcaggctcctggaaaggaccgtccacccctccgcgctggcggtgtggacgcggaactcagcggagaaacgcgattgagaaatggaaaagaaaatgaaataaatcagcagttatgaggcagagcctaagagaactatggcaacatcaggtgactgtcccagaagtgaatcgcagggagaagagcctgctgagtgcagtgaggcgggtctcctgcaggagggagtacagccagaggagtttgtggccatcgcggactacgctgccaccgatgagacccagctcagttttttgagaggagaaaaaattcttatcctgagacaaaccactgcagattggtggtggggtgagcgtgcgggctgctgtgggtacattccggcaaaccatgtggggaagcacgtggatgagtacgaccccgaggacacgtggcaggatgaagagtacttcggcagctatggaactctgaaactccacttggagatgttggcagaccagccacgaacaactaaataccacagtgtcatcctgcagaataaagaatccctgacggataaagtcatcctggacgtgggctgtgggactgggatcatcagtctcttctgtgcacactatgcgcggcctagagcggtgtacgcggtggaggccagtgagatggcacagcacacggggcagctggtcctgcagaacggctttgctgacatcatcaccgtgtaccagcagaaggtggaggatgtggtgctgcccgagaaggtggacgtgctggtgtctgagtggatggggacctgcctgctgggtgagggcgggcgtgcgggcagctgggggccggagctggggggcttctgagcacgggctcggctgggccaacctcaggatctcaagggtcgtgcgtgattcattttgatgttttccctaatgtgaggtctaattaatttcttgtgtgga

SEQ ID NO: 361578 - DNA, 1115 bp, Homo sapiens
gcggggcgccgggccctgggcggggccttcccggctgacggcctgcgtgcactgcgcttgcgcgggttgagggcggtggctcaggctcctggaaaggaccgtccacccctccgcgctggcggtgtggacgcggaactcagcggagaaacgcgattgagaaatggaaaagaaaatgaaataaatcagcagttatgaggcagagcctaagagaactatggcaacatcaggtgactgtcccagaagtgaatcgcagggagaagagcctgctgagtgcagtgaggcgggtctcctgcaggagggagtacagccagaggagtttgtggccatcgcggactacgctgccaccgatgagacccagctcagttttttgagaggagaaaaaattcttatcctgagacaaaccactgcagattggtggtggggtgagcgtgcgggctgctgtgggtacattccggcaaaccatgtggggaagcacgtggatgagtacgaccccgaggacacgtggcaggatgaagagtacttcggcagctatggaactctgaaactccacttggagatgttggcagaccagccacgaacaactaaataccacagtgtcatcctgcagaataaagaatccctgacggataaagtcatcctggacgtgggctgtgggactgggatcatcagtctcttctgtgcacactatgcgcggcctagagcggtgtacgcggtggaggccagtgagatggcacagcacacggggcagctggtcctgcagaacggctttgctgacatcatcaccgtgtaccagcagaaggtggaggatgtggtgctgcccgagaaggtggacgtgctggtgtctgagtggatggggacctgcctgctgggtgagggcgggcgtgcgggcagctgggggccggagctggggggcttctgagcacgggctcggctgggccaacctcaggatctcaagggtcgtgcgtgattcattttgatgttttccctaatgtgaggtctaattaatttcttgtgtggacattggctcagtgtcttgaattttcacctgatttaaaaaatgcctttatgagaaatttaagtcaaagttcatgtaacattttcatgagtgatttaca

SEQ ID NO: 361579 - DNA, 1239 bp, Homo sapiens
tctccaactccttaactggaagagctgagcgccgaaaagattccgcagaatctggggtagaaaattgggcgcaagaagctcagatgcttgaaacgtttctgactgaagcctctgaactcacgatgcgggttttgggggtggtttccccaggctggggggcttttctacggttcctgacgcattcagcgtctgcgcggggcgcgtggagggggccgccccaacccgggccctgcggtgccacgcggtgcccacgcgtgccttgtcatctgcttgacccagaccctgaggggcgagctgcgcttcgacatcaggaaggcggggaccctgcacggcttcacggcctggtttagcgtccacttccagagcctgcaggaggggcagccgccgcaggtgctcagcaccgggcccttccaccccaccacacactggaagcagacgctgttcatgatggacgacccagtccctgtccatacaggagacgtggtcacgggttcagttgtgttgcagagaaacccagtgtggagaaggcacatgtctgtggctctgagctgggctgtcacttccagacaagaccccacatctcaaaaagttggagaaaaagtcttccccatctggagatgacagttgatgctttatttggaaagcagtgtgcatatcttgaggggtgatgaacacaagcaaaccaagttgcacctggcttctgcacactcctgcgaaagtcggtgaacattcactccacattgacccctccctagcctggcaggtgacgtcagggtccttcacagacaaacacgcttgggctcggcaggagctgccgtggccacccccgctgcccagtgtctgccctctagaagtaggctgtgtttccaggtgttcacccgtggtgcccacagtgccgacccgtggctgggtcggagctccatgttcctaagctaggtctaggtctacactcctaggacgcacgcatatcagcccgtgtaccctgtgacagtgactgtccccacctcctgtgttagtggtgcccttactgccgtcgctcatccactcgtgtgggacgtaggattgcacagggctgtgccagtggcgtgtagggaacactgccctggctcagcgtgcgagctaaggtggcgatgtatgcgatgggactctgcatgggatagtacagttgtgtagacgtcttccaaataaattatgtgttggtgcatcgcacatgctcaataaatatttttaaatgagtga

SEQ ID NO: 361580 - DNA, 1382 bp, Homo sapiens
gcggggcgccgggccctgggcggggccttcccggctgacggcctgcgtgcactgcgcttgcgcgggttgagggcggtggctcaggctcctggaaaggaccgtccacccctccgcgctggcggtgtggacgcggaactcagcggagaaacgcgattgagagcagtgtgtggattacactatcactggaaaaatacgaattgagaagaaggaaaagactggaagatgcagaccttggttcctgttagtggaaacactgtaaggtcccagaaatggaaaagaaaatgaaataaatcagcagttatgaggcagagcctaagagaactatggcaacatcaggtgactgtcccagaagtgaatcgcagggagaagagcctgctgagtgcagtgaggcgggtctcctgcaggagggagtacagccagaggagtttgtggccatcgcggactacgctgccaccgatgagacccagctcagttttttgagaggagaaaaaattcttatcctgagacaaaccactgcagattggtggtggggtgagcgtgcgggctgctgtgggtacattccggcaaaccatgtggggaagcacgtggatgagtacgaccccgaggacacgtggcaggatgaagagtacttcggcagctatggaactctgagaaacccagtgtggagaaggcacatgtctgtggctctgagctgggctgtcacttccagacaagaccccacatctcaaaaagttggagaaaaagtcttccccatctggagatgacagttgatgctttatttggaaagcagtgtgcatatcttgaggggtgatgaacacaagcaaaccaagttgcacctggcttctgcacactcctgcgaaagtcggtgaacattcactccacattgacccctccctagcctggcaggtgacgtcagggtccttcacagacaaacacgcttgggctcggcaggagctgccgtggccacccccgctgcccagtgtctgccctctagaagtaggctgtgtttccaggtgttcacccgtggtgcccacagtgccgacccgtggctgggtcggagctccatgttcctaagctaggtctaggtctacactcctaggacgcacgcatatcagcccgtgtaccctgtgacagtgactgtccccacctcctgtgttagtggtgcccttactgccgtcgctcatccactcgtgtgggacgtaggattgcacagggctgtgccagtggcgtgtagggaacactgccctggctcagcgtgcgagctaaggtggcgatgtatgcgatgggactctgcatgggatagtacagttgtgtagacgtcttccaaataaattatgtgttggtgcatcgcacatgctcaataaatatttttaaatgagtga

SEQ ID NO: 361581 - DNA, 1871 bp, Homo sapiens
gcggggcgccgggccctgggcggggccttcccggctgacggcctgcgtgcactgcgcttgcgcgggttgagggcggtggctcaggctcctggaaaggaccgtccacccctccgcgctggcggtgtggacgcggaactcagcggagaaacgcgattgagaaatggaaaagaaaatgaaataaatcagcagttatgaggcagagcctaagagaactatggcaacatcaggtgactgtcccagaagtgaatcgcagggagaagagcctgctgagtgcagtgaggcgggtctcctgcaggagggagtacagccagaggagtttgtggccatcgcggactacgctgccaccgatgagacccagctcagttttttgagaggagaaaaaattcttatcctgagacaaaccactgcagattggtggtggggtgagcgtgcgggctgctgtgggtacattccggcaaaccatgtggggaaaagtaggctgtgtttccaggtgttcacccgtggtgcccacagtgccgacccgtggctgggtcggagctccatgttcctaagctaggtctaggtctacactcctaggacgcacgcatatcagcccgtgtaccctgtgacagtgactgtccccacctcctgtgttagtggtgcccttactgccgtcgctcatccactcgtgtgggacgtaggattgcacagggctgtgccagtggcgtgtagggaacactgccctggctcagcgtgcgagctaaggtggcgatgtatgcgatgggactctgcatgggatagtacagttgtgtagacgtcttccaaataaattatgtgttggtgcatcgcacatgctcaataaatatttttaaatgagtgaatgtcattgtgtatcctgttttatgcatatatgttattttttgtaattacaggatcatactatatgcattgctttataagtttttctcaatattgtgaaaaaacttccacatcagtagatacatgtccataatttttttttgtattgttttgatttttattaaattttattgaaatataggctgggtgcagtggcttacctctgtaatcccaacactttgagaggctgaggtgggatgattccttgagctcaggagttcaagaccaccctgggcaacacagcgagatactatctctacaaaaaaaatagaaaaattagctgggcatggtggcgtgtgcctgtagtcccagctactcgggaggctgaggcggggggatcacttgagcccaggaggttgaggctgcagtgatctaggattgcactgctgcactccagcgtgggtgacagagcaagaccctgtctcaaaaaccccaaaaaacaaaactgaaatatcaaatatatattgaaaacagtgctagtcatgggtacatagatgatggcattttataaagtggacgcacatgtaaccagcatccaggccaggacacactacagattccccgattccccttccactcagtgcccaccctctcaagggtgatgtcctgacttgtaactgtcgattactcttgcctgaatggagttgtacacgtgttcttttgtgtctgccttctttaattaaacattgtttgtgagactcatctatgaattttagacagtgtggttgtggttgactttttcattgtggcatagtattcaactgcatgaatagaccacagtttatgatcttgtttcacatggtgtccttttgggttgttgccatggtttagctatgatgattactgagactgtggacatttctgtgtatgtgttttggtgcatgtatgtacacatttctgttgggtgtacactgtataccaggttttcaagtcaaggaatctaatatccctgccagctgtgcatgagagttggc

SEQ ID NO: 361582 - DNA, 363 bp, Homo sapiens
gtgtgtgaattcatgtgtagctcgcccagctcacttgggcttcctgtctcagaggctgctgaaaatggaatgttcttctttgggctcaggattaatgtggcaaagaaaataaaaataaatggttttccttcattttttatatttgttttgtgctttgctttgtgataagtttttgttaaaagtttgtcatttaaaaaaattctgcacctgaatactgttctcttgtccaatattaaaccattaggaaatgtagtatgttaatcaaatgatttatcatctgattgacctgttgtcatttatctttttcaggttggagaaaaagtcttccccatctggagatgacagttgatgctttatttggaa

SEQ ID NO: 361583 - DNA, 2134 bp, Homo sapiens
gcggggcgccgggccctgggcggggccttcccggctgacggcctgcgtgcactgcgcttgcgcgggttgagggcggtggctcaggctcctggaaaggaccgtccacccctccgcgctggcggtgtggacgcggaactcagcggagaaacgcgattgagaaatggaaaagaaaatgaaataaatcagcagttatgaggcagagcctaagagaactatggcaacatcaggtgactgtcccagaagtgaatcgcagggagaagagcctgctgagtgcagtgaggcgggtctcctgcaggagggagtacagccagaggagtttgtggccatcgcggactacgctgccaccgatgagacccagctcagttttttgagaggagaaaaaattcttatcctgagacaaaccactgcagattggtggtggggtgagcgtgcgggctgctgtgggtacattccggcaaaccatgtggggaagcacgtggatgagtacgaccccgaggacacgtggcaggatgaagagtacttcggcagctatggaactctgaaactccacttggagatgttggcagaccagccacgaacaactaaataccacagtgtcatcctgcagaataaagaatccctgacggataaagtcatcctggacgtgggctgtgggactgggatcatcagtctcttctgtgcacactatgcgcggcctagagcggtgtacgcggtggaggccagtgagatggcacagcacacggggcagctggtcctgcagaacggctttgctgacatcatcaccgtgtaccagcagaaggtggaggatgtggtgctgcccgagaaggtggacgtgctggtgtctgagtggatggggacctgcctgctgtttgagttcatgatcgagtccatcctgtatgcccgggatgcctggctgaaggaggacggggtcatttggcccaccatggctgcgttgcaccttgtgccctgcagtgctgataaggattatcgtagcaaggtgctcttctgggacaacgcgtacgagttcaacctcagcgctctgaaatctttagcagttaaggagtttttttcaaagcccaagtataaccacattttgaaaccagaagactgtctctctgaaccgtgcactatattgcagttggacatgagaaccgtgcaaatttctgatctagagaccctgaggggcgagctgcgcttcgacatcaggaaggcggggaccctgcacggcttcacggcctggtttagcgtccacttccagagcctgcaggaggggcagccgccgcaggtgctcagcaccgggcccttccaccccaccacacactggaagcagacgctgttcatgatggacgacccagtccctgtccatacaggagacgtggtcacgggttcagttgtgttgcagagaaacccagtgtggagaaggcacatgtctgtggctctgagctgggctgtcacttccagacaagaccccacatctcaaaaagttggagaaaaagtcttccccatctggagatgacagttgatgctttatttggaaagcagtgtgcatatcttgaggggtgatgaacacaagcaaaccaagttgcacctggcttctgcacactcctgcgaaagtcggtgaacattcactccacattgacccctccctagcctggcaggtgacgtcagggtccttcacagacaaacacgcttgggctcggcaggagctgccgtggccacccccgctgcccagtgtctgccctctagaagtaggctgtgtttccaggtgttcacccgtggtgcccacagtgccgacccgtggctgggtcggagctccatgttcctaagctaggtctaggtctacactcctaggacgcacgcatatcagcccgtgtaccctgtgacagtgactgtccccacctcctgtgttagtggtgcccttactgccgtcgctcatccactcgtgtgggacgtaggattgcacagggctgtgccagtggcgtgtagggaacactgccctggctcagcgtgcgagctaaggtggcgatgtatgcgatgggactctgcatgggatagtacagttgtgtagacgtcttccaaataaattatgtgttggtgcatcgcacatgctcaataaatatttttaaatgagtga

SEQ ID NO: 361584 - DNA, 2273 bp, Homo sapiens
gcggggcgccgggccctgggcggggccttcccggctgacggcctgcgtgcactgcgcttgcgcgggttgagggcggtggctcaggctcctggaaaggaccgtccacccctccgcgctggcggtgtggacgcggaactcagcggagaaacgcgattgagaaatggaaaagaaaatgaaataaatcagcagttatgaggcagagcctaagagaactatggcaacatcaggtgactgtcccagaagtgaatcgcagggagaagagcctgctgagtgcagtgaggcgggtctcctgcaggagggagtacagccagaggagtttgtggccatcgcggactacgctgccaccgatgagacccagctcagttttttgagaggagaaaaaattcttatcctgagacaaaccactgcagattggtggtggggtgagcgtgcgggctgctgtgggtacattccggcaaaccatgtggggaagcacgtggatgagtacgaccccgaggacacgtggcaggatgaagagtacttcggcagctatggaactctgaaactccacttggagatgttggcagaccagccacgaacaactaaataccacagtgtcatcctgcagaataaagaatccctgacggataaagtcatcctggacgtgggctgtgggactgggatcatcagtctcttctgtgcacactatgcgcggcctagagcggtgtacgcggtggaggccagtgagatggcacagcacacggggcagctggtcctgcagaacggctttgctgacatcatcaccgtgtaccagcagaaggtggaggatgtggtgctgcccgagaaggtggacgtgctggtgtctgagtggatggggacctgcctgctgtttgagttcatgatcgagtccatcctgtatgcccgggatgcctggctgaaggaggacggggtcatttggcccaccatggctgcgttgcaccttgtgccctgcagtgctgataaggattatcgtagcaaggtgctcttctgggacaacgcgtacgagttcaacctcagcgctctgaagtaagtgtccacagctgggactggcaccgtcttgtggggcctcctggtccacagtctgcaggtgggccaaggccctgggagatcccatacgacggttggataaatgagggtacctgtgcacccagataggacaatctgttgtagcattggagtaattaaagcagtatggtgctataacaagacagatgggcagagcagggtagaatgcaaggaacaaaaattttcgtatgtgaaaaaggtggcattacgattaggagggagtgagggccaagtcagcaaattattctggagcagttgattagcccttgttctctcacgccatacgtgaaaacttaattctgcatggaatcagcgtcagcgacagacatccatgggggcctgtgtgcaccatcttaggtggagaaatgagcagcaacaatggatggaatggaccctgggctagatagaatctggcagtctatgtggcagaaatcagcaaaaacacgattgtaaaagcaaacaagtaattagagaaatcacgtgctgtcaggtcttggaatcaattagaaagagatgactagccagatggaattgcagcccaatcatgtgaacaggcaaaccgcaaaaaataaataaaattaccaataaatacatgaaaaattataatgttgttagtagttaaaatgcgaattaaaatacatgctgttttccctaccagacaagcaaagagtaaattaaaatagtagcccaggcttgcctggcagtggcagggaggtgtggctgccagggccttagaggttggcatcaggctgcccaccccagtcactgccagagcctcccacctgagtgttcctcccggcactggaagccagtggccgtccagaggaacgtgattgaattgctgtatatccatctggtggagcactgctgtgtgtctgttaaaaaagaaaccataggtttttagggatatgtaatgatatttagaaagggtttaagagacagtaaagcttggcagaataaaccgtgtatacagaatggatgtttgcttgcataaataaatttatataaatatgtctgggggataaaaataagtatatcacaatgctaagacaggcatatggggaatttaagcttttctttatacttgtccatagtttccaatttttaaatttgtaattttttatcagaaaaataaatgtgtaaatatagtggaatctttattaaaacattcacttttatttgctatttca

SEQ ID NO: 361585 - DNA, 2874 bp, Homo sapiens
gcggggcgccgggccctgggcggggccttcccggctgacggcctgcgtgcactgcgcttgcgcgggttgagggcggtggctcaggctcctggaaaggaccgtccacccctccgcgctggcggtgtggacgcggaactcagcggagaaacgcgattgagaaatggaaaagaaaatgaaataaatcagcagttatgaggcagagcctaagagaactatggcaacatcaggtgactgtcccagaagtgaatcgcagggagaagagcctgctgagtgcagtgaggcgggtctcctgcaggagggagtacagccagaggagtttgtggccatcgcggactacgctgccaccgatgagacccagctcagttttttgagaggagaaaaaattcttatcctgagacaaaccactgcagattggtggtggggtgagcgtgcgggctgctgtgggtacattccggcaaaccatgtggggaagcacgtggatgagtacgaccccgaggacacgtggcaggatgaagagtacttcggcagctatggaactctgaaactccacttggagatgttggcagaccagccacgaacaactaaataccacagtgtcatcctgcagaataaagaatccctgacggataaagtcatcctggacgtgggctgtgggactgggatcatcagtctcttctgtgcacactatgcgcggcctagagcggtgtacgcggtggaggccagtgagatggcacagcacacggggcagctggtcctgcagaacggctttgctgacatcatcaccgtgtaccagcagaaggtggaggatgtggtgctgcccgagaaggtggacgtgctggtgtctgagtggatggggacctgcctgctgtttgagttcatgatcgagtccatcctgtatgcccgggatgcctggctgaaggaggacggggtcatttggcccaccatggctgcgttgcaccttgtgccctgcagtgctgataaggattatcgtagcaaggtgctcttctgggacaacgcgtacgagttcaacctcagcgctctgaaatctttagcagttaaggagtttttttcaaagcccaagtataaccacattttgaaaccagaagactgtctctctgaaccgtgcactatattgcagttggacatgagaaccgtgcaaatttctgatctagagaccctgaggggcgagctgcgcttcgacatcaggaaggcggggaccctgcacggcttcacggcctggtttagcgtccacttccagagcctgcaggaggggcagccgccgcaggtgctcagcaccgggcccttccaccccaccacacactggaagcagacgctgttcatgatggacgacccagtccctgtccatacaggagacgtggtcacgggttcagttgtgttgcagagaaacccagtgtggagaaggcacatgtctgtggctctgagctgggctgtcacttccagacaagaccccacatctcaaaaagttggagaaaaagtcttccccatctggagatgacagttgatgctttatttggaaagcagtgtgcatatcttgaggggtgatgaacacaagcaaaccaagttgcacctggcttctgcacactcctgcgaaagtcggtgaacattcactccacattgacccctccctagcctggcaggtgacgtcagggtccttcacagacaaacacgcttgggctcggcaggagctgccgtggccacccccgctgcccagtgtctgccctctagaagtaggctgtgtttccaggtgttcacccgtggtgcccacagtgccgacccgtggctgggtcggagctccatgttcctaagctaggtctaggtctacactcctaggacgcacgcatatcagcccgtgtaccctgtgacagtgactgtccccacctcctgtgttagtggtgcccttactgccgtcgctcatccactcgtgtgggacgtaggattgcacagggctgtgccagtggcgtgtagggaacactgccctggctcagcgtgcgagctaaggtggcgatgtatgcgatgggactctgcatgggatagtacagttgtgtagacgtcttccaaataaattatgtgttggtgcatcgcacatgctcaataaatatttttaaatgagtgaatgtcattgtgtatcctgttttatgcatatatgttattttttgtaattacaggatcatactatatgcattgctttataagtttttctcaatattgtgaaaaaacttccacatcagtagatacatgtccataatttttttttgtattgttttgatttttattaaattttattgaaatataggctgggtgcagtggcttacctctgtaatcccaacactttgagaggctgaggtgggatgattccttgagctcaggagttcaagaccaccctgggcaacacagcgagatactatctctacaaaaaaaatagaaaaattagctgggcatggtggcgtgtgcctgtagtcccagctactcgggaggctgaggcggggggatcacttgagcccaggaggttgaggctgcagtgatctaggattgcactgctgcactccagcgtgggtgacagagcaagaccctgtctcaaaaaccccaaaaaacaaaactgaaatatcaaatatatattgaaaacagtgctagtcatgggtacatagatgatggcattttataaagtggacgcacatgtaaccagcatccaggccaggacacactacagattccccgattccccttccactcagtgcccaccctctcaagggtgatgtcctgacttgtaactgtcgattactcttgcctgaatggagttgtacacgtgttcttttgtgtctgccttctttaattaaacattgtttgtgagactca

SEQ ID NO: 361586 - DNA, 2243 bp, Homo sapiens
gcggggcgccgggccctgggcggggccttcccggctgacggcctgcgtgcactgcgcttgcgcgggttgagggcggtggctcaggctcctggaaaggaccgtccacccctccgcgctggcggtgtggacgcggaactcagcggagaaacgcgattgagagcagtgtgtggattacactatcactggaaaaatacgaattgagaagaaggaaaagactggaagatgcagaccttggttcctgttagtggaaacactgtaaggtcccagaaatggaaaagaaaatgaaataaatcagcagttatgaggcagagcctaagagaactatggcaacatcaggtgactgtcccagaagtgaatcgcagggagaagagcctgctgagtgcagtgaggcgggtctcctgcaggagggagtacagccagaggagtttgtggccatcgcggactacgctgccaccgatgagacccagctcagttttttgagaggagaaaaaattcttatcctgagacaaaccactgcagattggtggtggggtgagcgtgcgggctgctgtgggtacattccggcaaaccatgtggggaagcacgtggatgagtacgaccccgaggacacgtggcaggatgaagagtacttcggcagctatggaactctgaaactccacttggagatgttggcagaccagccacgaacaactaaataccacagtgtcatcctgcagaataaagaatccctgacggataaagtcatcctggacgtgggctgtgggactgggatcatcagtctcttctgtgcacactatgcgcggcctagagcggtgtacgcggtggaggccagtgagatggcacagcacacggggcagctggtcctgcagaacggctttgctgacatcatcaccgtgtaccagcagaaggtggaggatgtggtgctgcccgagaaggtggacgtgctggtgtctgagtggatggggacctgcctgctgtttgagttcatgatcgagtccatcctgtatgcccgggatgcctggctgaaggaggacggggtcatttggcccaccatggctgcgttgcaccttgtgccctgcagtgctgataaggattatcgtagcaaggtgctcttctgggacaacgcgtacgagttcaacctcagcgctctgaaatctttagcagttaaggagtttttttcaaagcccaagtataaccacattttgaaaccagaagactgtctctctgaaccgtgcactatattgcagttggacatgagaaccgtgcaaatttctgatctagagaccctgaggggcgagctgcgcttcgacatcaggaaggcggggaccctgcacggcttcacggcctggtttagcgtccacttccagagcctgcaggaggggcagccgccgcaggtgctcagcaccgggcccttccaccccaccacacactggaagcagacgctgttcatgatggacgacccagtccctgtccatacaggagacgtggtcacgggttcagttgtgttgcagagaaacccagtgtggagaaggcacatgtctgtggctctgagctgggctgtcacttccagacaagaccccacatctcaaaaagttggagaaaaagtcttccccatctggagatgacagttgatgctttatttggaaagcagtgtgcatatcttgaggggtgatgaacacaagcaaaccaagttgcacctggcttctgcacactcctgcgaaagtcggtgaacattcactccacattgacccctccctagcctggcaggtgacgtcagggtccttcacagacaaacacgcttgggctcggcaggagctgccgtggccacccccgctgcccagtgtctgccctctagaagtaggctgtgtttccaggtgttcacccgtggtgcccacagtgccgacccgtggctgggtcggagctccatgttcctaagctaggtctaggtctacactcctaggacgcacgcatatcagcccgtgtaccctgtgacagtgactgtccccacctcctgtgttagtggtgcccttactgccgtcgctcatccactcgtgtgggacgtaggattgcacagggctgtgccagtggcgtgtagggaacactgccctggctcagcgtgcgagctaaggtggcgatgtatgcgatgggactctgcatgggatagtacagttgtgtagacgtcttccaaataaattatgtgttggtgcatcgcacatgctcaataaatatttttaaatgagtga

SEQ ID NO: 361587 - DNA, 3412 bp, Homo sapiens
gcggggcgccgggccctgggcggggccttcccggctgacggcctgcgtgcactgcgcttgcgcgggttgagggcggtggctcaggctcctggaaaggaccgtccacccctccgcgctggcggtgtggacgcggaactcagcggagaaacgcgattgagaaatggaaaagaaaatgaaataaatcagcagttatgaggcagagcctaagagaactatggcaacatcaggtgactgtcccagaagtgaatcgcagggagaagagcctgctgagtgcagtgaggcgggtctcctgcaggagggagtacagccagaggagtttgtggccatcgcggactacgctgccaccgatgagacccagctcagttttttgagaggagaaaaaattcttatcctgagacaaaccactgcagattggtggtggggtgagcgtgcgggctgctgtgggtacattccggcaaaccatgtggggaagcacgtggatgagtacgaccccgaggacacgtggcaggatgaagagtacttcggcagctatggaactctgaaactccacttggagatgttggcagaccagccacgaacaactaaataccacagtgtcatcctgcagaataaagaatccctgacggataaagtcatcctggacgtgggctgtgggactgggatcatcagtctcttctgtgcacactatgcgcggcctagagcggtgtacgcggtggaggccagtgagatggcacagcacacggggcagctggtcctgcagaacggctttgctgacatcatcaccgtgtaccagcagaaggtggaggatgtggtgctgcccgagaaggtggacgtgctggtgtctgagtggatggggacctgcctgctgtttgagttcatgatcgagtccatcctgtatgcccgggatgcctggctgaaggaggacggggtcatttggcccaccatggctgcgttgcaccttgtgccctgcagtgctgataaggattatcgtagcaaggtgctcttctgggacaacgcgtacgagttcaacctcagcgctctgaagtaagtgtccacagctgggactggcaccgtcttgtggggcctcctggtccacagtctgcaggtgggccaaggccctgggagatcccatacgacggttggataaatgagggtacctgtgcacccagataggacaatctgttgtagcattggagtaattaaagcagtatggtgctataacaagacagatgggcagagcagggtagaatgcaaggaacaaaaattttcgtatgtgaaaaaggtggcattacgattaggagggagtgagggccaagtcagcaaattattctggagcagttgattagcccttgttctctcacgccatacgtgaaaacttaattctgcatggaatcagcgtcagcgacagacatccatgggggcctgtgtgcaccatcttaggtggagaaatgagcagcaacaatggatggaatggaccctgggctagatagaatctggcagtctatgtggcagaaatcagcaaaaacacgattgtaaaagcaaacaagtaattagagaaatcacgtgctgtcaggtcttggaatcaattagaaagagatgactagccagatggaattgcagcccaatcatgtgaacaggcaaaccgcaaaaaataaataaaattaccaataaatacatgaaaaattataatgttgttagtagttaaaatgcgaattaaaatacatgctgttttccctaccagacaagcaaagagtaaattaaaatagtagcccaggcttgcctggcagtggcagggaggtgtggctgccagggccttagaggttggcatcaggctgcccaccccagtcactgccagagcctcccacctgagtgttcctcccggcactggaagccagtggccgtccagaggaacgtgattgaattgctgtatatccatctggtggagcactgctgtgtgtctgttaaaaaagaaaccataggtttttagggatatgtaatgatatttagaaagggtttaagagacagtaaagcttggcagaataaaccgtgtatacagaatggatgtttgcttgcataaataaatttatataaatatgtctgggggataaaaataagtatatcacaatgctaagacaggcatatggggaatttaagcttttctttatacttgtccatagtttccaatttttaaatttgtaattttttatcagaaaaataaatgtgtaaatatagtggaatctttattaaaacattcacttttatttgctatttcagaagttactgctttgcttattttttacaacatttctgtggtaaataatcggtgacttacaagcctagtgcagccagtgatgggggttggcaaacggtgacatgcaggggccatgcggcgtctagtgtctgtttctgtgttgaatttgtgtagcaacagagcaagtatttctcctgaaactcagactcactcaggccacctcagcccttctagttcctttcgtttattatagagtaacctacagcaggaataccgcgttcatttactgttaatagaagatccacaaaagattttgaaatcaaatacattctaaaactaggcaagacacgctgcaactccccttgtcctctgggttatgaggggtgagcgttggtttccgtgtgctcagatcccatgaatgagacctcacagggaagcgcccagtgactggcaggctccttaatgcctccaggtcaggctcaggaagtctctggatgcctgggtagagtctgggtcttctcagagcgggaggcacccagggcctgtggaggcctgagggctgctctggggttccagggccccagatagtggcttagcatcctggtgacacagaagggagagcactcaccgcggtcccacgtgtgtgttttgaagcctaagatgtttgcaatgactctcaacagtcgctttgaccttttcccctagatctttagcagttaaggagtttttttcaaagcccaagtataaccacattttgaaaccagaagactgtctctctgaaccgtgcactatattgcagttggacatgagaaccgtgcaaatttctgatctagaggtgagaaaaagatgaattgctccttacattcgataatcagtgaccacgaaacactcagaccagagcctggcttatcaaaaaccttcagtgagtgctgggggtgtgagtgaataactaattattttattatgcaaataagtgaatttataaaacgtttgctactgattttttccagtcttttttcttttttacgttctattttgattctttcatattgtacaccattttatgtctccagcgtcttcattttagatttatgtttaatattctcagcatcttcaaaatcaaataaattatatttcgtttcattatggtaaaaaattaca

SEQ ID NO: 361588 - DNA, 2332 bp, Homo sapiens
gcggggcgccgggccctgggcggggccttcccggctgacggcctgcgtgcactgcgcttgcgcgggttgagggcggtggctcaggctcctggaaaggaccgtccacccctccgcgctggcggtgtggacgcggaactcagcggagaaacgcgattgaggtaggtgtcctgatgggcagctcagatggctggactgcacgtaaggaaggacaggccagaaatggaaaagaaaatgaaataaatcagcagttatgaggcagagcctaagagaactatggcaacatcaggtgactgtcccagaagtgaatcgcagggagaagagcctgctgagtgcagtgaggcgggtctcctgcaggagggagtacagccagaggagtttgtggccatcgcggactacgctgccaccgatgagacccagctcagttttttgagaggagaaaaaattcttatcctgagacaaaccactgcagattggtggtggggtgagcgtgcgggctgctgtgggtacattccggcaaaccatgtggggaagcacgtggatgagtacgaccccgaggacacgtggcaggatgaagagtacttcggcagctatggaactctgaaactccacttggagatgttggcagaccagccacgaacaactaaataccacagtgtcatcctgcagaataaagaatccctgacggataaagtcatcctggacgtgggctgtgggactgggatcatcagtctcttctgtgcacactatgcgcggcctagagcggtgtacgcggtggaggccagtgagatggcacagcacacggggcagctggtcctgcagaacggctttgctgacatcatcaccgtgtaccagcagaaggtggaggatgtggtgctgcccgagaaggtggacgtgctggtgtctgagtggatggggacctgcctgctgtttgagttcatgatcgagtccatcctgtatgcccgggatgcctggctgaaggaggacggggtcatttggcccaccatggctgcgttgcaccttgtgccctgcagtgctgataaggattatcgtagcaaggtgctcttctgggacaacgcgtacgagttcaacctcagcgctctgaagtaagtgtccacagctgggactggcaccgtcttgtggggcctcctggtccacagtctgcaggtgggccaaggccctgggagatcccatacgacggttggataaatgagggtacctgtgcacccagataggacaatctgttgtagcattggagtaattaaagcagtatggtgctataacaagacagatgggcagagcagggtagaatgcaaggaacaaaaattttcgtatgtgaaaaaggtggcattacgattaggagggagtgagggccaagtcagcaaattattctggagcagttgattagcccttgttctctcacgccatacgtgaaaacttaattctgcatggaatcagcgtcagcgacagacatccatgggggcctgtgtgcaccatcttaggtggagaaatgagcagcaacaatggatggaatggaccctgggctagatagaatctggcagtctatgtggcagaaatcagcaaaaacacgattgtaaaagcaaacaagtaattagagaaatcacgtgctgtcaggtcttggaatcaattagaaagagatgactagccagatggaattgcagcccaatcatgtgaacaggcaaaccgcaaaaaataaataaaattaccaataaatacatgaaaaattataatgttgttagtagttaaaatgcgaattaaaatacatgctgttttccctaccagacaagcaaagagtaaattaaaatagtagcccaggcttgcctggcagtggcagggaggtgtggctgccagggccttagaggttggcatcaggctgcccaccccagtcactgccagagcctcccacctgagtgttcctcccggcactggaagccagtggccgtccagaggaacgtgattgaattgctgtatatccatctggtggagcactgctgtgtgtctgttaaaaaagaaaccataggtttttagggatatgtaatgatatttagaaagggtttaagagacagtaaagcttggcagaataaaccgtgtatacagaatggatgtttgcttgcataaataaatttatataaatatgtctgggggataaaaataagtatatcacaatgctaagacaggcatatggggaatttaagcttttctttatacttgtccatagtttccaatttttaaatttgtaattttttatcagaaaaataaatgtgtaaatatagtggaatctttattaaaacattcacttttatttgctatttca

SEQ ID NO: 361589 - DNA, 2232 bp, Homo sapiens
gcggggcgccgggccctgggcggggccttcccggctgacggcctgcgtgcactgcgcttgcgcgggttgagggcggtggctcaggctcctggaaaggaccgtccacccctccgcgctggcggtgtggacgcggaactcagcggagaaacgcgattgagagcagtgtgtggattacactatcactggaaaaatacgaattgagaagaaggaaaggagaagagcctgctgagtgcagtgaggcgggtctcctgcaggagggagtacagccagaggagtttgtggccatcgcggactacgctgccaccgatgagacccagctcagttttttgagaggagaaaaaattcttatcctgagacaaaccactgcagattggtggtggggtgagcgtgcgggctgctgtgggtacattccggcaaaccatgtggggaagcacgtggatgagtacgaccccgaggacacgtggcaggatgaagagtacttcggcagctatggaactctgaaactccacttggagatgttggcagaccagccacgaacaactaaataccacagtgtcatcctgcagaataaagaatccctgacggataaagtcatcctggacgtgggctgtgggactgggatcatcagtctcttctgtgcacactatgcgcggcctagagcggtgtacgcggtggaggccagtgagatggcacagcacacggggcagctggtcctgcagaacggctttgctgacatcatcaccgtgtaccagcagaaggtggaggatgtggtgctgcccgagaaggtggacgtgctggtgtctgagtggatggggacctgcctgctgtttgagttcatgatcgagtccatcctgtatgcccgggatgcctggctgaaggaggacggggtcatttggcccaccatggctgcgttgcaccttgtgccctgcagtgctgataaggattatcgtagcaaggtgctcttctgggacaacgcgtacgagttcaacctcagcgctctgaagtaagtgtccacagctgggactggcaccgtcttgtggggcctcctggtccacagtctgcaggtgggccaaggccctgggagatcccatacgacggttggataaatgagggtacctgtgcacccagataggacaatctgttgtagcattggagtaattaaagcagtatggtgctataacaagacagatgggcagagcagggtagaatgcaaggaacaaaaattttcgtatgtgaaaaaggtggcattacgattaggagggagtgagggccaagtcagcaaattattctggagcagttgattagcccttgttctctcacgccatacgtgaaaacttaattctgcatggaatcagcgtcagcgacagacatccatgggggcctgtgtgcaccatcttaggtggagaaatgagcagcaacaatggatggaatggaccctgggctagatagaatctggcagtctatgtggcagaaatcagcaaaaacacgattgtaaaagcaaacaagtaattagagaaatcacgtgctgtcaggtcttggaatcaattagaaagagatgactagccagatggaattgcagcccaatcatgtgaacaggcaaaccgcaaaaaataaataaaattaccaataaatacatgaaaaattataatgttgttagtagttaaaatgcgaattaaaatacatgctgttttccctaccagacaagcaaagagtaaattaaaatagtagcccaggcttgcctggcagtggcagggaggtgtggctgccagggccttagaggttggcatcaggctgcccaccccagtcactgccagagcctcccacctgagtgttcctcccggcactggaagccagtggccgtccagaggaacgtgattgaattgctgtatatccatctggtggagcactgctgtgtgtctgttaaaaaagaaaccataggtttttagggatatgtaatgatatttagaaagggtttaagagacagtaaagcttggcagaataaaccgtgtatacagaatggatgtttgcttgcataaataaatttatataaatatgtctgggggataaaaataagtatatcacaatgctaagacaggcatatggggaatttaagcttttctttatacttgtccatagtttccaatttttaaatttgtaattttttatcagaaaaataaatgtgtaaatatagtggaatctttattaaaacattcacttttatttgctatttca

SEQ ID NO: 361590 - DNA, 2213 bp, Homo sapiens
gcggggcgccgggccctgggcggggccttcccggctgacggcctgcgtgcactgcgcttgcgcgggttgagggcggtggctcaggctcctggaaaggaccgtccacccctccgcgctggcggtgtggacgcggaactcagcggagaaacgcgattgagaaatggaaaagaaaatgaaataaatcagcagttatgaggcagagcctaagagaactatggcaacatcaggtgactgtcccagaagtgaatcgcagggagaagagcctgctgagtgcagtgaggcgggtctcctgcaggagggagtacagccagaggagtttgtggccatcgcggactacgctgccaccgatgagacccagtggggtgagcgtgcgggctgctgtgggtacattccggcaaaccatgtggggaagcacgtggatgagtacgaccccgaggacacgtggcaggatgaagagtacttcggcagctatggaactctgaaactccacttggagatgttggcagaccagccacgaacaactaaataccacagtgtcatcctgcagaataaagaatccctgacggataaagtcatcctggacgtgggctgtgggactgggatcatcagtctcttctgtgcacactatgcgcggcctagagcggtgtacgcggtggaggccagtgagatggcacagcacacggggcagctggtcctgcagaacggctttgctgacatcatcaccgtgtaccagcagaaggtggaggatgtggtgctgcccgagaaggtggacgtgctggtgtctgagtggatggggacctgcctgctgtttgagttcatgatcgagtccatcctgtatgcccgggatgcctggctgaaggaggacggggtcatttggcccaccatggctgcgttgcaccttgtgccctgcagtgctgataaggattatcgtagcaaggtgctcttctgggacaacgcgtacgagttcaacctcagcgctctgaagtaagtgtccacagctgggactggcaccgtcttgtggggcctcctggtccacagtctgcaggtgggccaaggccctgggagatcccatacgacggttggataaatgagggtacctgtgcacccagataggacaatctgttgtagcattggagtaattaaagcagtatggtgctataacaagacagatgggcagagcagggtagaatgcaaggaacaaaaattttcgtatgtgaaaaaggtggcattacgattaggagggagtgagggccaagtcagcaaattattctggagcagttgattagcccttgttctctcacgccatacgtgaaaacttaattctgcatggaatcagcgtcagcgacagacatccatgggggcctgtgtgcaccatcttaggtggagaaatgagcagcaacaatggatggaatggaccctgggctagatagaatctggcagtctatgtggcagaaatcagcaaaaacacgattgtaaaagcaaacaagtaattagagaaatcacgtgctgtcaggtcttggaatcaattagaaagagatgactagccagatggaattgcagcccaatcatgtgaacaggcaaaccgcaaaaaataaataaaattaccaataaatacatgaaaaattataatgttgttagtagttaaaatgcgaattaaaatacatgctgttttccctaccagacaagcaaagagtaaattaaaatagtagcccaggcttgcctggcagtggcagggaggtgtggctgccagggccttagaggttggcatcaggctgcccaccccagtcactgccagagcctcccacctgagtgttcctcccggcactggaagccagtggccgtccagaggaacgtgattgaattgctgtatatccatctggtggagcactgctgtgtgtctgttaaaaaagaaaccataggtttttagggatatgtaatgatatttagaaagggtttaagagacagtaaagcttggcagaataaaccgtgtatacagaatggatgtttgcttgcataaataaatttatataaatatgtctgggggataaaaataagtatatcacaatgctaagacaggcatatggggaatttaagcttttctttatacttgtccatagtttccaatttttaaatttgtaattttttatcagaaaaataaatgtgtaaatatagtggaatctttattaaaacattcacttttatttgctatttca

SEQ ID NO: 361591 - DNA, 1519 bp, Homo sapiens
gcggggcgccgggccctgggcggggccttcccggctgacggcctgcgtgcactgcgcttgcgcgggttgagggcggtggctcaggctcctggaaaggaccgtccacccctccgcgctggcggtgtggacgcggaactcagcggagaaacgcgattgagaaatggaaaagaaaatgaaataaatcagcagttatgaggcagagcctaagagaactatggcaacatcaggtgactgtcccagaagtgaatcgcagggagaagagcctgctgagtgcagtgaggcgggtctcctgcaggagggagtacagccagaggagtttgtggccatcgcggactacgctgccaccgatgagacccagctcagttttttgagaggagaaaaaattcttatcctgagacaaaccactgcagattggtggtggggtgagcgtgcgggctgctgtgggtacattccggcaaaccatgtggggaagcacgtggatgagtacgaccccgaggacacgtggcaggatgaagagtacttcggcagctatggaactctgaaactccacttggagatgttggcagaccagccacgaacaactaaataccacagtgtcatcctgcagaataaagaatccctgacggataaagtcatcctggacgtgggctgtgggactgggatcatcagtctcttctgtgcacactatgcgcggcctagagcggtgtacgcggtggaggccagtgagatggcacagcacacggggcagctggtcctgcagaacggctttgctgacatcatcaccgtgtaccagcagaaggtggaggatgtggtgctgcccgagaaggtggacgtgctggtgtctgagtggatggggacctgcctgctggttggagaaaaagtcttccccatctggagatgacagttgatgctttatttggaaagcagtgtgcatatcttgaggggtgatgaacacaagcaaaccaagttgcacctggcttctgcacactcctgcgaaagtcggtgaacattcactccacattgacccctccctagcctggcaggtgacgtcagggtccttcacagacaaacacgcttgggctcggcaggagctgccgtggccacccccgctgcccagtgtctgccctctagaagtaggctgtgtttccaggtgttcacccgtggtgcccacagtgccgacccgtggctgggtcggagctccatgttcctaagctaggtctaggtctacactcctaggacgcacgcatatcagcccgtgtaccctgtgacagtgactgtccccacctcctgtgttagtggtgcccttactgccgtcgctcatccactcgtgtgggacgtaggattgcacagggctgtgccagtggcgtgtagggaacactgccctggctcagcgtgcgagctaaggtggcgatgtatgcgatgggactctgcatgggatagtacagttgtgtagacgtcttccaaataaattatgtgttggtgcatcgcacatgctcaataaatatttttaaatgagtga

SEQ ID NO: 361592 - DNA, 2621 bp, Homo sapiens
caaaacctggaaacaacccaagtgtccttcatctggataatccttaaggataaactggtgcgtccacacagtggaataccactgagcagtgaagaggagccagttattgaaacaggtaatttggaggaaccccagaaacggtacagtgagtgaaagaaacttgtcttgaaaggttatgtactgtttggttccatttgtatgatattctcaaaaagacacaagaccatggggatggagaccagatcggtggctggagaggctggggtcggggagggcatgaccaccagagaaaagggtgaagagtgttttgggtggcagagctgtgtgtatgctggctgtggttgtgaggacaaaatccacacaagcgctcaagttcgtaggctgtacgccagaaaagctgtttcactacataactgaaaaaataagattgaaaaataagatgtatatattttttgtgtgcgtgtgtagaaaaatacttgaaggtaaactgcagagtgataacagtggtttcttctaggtactgggttaatatgtgatttttatgtttgtttgagcttttctaagttttctacattttccgtacaaaacatgtattacttctgtaataaaagcagcttgagattatttaaggaagcaaaacacttctgttgtttctcatcaactacaggatgaagtgcaggctccctgggtggtttgcaggggccacaggccttggccccacctcgctggtgctccctctactcctttctgtgtttgaagcaagttctggttcagacagaaagcctggcctttgaagggcgttgggtccccacttcctcagtcatagatgtgatgtgcttcccttgacttgggaccttctgagggatgcaaggtggaccaaaggacccgtgaatggccagggcatgcctgcgtggctttcggtttcttaagcagtgatttcagtccacttaaagggtgtgaaaattctgagaatgctacggaccaaatatattttatgtaacagttgggacccggcaacacttcagggctctttcaaaatctggtagctacgagctcttccgtgactgagatgggacaagagtgaagatttgtccttgcttttagctctgctccagttcatagttctaatgggaaattatgtgacttaaacccaggctgtgagatgcatcagtgacgtgtgggcataaaataaaccctcgagatgttctcttgcatggtacactggcctaggcaggaatattcttgaggctaaaactgtagaactgtcagactagtgttacgaatgtggtggtgagaggcctgtgcagccgcggggcctgtgatgtgtctcctgtgtgtctttcactcctatgcagtttgagttcatgatcgagtccatcctgtatgcccgggatgcctggctgaaggaggacggggtcatttggcccaccatggctgcgttgcaccttgtgccctgcagtgctgataaggattatcgtagcaaggtgctcttctgggacaacgcgtacgagttcaacctcagcgctctgaaatctttagcagttaaggagtttttttcaaagcccaagtataaccacattttgaaaccagaagactgtctctctgaaccgtgcactatattgcagttggacatgagaaccgtgcaaatttctgatctagagaccctgaggggcgagctgcgcttcgacatcaggaaggcggggaccctgcacggcttcacggcctggtttagcgtccacttccagagcctgcaggaggggcagccgccgcaggtgctcagcaccgggcccttccaccccaccacacactggaagcagacgctgttcatgatggacgacccagtccctgtccatacaggagacgtggtcacgggttcagttgtgttgcagagaaacccagtgtggagaaggcacatgtctgtggctctgagctgggctgtcacttccagacaagaccccacatctcaaaaagttggagaaaaagtcttccccatctggagatgacagttgatgctttatttggaaagcagtgtgcatatcttgaggggtgatgaacacaagcaaaccaagttgcacctggcttctgcacactcctgcgaaagtcggtgaacattcactccacattgacccctccctagcctggcaggtgacgtcagggtccttcacagacaaacacgcttgggctcggcaggagctgccgtggccacccccgctgcccagtgtctgccctctagaagtaggctgtgtttccaggtgttcacccgtggtgcccacagtgccgacccgtggctgggtcggagctccatgttcctaagctaggtctaggtctacactcctaggacgcacgcatatcagcccgtgtaccctgtgacagtgactgtccccacctcctgtgttagtggtgcccttactgccgtcgctcatccactcgtgtgggacgtaggattgcacagggctgtgccagtggcgtgtagggaacactgccctggctcagcgtgcgagctaaggtggcgatgtatgcgatgggactctgcatgggatagtacagttgtgtagacgtcttccaaataaattatgtgttggtgcatcgcacatgctcaataaatatttttaaatgagtga

SEQ ID NO: 361593 - DNA, 1801 bp, Homo sapiens
gcggggcgccgggccctgggcggggccttcccggctgacggcctgcgtgcactgcgcttgcgcgggttgagggcggtggctcaggctcctggaaaggaccgtccacccctccgcgctggcggtgtggacgcggaactcagcggagaaacgcgattgagaaatggaaaagaaaatgaaataaatcagcagttatgaggcagagcctaagagaactatggcaacatcaggtgactgtcccagaagtgaatcgcagggagaagagcctgctgagtgcagtgaggcgggtctcctgcaggagggagtacagccagaggagtttgtggccatcgcggactacgctgccaccgatgagacccagctcagttttttgagaggagaaaaaattcttatcctgagacaaaccactgcagattggtggtggggtgagcgtgcgggctgctgtgggtacattccggcaaaccatgtggggaagcacgtggatgagtacgaccccgaggacacgtggcaggatgaagagtacttcggcagctatggaactctgaaactccacttggagatgttggcagaccagccacgaacaactaaataccacagtgtcatcctgcagaataaagaatccctgacggataaagtcatcctggacgtgggctgtgggactgggatcatcagtctcttctgtgcacactatgcgcggcctagagcggtgtacgcggtggaggccagtgagatggcacagcacacggggcagctggtcctgcagaacggctttgctgacatcatcaccgtgtaccagcagaaggtggaggatgtggtgctgcccgagaaggtggacgtgctggtgtctgagtggatggggacctgcctgctggctgcgcctctcctgagctgccgcattctcccctgcacctgtgcgtctggccctcttcacgtcctcctggcctgctgtctgcctctcccctgcacctgtgcgtctgtccctcttcatgtcctccttgcctgctgtctgcctgttctcagagcccctcagccctcaggccttcatctctcctggcccatcttcctactctgacgctgacatgtagtaaaagtctgaagacagagaagagtgcatgtgcgtttagcataggaggggcagctttcagtcagtgcagcaagggcatgtagttgttcagagatggtgctggaacgactgatttggagaaaagaggcccttcttcacaccatctgctaaaataaacctcagatgggctcaagagttaaatatttaagaaaaggaggaaacaaaaaaattgctacaagtttatttgttgttaggatgggaaaggtttttctaagaaccaagttcataatgaagctgtcaaataaaatacttgacaaaaaattccccttcatacattagcacagctaaaaactattaaatggtaaatgcaactaaagaattgcagctaaagaattgtgtgacgtaaagagttgcaataagaaaagcataagataaaggtaacctcatggaaggtgagcagggactagaaaggcagagaaatgccagaggccaggagcttgaacgttgttcaatgccaccaacaatttgaaagtaactgtaatagttttgacctgggaagttggctgagcaatcctctaatatctgatgctcccgatgctgaggttgtggggaagtgtgcaccgccatgccctttttttggcagtgtaaattggtaaagccttttgaaggaaaatagggcagaataagtcaaagagcattaaaatttttttgtttttccagaagcagcaaagttctgaagga

SEQ ID NO: 361594 - DNA, 844 bp, Homo sapiens
acacgcacccctgtcttgcagcaccacacactggaagcagacgctgttcatgatggacgacccagtccctgtccatacaggagacgtggtcacgggttcagttgtgttgcagagaaacccagtgtggagaaggcacatgtctgtggctctgagctgggctgtcacttccagacaagaccccacatctcaaaaagttggagaaaaagtcttccccatctggagatgacagttgatgctttatttggaaagcagtgtgcatatcttgaggggtgatgaacacaagcaaaccaagttgcacctggcttctgcacactcctgcgaaagtcggtgaacattcactccacattgacccctccctagcctggcaggtgacgtcagggtccttcacagacaaacacgcttgggctcggcaggagctgccgtggccacccccgctgcccagtgtctgccctctagaagtaggctgtgtttccaggtgttcacccgtggtgcccacagtgccgacccgtggctgggtcggagctccatgttcctaagctaggtctaggtctacactcctaggacgcacgcatatcagcccgtgtaccctgtgacagtgactgtccccacctcctgtgttagtggtgcccttactgccgtcgctcatccactcgtgtgggacgtaggattgcacagggctgtgccagtggcgtgtagggaacactgccctggctcagcgtgcgagctaaggtggcgatgtatgcgatgggactctgcatgggatagtacagttgtgtagacgtcttccaaataaattatgtgttggtgcatcgcacatgctcaataaatatttttaaatgagtga

SEQ ID NO: 361595 - DNA, 824 bp, Homo sapiens
gcggggcgccgggccctgggcggggccttcccggctgacggcctgcgtgcactgcgcttgcgcgggttgagggcggtggctcaggctcctggaaaggaccgtccacccctccgcgctggcggtgtggacgcggaactcagcggagaaacgcgattgagagcagtgtgtggattacactatcactggaaaaatacgaattgagaagaaggaaaagactggaagatgcagaccttggttcctgttagtggaaacactgtaaggtcccagaaatggaaaagaaaatgaaataaatcagcagttatgaggcagagcctaagagaactatggcaacatcaggtgactgtcccagaagtgaatcgcagggagaagagcctgctgagtgcagtgaggcgggtctcctgcaggagggagtacagccagaggagtttgtggccatcgcggactacgctgccaccgatgagacccagctcagttttttgagaggagaaaaaattcttatcctgagacaaaccactgcagattggtggtggggtgagcgtgcgggctgctgtgggtacattccggcaaaccatgtggggaagcacgtggatgagtacgaccccgaggacacgtggcaggatgaagagtacttcggcagctatggaactctgtgggcaggctgcccacgagtgatggttttaggaaaaaggtgttggttgggttgaagttaccacaatgattaggtcattttctagttctttctgtggcaacatttgggaagcttagaaagtgacttgcggccgggcgtggtggctcatgcctgtgatcccagcacttcgtgtcag

SEQ ID NO: 361596 - DNA, 5865 bp, Homo sapiens
ggagtgcggcttactggcaggcggcgcaggcggccgctgccaaaggggaagtgatctggggctggagcgatggcccggggctggagctcgcggccgccgccgccgcagccgccgccaccaacgccaacaacaacgtgtcgggagcagccgcggccgaagccggagcaggggccggagtcgcggctggagtggggcctgcgcgtgtgagtggccgagagttgcccgtgccggagacctcaaactccgggcgggagcgctttcggtcggccgagccgccgtcgcccgcggcaccgtgtccccaaggcccagacagcggggcgggggtctatcaggcgcgggactggcttctctcaggccgacccttctagccgggctccggatcttcctcggcctcgggcccccttcacgttcaggacggaggccggagaacggtgatcatcacacaccccagccggcttcctggccagggcattttctctgcggccaagcagtgttgggattgtagctgctgggagccccctcctgccgccacctctcctgcaaggaagggactgacgcgttcccactttcttactctgcacctccccactctcttcccattcaagaacgagtttctcttccctctccattggaaatcctgctccggaggtccaaaacacgtattttaagcgtgcccttcctcacctcctggagcacccttagaagtattgcctacttatccgggctgagaatccttcatttttgacctggcttttttttcgccctttgggagataaaggtccctctccaccctctactaacactctgcacccaaggccttatcctttggggtcaccagctccttggccatttctatgtgatttcccccacccatctgagttccagtttcctctgggctccaatctccagtccctggcggatctggtcagtcccacccctaggtgggagtgaccagggggctctggcccaggattcccaaccctggaaggcagctccaaggcaggaagagaattgggcatcgggtacgaacctggcagctcaggagtcggggctccactcaccccacacaaaaagatgaaaaagcgcaaagagctcaatgcattgattggtttggctggggacagccggagaaagaagcccaagaaaggcccaagcagtcaccgcctgcttcgcactgagcctcccgactcagactctgagtccagctccgaagaggaagaggaattcggtgtggttggaaatcgctctcgctttgccaagggagactatttacgatgctgcaagatctgttatccgctctgtggttttgtcatccttgctgcctgtgttgtggcctgtgttggcttggtgtggatgcaggttgctctcaaggaggatctggatgccctcaaggaaaaatttcgaacaatggaatctaatcagaaaagctcattccaagaaatccccaaacttaatgaagaactactcagcaagcaaaaacaacttgagaagattgaatctggagagatgggtttgaacaaagtctggataaacatcacagaaatgaataagcagatttctctgttgacttctgcagtgaaccacctcaaagccaatgttaagtcagctgcagacttgattagcctgcctaccactgtagagggacttcagaagagtgtagcttccattggcaatactttaaacagcgtccatcttgctgtggaagcactacagaaaactgtggatgaacacaagaaaacgatggaattactgcagagtgatatgaatcagcacttcttgaaggagactcctggaagcaaccagatcattccgtcaccttcagccacatcagaacttgacaataaaacccacagtgagaatttgaaacaggatatcctgtaccttcacaactctttagaggaggtaaacagtgccctagtggggtaccagagacagaatgatcttaaactcgagggaatgaacgagacagtcagtaatcttacccagagagtcaacctgatagaaagcgatgtggttgctatgagcaaggtagaaaagaaagcaaacctgtccttcagcatgatgggtgatagatctgccactctgaaaagacagtctttggatcaagtcaccaacagaacagatacagtaaaaatccaaagcataaagaaagaagatagttcaaattctcaggtatccaagctaagagagaaactccagctgatcagtgctcttacaaacaaacctgagagcaacaggcctccagagaccgccgatgaagagcaagtagagagtttcacatcaaagccatcagcattgccaaaattttcacagtttcttggagacccagttgagaaagctgcccaactaagacctatctccctaccaggagtttctagcactgaagatcttcaggatttattccgcaagactggccaggacgtggatgggaagctgacctaccaggaaatctggacctccctaggttctgctatgccagaaccagagagcttgagagcatttgattccgatggagatggaagatactcattcctggagctaagggtagctttaggtatctagcttcatcaggcatattttagaaatggactgcctaatatctatttacctaacaacaaaacaacccttacttacccatcagtcctctagtcctccaaactactgtagcagatactttgccaccttttaacttgtttgaagaagctatataaaagttatttttttaaagaagaagaccattttacttatgatgttcagaaatctatgatttcctacaaccagtaagatcttacattttaaaattgccagaaaaaaaattaaagccctctttttttctctttcctttttttgaggggaggagaccttatcttttaaagctgggaaatgtatatagagagagaataagccacttttatatttcacttaaatttgccttaaattagctgcactttatagagactcagaaaatgtcttttctttaaaagataggccttttctgtttgtaaatatttaaatgaaagaaagcattgtgcatattgtgtggaaagtaggaagaatggttttgaacaggatatgaacaaatgacttattaaaaattgctgatctggtgtaggtggcagctgaaactacatccatgtctccataaggtatccctcaaaggcccaggcgctgccagggggtttgtcctggtagctggaggaaccgatttcagggagtagacactggagacaatactgactccaggcatggctcatggaagtaggattctggttctttgttcctattccctcagctaatcccaacctgggaatcagagaagtcttggggatttttctcatttttagtactatttcagggtttatgagcataaaaagttatccattggggagctccattttccctgctgagtgagctagattgccttccccacccacccacttaagtctgtcttaaagccgtagctggctcccaccaccagtaccatctccatttgaatggcagggctaaattcccccagccattatctcacactgaccacccagagctttagaagagagctgtgcttctaattttgacccagaaaaccataccccttgagattttacctagaggctaaccaagagcctaatatgtttctctgggggatgactaaagccaaaaaggctgtgagatgaaacatgtgaaataatattcagtttccttaccattaccagctcagaagtagctagaggctttctacccaaaggatgccaaagtatagcagggcaggcctggagctagggccttcacatggtggtagcaagtttttcaaatctaatacaatcaagtacaatacttcctttaaatgcttctgtggacctggcatgaaagatccctagattgaaaggaataatacctccatgtctcctgtatgttgagtctagaattgctgtgttgttcttagaagcagtctttgggcaacaacttgaaaggggaaaaaaaaactacaaaaacttaactttggtataggccaagtcagggagaaagtagagaaagctgtcatgccacagacttctttagtggagatcatttcctttttaactttgttcaggttgcccttcaccatggatacagtccggtacccttaaacatttaagggctgtttttttttttctttacatgatgttcagcttggtattaaccaaacttaaattttttttccagaagtattaaaatttagttaaagcaagatgaagtcttttcccatgaatgtgtccccttatctcattatagcttatgctcagtttcactttcttggaaaggttaaaacaaattagcctggcactttaggtaacttgaaaataactctcacccttctgactgccttccatccactctcaccccacacctttttttaatatatatacacccttacagattttctaacaaccaaataaaattctagcaataaattgaattatactgctatatttgtatatactgtaccataaatagtatgtctgtacctggaaggtatttttttgagaactgatttatatgaaatatacttgagggtaatgtagcttgtcctttttagtttcaaattcttattcataggcagatactttgaagacaccttaactctttgttgtgtgtattttcccttgcatcagataactatacatggagaaatccattttgttttttggtttatcttctgttcttcctaccttgtgcttgtctgactagtatcacccctgagccagtatacagtaccatcctctccccctaccaagtttggcagaggtgtttatactgcattctcagatctatgaatatttttgtcatcctgcctgagaaagtacatcttccaggcaaaagtagggtatcttgaactcctttcttctgagttgagcagactcactggcttaagcatcccataagcctattatttagtgtgaatttgggacttttatttgtatgttgtcttaacttactgagcctgtgacttgtatttagctgtagtcaagcctcaccagccatatctcatctctgagaggaagactggatagtgagtttggttttggttttggttttaaacccttttaccttttcagtctggcagctcctactgctgctttcctaagttactcaaagcactgcttcttggtccttgttttcttttgccttgtactatcttgtataatgtttactaaaagagcctccccataaatcagagaggcaaaaaggtagcatataaaaagaagaaccaaaagaagagaaaacctgacttctagatgactgtggtgtcatctaaaaggcagaggtgcctgaccctcaggaatgtgtatgatgcaacagagctgaagaatgggttcccttcacctactgctggccattgtcccttctgttggagattcctttctttatggttgctgttcataaccccttcaacacccccccttgctggtcctgccggtcacagttgaggattttggctgtgatgggctcatactcataatggcctgttgagttgtttttagtgacaggttttgtttgctgcacacctcattggcttgcttaccaacaccagctagaagtggtccctctttcatatccaaaccagaacacatttgggtattcctgagactttatagagcgtgtattgtttgttatacgaacctaacctaccttgttgttttctcatattaagaaatttaaatctactttgttttagtgaagctattttggtaatgtataagcaattttggttctgtttagggagaattcagggtttccatgacttgatttgagctttgcatatttcaaataagtaacacagccattttaatttagctaaataaaaaaatttcttttttctctcaa

SEQ ID NO: 361597 - DNA, 476 bp, Homo sapiens
gcggccgcgagctccagccccgggccttcgctccagccccagatcacccccccttgctggtcctgccggtcacagttgaggattttggctgtgatgggctcatactcataatggcctgttgagttgtttttagtgacaggttttgtttgctgcacacctcattggcttgcttaccaacaccagctagaagtggtccctctttcatatccaaaccagaacacatttgggtattcctgagactttatagagcgtgtattgtttgttatacgaacctaacctaccttgttgttttctcatattaagaaatttaaatctactttgttttagtgaagctattttggtaatgtataagcaattttggttctgtttagggagaattcagggtttccatgacttgatttgagctttgcatatttcaaataagtaacacagccattttaatttagctaaataaaaaaatttcttttttctctcaa

SEQ ID NO: 361598 - DNA, 546 bp, Homo sapiens
ttgtaaggtggtaagagcatgaaattctgcctaaagtggtctagtcacaaggtgaagcaagatatttcggaaagttatttagttagtgtgaaatagctcctagaaaacaagatcctgctcatttaggaaatgggtgtcgcataggcacctgagcaagggtacatttcctttactgctgacacatgcattccttcccccatcaaccaaatgttcacagtgaatcagatcatctgtagcataatgttcccttaatggtttcaaatccagcaagatacttatcagtgctgaggaccaaagacatcaccagtatatgttgattcattcttttattgtctttatagggaacctactgagggtcaaacactacatgctaaacaggctctgggaatacagtggacacttagatgaagtcttactaccaccttaaaccttctataatctttgttttgtgcagaaagaagatagttcaaattctcaggtatccaagctaagagagaaactccagcctgggcaacagagcaagactctgtcttgggtaaaaaaaaa

SEQ ID NO: 361599 - DNA, 5811 bp, Homo sapiens
ggagtgcggcttactggcaggcggcgcaggcggccgctgccaaaggggaagtgatctggggctggagcgatggcccggggctggagctcgcggccgccgccgccgcagccgccgccaccaacgccaacaacaacgtgtcgggagcagccgcggccgaagccggagcaggggccggagtcgcggctggagtggggcctgcgcgtgtgagtggccgagagttgcccgtgccggagacctcaaactccgggcgggagcgctttcggtcggccgagccgccgtcgcccgcggcaccgtgtccccaaggcccagacagcggggcgggggtctatcaggcgcgggactggcttctctcaggccgacccttctagccgggctccggatcttcctcggcctcgggcccccttcacgttcaggacggaggccggagaacggtgatcatcacacaccccagccggcttcctggccagggcattttctctgcggccaagcagtgttgggattgtagctgctgggagccccctcctgccgccacctctcctgcaaggaagggactgacgcgttcccactttcttactctgcacctccccactctcttcccattcaagaacgagtttctcttccctctccattggaaatcctgctccggaggtccaaaacacgtattttaagcgtgcccttcctcacctcctggagcacccttagaagtattgcctacttatccgggctgagaatccttcatttttgacctggcttttttttcgccctttgggagataaaggtccctctccaccctctactaacactctgcacccaaggccttatcctttggggtcaccagctccttggccatttctatgtgatttcccccacccatctgagttccagtttcctctgggctccaatctccagtccctggcggatctggtcagtcccacccctaggtgggagtgaccagggggctctggcccaggattcccaaccctggaaggcagctccaaggcaggaagagaattgggcatcgggtacgaacctggcagctcaggagtcggggctccactcaccccacacaaaaagatgaaaaagcgcaaagagctcaatgcattgattggtttggctggggacagccggagaaagaagcccaagaaaggcccaagcagtcaccgcctgcttcgcactgagcctcccgactcagactctgagtccagctccgaagaggaagaggaattcggtgtggttggaaatcgctctcgctttgccaagggagactatttacgatgctgcaagatctgttatccgctctgtggttttgtcatccttgctgcctgtgttgtggcctgtgttggcttggtgtggatgcaggttgctctcaaggaggatctggatgccctcaaggaaaaatttcgaacaatggaatctaatcagaaaagctcattccaagaaatccccaaacttaatgaagaactactcagcaagcaaaaacaacttgagaagattgaatctggagagatgggtttgaacaaagtctggataaacatcacagaaatgaataagcagatttctctgttgacttctgcagtgaaccacctcaaagccaatgttaagtcagctgcagacttgattagcctgcctaccactgtagagggacttcagaagagtgtagcttccattggcaatactttaaacagcgtccatcttgctgtggaagcactacagaaaactgtggatgaacacaagaaaacgatggaattactgcagagtgatatgaatcagcacttcttgaaggagactcctggaagcaaccagatcattccgtcaccttcagccacatcagaacttgacaataaaacccacagtgagaatttgaaacaggatatcctgtaccttcacaactctttagaggaggtaaacagtgccctagtggggtaccagagacagaatgatcttaaactcgagggaatgaacgagacagtcagtaatcttacccagagagtcaacctgatagaaagcgatgtggttgctatgagcaaggtagaaaagaaagcaaacctgtccttcagcatgatgggtgatagatctgccactctgaaaagacagtctttggatcaagtcaccaacagaacagatacagtaaaaatccaaagcataaagaaagaagatagttcaaattctcaggtatccaagctaagagagaaactccagctgatcagtgctcttacaaacaaacctgagagcaacaggcctccagagaccgccgatgaagagcaagtagagagtttcacatcaaagccatcagcattgccaaaattttcacagtttcttggagacccagttgagaaagctgcccaactaagacctatctccctaccaggagtttctagcactgaagatcttcaggatttattccgcaagactggccaggacgtggatgggaagctgacctaccaggaaatctggacctccctaggttctgctatgccagaaccagagagcttgagagcatttgattccgatggagatggaagatactcattcctggagctaagggtagctttaggtatctagcttcatcaggcatattttagaaatggactgcctaatatctatttacctaacaacaaaacaacccttacttacccatcagtcctctagtcctccaaactactgtagcagatactttgccaccttttaacttgtttgaagaagctatataaaagttatttttttaaagaagaagaccattttacttatgatgttcagaaatctatgatttcctacaaccagtaagatcttacattttaaaattgccagaaaaaaaattaaagccctctttttttctctttcctttttttgaggggaggagaccttatcttttaaagctgggaaatgtatatagagagagaataagccacttttatatttcacttaaatttgccttaaattagctgcactttatagagactcagaaaatgtcttttctttaaaagataggccttttctgtttgtaaatatttaaatgaaagaaagcattgtgcatattgtgtggaaagtaggaagaatggttttgaacaggatatgaacaaatgacttattaaaaattgctgatctggtgtaggtggcagctgaaactacatccatgtctccataaggtatccctcaaaggcccaggcgctgccagggggtttgtcctggtagctggaggaaccgatttcagggagtagacactggagacaatactgactccaggcatggctcatggaagtaggattctggttctttgttcctattccctcagctaatcccaacctgggaatcagagaagtcttggggatttttctcatttttagtactatttcagggtttatgagcataaaaagttatccattggggagctccattttccctgctgagtgagctagattgccttccccacccacccacttaagtctgtcttaaagccgtagctggctcccaccaccagtaccatctccatttgaatggcagggctaaattcccccagccattatctcacactgaccacccagagctttagaagagagctgtgcttctaattttgacccagaaaaccataccccttgagattttacctagaggctaaccaagagcctaatatgtttctctgggggatgactaaagccaaaaaggctgtgagatgaaacatgtgaaataatattcagtttccttaccattaccagctcagaagtagctagaggctttctacccaaaggatgccaaagtatagcagggcaggcctggagctagggccttcacatggtggtagcaagtttttcaaatctaatacaatcaagtacaatacttcctttaaatgcttctgtggacctggcatgaaagatccctagattgaaaggaataatacctccatgtctcctgtatgttgagtctagaattgctgtgttgttcttagaagcagtctttgggcaacaacttgaaaggggaaaaaaaaactacaaaaacttaactttggtataggccaagtcagggagaaagtagagaaagctgtcatgccacagacttctttagtggagatcatttcctttttaactttgttcaggttgcccttcaccatggatacagtccggtacccttaaacatttaagggctgtttttttttttctttacatgatgttcagcttggtattaaccaaacttaaattttttttccagaagtattaaaatttagttaaagcaagatgaagtcttttcccatgaatgtgtccccttatctcattatagcttatgctcagtttcactttcttggaaaggttaaaacaaattagcctggcactttaggtaacttgaaaataactctcacccttctgactgccttccatccactctcaccccacacctttttttaatatatatacacccttacagattttctaacaaccaaataaaattctagcaataaattgaattatactgctatatttgtatatactgtaccataaatagtatgtctgtacctggaaggtatttttttgagaactgatttatatgaaatatacttgagggtaatgtagcttgtcctttttagtttcaaattcttattcataggcagatactttgaagacaccttaactctttgttgtgtgtattttcccttgcatcagataactatacatggagaaatccattttgttttttggtttatcttctgttcttcctaccttgtgcttgtctgactagtatcacccctgagccagtatacagtaccatcctctccccctaccaagtttggcagaggtgtttatactgcattctcagatctatgaatatttttgtcatcctgcctgagaaagtacatcttccaggcaaaagtagggtatcttgaactcctttcttctgagttgagcagactcactggcttaagcatcccataagcctattatttagtgtgaatttgggacttttatttgtatgttgtcttaacttactgagcctgtgacttgtatttagctgtagtcaagcctcaccagccatatctcatctctgagaggaagactggatagtgagtttggttttggttttggttttaaacccttttaccttttcagtctggcagctcctactgctgctttcctaagttactcaaagcactgcttcttggtccttgttttcttttgccttgtactatcttgtataatgtttactaaaagagcctccccataaatcagagaggcaaaaaggtagcatataaaaagaagaaccaaaagaagagaaaacctgacttctagatgactgtggtgtcatctaatgggttcccttcacctactgctggccattgtcccttctgttggagattcctttctttatggttgctgttcataaccccttcaacacccccccttgctggtcctgccggtcacagttgaggattttggctgtgatgggctcatactcataatggcctgttgagttgtttttagtgacaggttttgtttgctgcacacctcattggcttgcttaccaacaccagctagaagtggtccctctttcatatccaaaccagaacacatttgggtattcctgagactttatagagcgtgtattgtttgttatacgaacctaacctaccttgttgttttctcatattaagaaatttaaatctactttgttttagtgaagctattttggtaatgtataagcaattttggttctgtttagggagaattcagggtttccatgacttgatttgagctttgcatatttcaaataagtaacacagccattttaatttagctaaataaaaaaatttcttttttctctcaa

SEQ ID NO: 361600 - DNA, 5811 bp, Homo sapiens
ggagtgcggcttactggcaggcggcgcaggcggccgctgccaaaggggaagtgatctggggctggagcgatggcccggggctggagctcgcggccgccgccgccgcagccgccgccaccaacgccaacaacaacgtgtcgggagcagccgcggccgaagccggagcaggggccggagtcgcggctggagtggggcctgcgcgtgtgagtggccgagagttgcccgtgccggagacctcaaactccgggcgggagcgctttcggtcggccgagccgccgtcgcccgcggcaccgtgtccccaaggcccagacagcggggcgggggtctatcaggcgcgggactggcttctctcaggccgacccttctagccgggctccggatcttcctcggcctcgggcccccttcacgttcaggacggaggccggagaacggtgatcatcacacaccccagccggcttcctggccagggcattttctctgcggccaagcagtgttgggattgtagctgctgggagccccctcctgccgccacctctcctgcaaggaagggactgacgcgttcccactttcttactctgcacctccccactctcttcccattcaagaacgagtttctcttccctctccattggaaatcctgctccggaggtccaaaacacgtattttaagcgtgcccttcctcacctcctggagcacccttagaagtattgcctacttatccgggctgagaatccttcatttttgacctggcttttttttcgccctttgggagataaaggtccctctccaccctctactaacactctgcacccaaggccttatcctttggggtcaccagctccttggccatttctatgtgatttcccccacccatctgagttccagtttcctctgggctccaatctccagtccctggcggatctggtcagtcccacccctaggtgggagtgaccagggggctctggcccaggattcccaaccctggaaggcagctccaaggcaggaagagaattgggcatcgggtacgaacctggcagctcaggagtcggggctccactcaccccacacaaaaagatgaaaaagcgcaaagagctcaatgcattgattggtttggctggggacagccggagaaagaagcccaagaaaggcccaagcagtcaccgcctgcttcgcactgagcctcccgactcagactctgagtccagctccgaagaggaagaggaattcggtgtggttggaaatcgctctcgctttgccaagggagactatttacgatgctgcaagatctgttatccgctctgtggttttgtcatccttgctgcctgtgttgtggcctgtgttggcttggtgtggatgcaggttgctctcaaggaggatctggatgccctcaaggaaaaatttcgaacaatggaatctaatcagaaaagctcattccaagaaatccccaaacttaatgaagaactactcagcaagcaaaaacaacttgagaagattgaatctggagagatgggtttgaacaaagtctggataaacatcacagaaatgaataagcagatttctctgttgacttctgcagtgaaccacctcaaagccaatgttaagtcagctgcagacttgattagcctgcctaccactgtagagggacttcagaagagtgtagcttccattggcaatactttaaacagcgtccatcttgctgtggaagcactacagaaaactgtggatgaacacaagaaaacgatggaattactgcagagtgatatgaatcagcacttcttgaaggagactcctggaagcaaccagatcattccgtcaccttcagccacatcagaacttgacaataaaacccacagtgagaatttgaaacaggatatcctgtaccttcacaactctttagaggaggtaaacagtgccctagtggggtaccagagacagaatgatcttaaactcgagggaatgaacgagacagtcagtaatcttacccagagagtcaacctgatagaaagcgatgtggttgctatgagcaaggtagaaaagaaagcaaacctgtccttcagcatgatgggtgatagatctgccactctgaaaagacagtctttggatcaagtcaccaacagaacagatacagtaaaaatccaaagcataaagaaagaagatagttcaaattctcaggtatccaagctaagagagaaactccagctgatcagtgctcttacaaacaaacctgagagcaacaggcctccagagaccgccgatgaagagcaagtagagagtttcacatcaaagccatcagcattgccaaaattttcacagtttcttggagacccagttgagaaagctgcccaactaagacctatctccctaccaggagtttctagcactgaagatcttcaggatttattccgcaagactggccaggacgtggatgggaagctgacctaccaggaaatctggacctccctaggttctgctatgccagaaccagagagcttgagagcatttgattccgatggagatggaagatactcattcctggagctaagggtagctttaggtatctagcttcatcaggcatattttagaaatggactgcctaatatctatttacctaacaacaaaacaacccttacttacccatcagtcctctagtcctccaaactactgtagcagatactttgccaccttttaacttgtttgaagaagctatataaaagttatttttttaaagaagaagaccattttacttatgatgttcagaaatctatgatttcctacaaccagtaagatcttacattttaaaattgccagaaaaaaaattaaagccctctttttttctctttcctttttttgaggggaggagaccttatcttttaaagctgggaaatgtatatagagagagaataagccacttttatatttcacttaaatttgccttaaattagctgcactttatagagactcagaaaatgtcttttctttaaaagataggccttttctgtttgtaaatatttaaatgaaagaaagcattgtgcatattgtgtggaaagtaggaagaatggttttgaacaggatatgaacaaatgacttattaaaaattgctgatctggtgtaggtggcagctgaaactacatccatgtctccataaggtatccctcaaaggcccaggcgctgccagggggtttgtcctggtagctggaggaaccgatttcagggagtagacactggagacaatactgactccaggcatggctcatggaagtaggattctggttctttgttcctattccctcagctaatcccaacctgggaatcagagaagtcttggggatttttctcatttttagtactatttcagggtttatgagcataaaaagttatccattggggagctccattttccctgctgagtgagctagattgccttccccacccacccacttaagtctgtcttaaagccgtagctggctcccaccaccagtaccatctccatttgaatggcagggctaaattcccccagccattatctcacactgaccacccagagctttagaagagagctgtgcttctaattttgacccagaaaaccataccccttgagattttacctagaggctaaccaagagcctaatatgtttctctgggggatgactaaagccaaactcagaagtagctagaggctttctacccaaaggatgccaaagtatagcagggcaggcctggagctagggccttcacatggtggtagcaagtttttcaaatctaatacaatcaagtacaatacttcctttaaatgcttctgtggacctggcatgaaagatccctagattgaaaggaataatacctccatgtctcctgtatgttgagtctagaattgctgtgttgttcttagaagcagtctttgggcaacaacttgaaaggggaaaaaaaaactacaaaaacttaactttggtataggccaagtcagggagaaagtagagaaagctgtcatgccacagacttctttagtggagatcatttcctttttaactttgttcaggttgcccttcaccatggatacagtccggtacccttaaacatttaagggctgtttttttttttctttacatgatgttcagcttggtattaaccaaacttaaattttttttccagaagtattaaaatttagttaaagcaagatgaagtcttttcccatgaatgtgtccccttatctcattatagcttatgctcagtttcactttcttggaaaggttaaaacaaattagcctggcactttaggtaacttgaaaataactctcacccttctgactgccttccatccactctcaccccacacctttttttaatatatatacacccttacagattttctaacaaccaaataaaattctagcaataaattgaattatactgctatatttgtatatactgtaccataaatagtatgtctgtacctggaaggtatttttttgagaactgatttatatgaaatatacttgagggtaatgtagcttgtcctttttagtttcaaattcttattcataggcagatactttgaagacaccttaactctttgttgtgtgtattttcccttgcatcagataactatacatggagaaatccattttgttttttggtttatcttctgttcttcctaccttgtgcttgtctgactagtatcacccctgagccagtatacagtaccatcctctccccctaccaagtttggcagaggtgtttatactgcattctcagatctatgaatatttttgtcatcctgcctgagaaagtacatcttccaggcaaaagtagggtatcttgaactcctttcttctgagttgagcagactcactggcttaagcatcccataagcctattatttagtgtgaatttgggacttttatttgtatgttgtcttaacttactgagcctgtgacttgtatttagctgtagtcaagcctcaccagccatatctcatctctgagaggaagactggatagtgagtttggttttggttttggttttaaacccttttaccttttcagtctggcagctcctactgctgctttcctaagttactcaaagcactgcttcttggtccttgttttcttttgccttgtactatcttgtataatgtttactaaaagagcctccccataaatcagagaggcaaaaaggtagcatataaaaagaagaaccaaaagaagagaaaacctgacttctagatgactgtggtgtcatctaaaaggcagaggtgcctgaccctcaggaatgtgtatgatgcaacagagctgaagaatgggttcccttcacctactgctggccattgtcccttctgttggagattcctttctttatggttgctgttcataaccccttcaacacccccccttgctggtcctgccggtcacagttgaggattttggctgtgatgggctcatactcataatggcctgttgagttgtttttagtgacaggttttgtttgctgcacacctcattggcttgcttaccaacaccagctagaagtggtccctctttcatatccaaaccagaacacatttgggtattcctgagactttatagagcgtgtattgtttgttatacgaacctaacctaccttgttgttttctcatattaagaaatttaaatctactttgttttagtgaagctattttggtaatgtataagcaattttggttctgtttagggagaattcagggtttccatgacttgatttgagctttgcatatttcaaataagtaacacagccattttaatttagctaaataaaaaaatttcttttttctctcaa

SEQ ID NO: 361601 - DNA, 5024 bp, Homo sapiens
agaattctatgcctaaatagcagaacggaagcctcattttattttgattaaattcctattttaatacatacattgcatcagtcagtgagtcagtgagtatttattgagccccttcaggatacaaagtagtgctctggtagagctattgagtttgaaatattagtcacatttttaaaccaaaaccaaatccccaagtagttgaaagtgctgttcaaattgtcagagtgcagttcctgtagactgtattttgtgagatgggcttttactttatatgttcccacttgggcaggaacaaaagtttggtaaattactgaggtattacattttaccaaaatgaaattttgaagtgatccttcatcattagctttcttcctgtccaattgttgagggagtgtgtgataattacagcatcttttgagtaatttaagattttgggatcttgtgctgccaggacagggtaaagaataacacttgccttcactctttgacactagtgttcaaattgggcagggaaagaaggggtattattgttgcctcccagatcccaactctatccaaagtactgtctcctttacttctgtgagctgacagggttgcagaaacacataaaatcctagactatcttgacatcaccaaccgtagagtttgtgaaggtaacgtgtcctctacaaattctcatttgttttcattgtttgttactcttttttgttcagatttctctgttgacttctgcagtgaaccacctcaaagccaatgttaagtcagctgcagacttgattagcctgcctaccactgtagagggacttcagaagagtgtagcttccattggcaatactttaaacagcgtccatcttgctgtggaagcactacagaaaactgtggatgaacacaagaaaacgatggaattactgcagagtgatatgaatcagcacttcttgaaggagactcctggaagcaaccagatcattccgtcaccttcagccacatcagaacttgacaataaaacccacagtgagaatttgaaacaggatatcctgtaccttcacaactctttagaggaggtaaacagtgccctagtggggtaccagagacagaatgatcttaaactcgagggaatgaacgagacagtcagtaatcttacccagagagtcaacctgatagaaagcgatgtggttgctatgagcaaggtagaaaagaaagcaaacctgtccttcagcatgatgggtgatagatctgccactctgaaaagacagtctttggatcaagtcaccaacagaacagatacagtaaaaatccaaagcataaagaaagaagatagttcaaattctcaggtatccaagctaagagagaaactccagctgatcagtgctcttacaaacaaacctgagagcaacaggcctccagagaccgccgatgaagagcaagtagagagtttcacatcaaagccatcagcattgccaaaattttcacagtttcttggagacccagttgagaaagctgcccaactaagacctatctccctaccaggagtttctagcactgaagatcttcaggatttattccgcaagactggccaggacgtggatgggaagctgacctaccaggaaatctggacctccctaggttctgctatgccagaaccagagagcttgagagcatttgattccgatggagatggaagatactcattcctggagctaagggtagctttaggtatctagcttcatcaggcatattttagaaatggactgcctaatatctatttacctaacaacaaaacaacccttacttacccatcagtcctctagtcctccaaactactgtagcagatactttgccaccttttaacttgtttgaagaagctatataaaagttatttttttaaagaagaagaccattttacttatgatgttcagaaatctatgatttcctacaaccagtaagatcttacattttaaaattgccagaaaaaaaattaaagccctctttttttctctttcctttttttgaggggaggagaccttatcttttaaagctgggaaatgtatatagagagagaataagccacttttatatttcacttaaatttgccttaaattagctgcactttatagagactcagaaaatgtcttttctttaaaagataggccttttctgtttgtaaatatttaaatgaaagaaagcattgtgcatattgtgtggaaagtaggaagaatggttttgaacaggatatgaacaaatgacttattaaaaattgctgatctggtgtaggtggcagctgaaactacatccatgtctccataaggtatccctcaaaggcccaggcgctgccagggggtttgtcctggtagctggaggaaccgatttcagggagtagacactggagacaatactgactccaggcatggctcatggaagtaggattctggttctttgttcctattccctcagctaatcccaacctgggaatcagagaagtcttggggatttttctcatttttagtactatttcagggtttatgagcataaaaagttatccattggggagctccattttccctgctgagtgagctagattgccttccccacccacccacttaagtctgtcttaaagccgtagctggctcccaccaccagtaccatctccatttgaatggcagggctaaattcccccagccattatctcacactgaccacccagagctttagaagagagctgtgcttctaattttgacccagaaaaccataccccttgagattttacctagaggctaaccaagagcctaatatgtttctctgggggatgactaaagccaaaaaggctgtgagatgaaacatgtgaaataatattcagtttccttaccattaccagctcagaagtagctagaggctttctacccaaaggatgccaaagtatagcagggcaggcctggagctagggccttcacatggtggtagcaagtttttcaaatctaatacaatcaagtacaatacttcctttaaatgcttctgtggacctggcatgaaagatccctagattgaaaggaataatacctccatgtctcctgtatgttgagtctagaattgctgtgttgttcttagaagcagtctttgggcaacaacttgaaaggggaaaaaaaaactacaaaaacttaactttggtataggccaagtcagggagaaagtagagaaagctgtcatgccacagacttctttagtggagatcatttcctttttaactttgttcaggttgcccttcaccatggatacagtccggtacccttaaacatttaagggctgtttttttttttctttacatgatgttcagcttggtattaaccaaacttaaattttttttccagaagtattaaaatttagttaaagcaagatgaagtcttttcccatgaatgtgtccccttatctcattatagcttatgctcagtttcactttcttggaaaggttaaaacaaattagcctggcactttaggtaacttgaaaataactctcacccttctgactgccttccatccactctcaccccacacctttttttaatatatatacacccttacagattttctaacaaccaaataaaattctagcaataaattgaattatactgctatatttgtatatactgtaccataaatagtatgtctgtacctggaaggtatttttttgagaactgatttatatgaaatatacttgagggtaatgtagcttgtcctttttagtttcaaattcttattcataggcagatactttgaagacaccttaactctttgttgtgtgtattttcccttgcatcagataactatacatggagaaatccattttgttttttggtttatcttctgttcttcctaccttgtgcttgtctgactagtatcacccctgagccagtatacagtaccatcctctccccctaccaagtttggcagaggtgtttatactgcattctcagatctatgaatatttttgtcatcctgcctgagaaagtacatcttccaggcaaaagtagggtatcttgaactcctttcttctgagttgagcagactcactggcttaagcatcccataagcctattatttagtgtgaatttgggacttttatttgtatgttgtcttaacttactgagcctgtgacttgtatttagctgtagtcaagcctcaccagccatatctcatctctgagaggaagactggatagtgagtttggttttggttttggttttaaacccttttaccttttcagtctggcagctcctactgctgctttcctaagttactcaaagcactgcttcttggtccttgttttcttttgccttgtactatcttgtataatgtttactaaaagagcctccccataaatcagagaggcaaaaaggtagcatataaaaagaagaaccaaaagaagagaaaacctgacttctagatgactgtggtgtcatctaaaaggcagaggtgcctgaccctcaggaatgtgtatgatgcaacagagctgaagaatgggttcccttcacctactgctggccattgtcccttctgttggagattcctttctttatggttgctgttcataaccccttcaacacccccccttgctggtcctgccggtcacagttgaggattttggctgtgatgggctcatactcataatggcctgttgagttgtttttagtgacaggttttgtttgctgcacacctcattggcttgcttaccaacaccagctagaagtggtccctctttcatatccaaaccagaacacatttgggtattcctgagactttatagagcgtgtattgtttgttatacgaacctaacctaccttgttgttttctcatattaagaaatttaaatctactttgttttagtgaagctattttggtaatgtataagcaattttggttctgtttagggagaattcagggtttccatgacttgatttgagctttgcatatttcaaataagtaacacagccattttaatttagctaaataaaaaaatttcttttttctctcaa

SEQ ID NO: 361602 - DNA, 4636 bp, Homo sapiens
gacccacgcgtccgcgctctcgcttgccaagggagactatttacgatgctgcaagatctgttatccgctctgtggttttgtcatccttgctgcctgtgttgtggcctgtgttggcttggtgtggatgcaggttgctctcaaggaggatctggatgccctcaaggaaaaatttcgaacaatggaatctaatcagaaaagctcattccaagaaatccccaaacttaatgaagaactactcagcaagcaaaaacaacttgagaagattgaatctggagagatgggtttgaacaaagtctggataaacatcacagaaatgaataagcagatttctctgttgacttctgcagtgaaccacctcaaagccaatgttaagtcagctgcagacttgattagcctgcctaccactgtagagggacttcagaagagtgtagcttccattggcaatactttaaacagcgtccatcttgctgtggaagcactacagaaaactgtggatgaacacaagaaaacgatggaattactgcagagtgatatgaatcagcacttcttgaaggagactcctggaagcaaccagatcattccgtcaccttcagccacatcagaacttgacaataaaacccacagtgagaatttgaaacaggatatcctgtaccttcacaactctttagaggaggtaaacagtgccctagtggggtaccagagacagaatgatcttaaactcgagggaatgaacgagacagtcagtaatcttacccagagagtcaacctgatagaaagcgatgtggttgctatgagcaaggtagaaaagaaagcaaacctgtccttcagcatgatgggtgatagatctgccactctgaaaagacagtctttggatcaagtcaccaacagaacagatacagtaaaaatccaaagcataaagaaagaagatagttcaaattctcaggtatccaagctaagagagaaactccagctgatcagtgctcttacaaacaaacctgagagcaacaggcctccagagaccgccgatgaagagcaagtagagagtttcacatcaaagccatcagcattgccaaaattttcacagtttcttggagacccagttgagaaagctgcccaactaagacctatctccctaccaggagtttctagcactgaagatcttcaggatttattccgcaagactggccaggacgtggatgggaagctgacctaccaggaaatctggacctccctaggttctgctatgccagaaccagagagcttgagagcatttgattccgatggagatggaagatactcattcctggagctaagggtagctttaggtatctagcttcatcaggcatattttagaaatggactgcctaatatctatttacctaacaacaaaacaacccttacttacccatcagtcctctagtcctccaaactactgtagcagatactttgccaccttttaacttgtttgaagaagctatataaaagttatttttttaaagaagaagaccattttacttatgatgttcagaaatctatgatttcctacaaccagtaagatcttacattttaaaattgccagaaaaaaaattaaagccctctttttttctctttcctttttttgaggggaggagaccttatcttttaaagctgggaaatgtatatagagagagaataagccacttttatatttcacttaaatttgccttaaattagctgcactttatagagactcagaaaatgtcttttctttaaaagataggccttttctgtttgtaaatatttaaatgaaagaaagcattgtgcatattgtgtggaaagtaggaagaatggttttgaacaggatatgaacaaatgacttattaaaaattgctgatctggtgtaggtggcagctgaaactacatccatgtctccataaggtatccctcaaaggcccaggcgctgccagggggtttgtcctggtagctggaggaaccgatttcagggagtagacactggagacaatactgactccaggcatggctcatggaagtaggattctggttctttgttcctattccctcagctaatcccaacctgggaatcagagaagtcttggggatttttctcatttttagtactatttcagggtttatgagcataaaaagttatccattggggagctccattttccctgctgagtgagctagattgccttccccacccacccacttaagtctgtcttaaagccgtagctggctcccaccaccagtaccatctccatttgaatggcagggctaaattcccccagccattatctcacactgaccacccagagctttagaagagagctgtgcttctaattttgacccagaaaaccataccccttgagattttacctagaggctaaccaagagcctaatatgtttctctgggggatgactaaagccaaaaaggctgtgagatgaaacatgtgaaataatattcagtttccttaccattaccagctcagaagtagctagaggctttctacccaaaggatgccaaagtatagcagggcaggcctggagctagggccttcacatggtggtagcaagtttttcaaatctaatacaatcaagtacaatacttcctttaaatgcttctgtggacctggcatgaaagatccctagattgaaaggaataatacctccatgtctcctgtatgttgagtctagaattgctgtgttgttcttagaagcagtctttgggcaacaacttgaaaggggaaaaaaaaactacaaaaacttaactttggtataggccaagtcagggagaaagtagagaaagctgtcatgccacagacttctttagtggagatcatttcctttttaactttgttcaggttgcccttcaccatggatacagtccggtacccttaaacatttaagggctgtttttttttttctttacatgatgttcagcttggtattaaccaaacttaaattttttttccagaagtattaaaatttagttaaagcaagatgaagtcttttcccatgaatgtgtccccttatctcattatagcttatgctcagtttcactttcttggaaaggttaaaacaaattagcctggcactttaggtaacttgaaaataactctcacccttctgactgccttccatccactctcaccccacacctttttttaatatatatacacccttacagattttctaacaaccaaataaaattctagcaataaattgaattatactgctatatttgtatatactgtaccataaatagtatgtctgtacctggaaggtatttttttgagaactgatttatatgaaatatacttgagggtaatgtagcttgtcctttttagtttcaaattcttattcataggcagatactttgaagacaccttaactctttgttgtgtgtattttcccttgcatcagataactatacatggagaaatccattttgttttttggtttatcttctgttcttcctaccttgtgcttgtctgactagtatcacccctgagccagtatacagtaccatcctctccccctaccaagtttggcagaggtgtttatactgcattctcagatctatgaatatttttgtcatcctgcctgagaaagtacatcttccaggcaaaagtagggtatcttgaactcctttcttctgagttgagcagactcactggcttaagcatcccataagcctattatttagtgtgaatttgggacttttatttgtatgttgtcttaacttactgagcctgtgacttgtatttagctgtagtcaagcctcaccagccatatctcatctctgagaggaagactggatagtgagtttggttttggttttggttttaaacccttttaccttttcagtctggcagctcctactgctgctttcctaagttactcaaagcactgcttcttggtccttgttttcttttgccttgtactatcttgtataatgtttactaaaagagcctccccataaatcagagaggcaaaaaggtagcatataaaaagaagaaccaaaagaagagaaaacctgacttctagatgactgtggtgtcatctaaaaggcagaggtgcctgaccctcaggaatgtgtatgatgcaacagagctgaagaatgggttcccttcacctactgctggccattgtcccttctgttggagattcctttctttatggttgctgttcataaccccttcaacacccccccttgctggtcctgccggtcacagttgaggattttggctgtgatgggctcatactcataatggcctgttgagttgtttttagtgacaggttttgtttgctgcacacctcattggcttgcttaccaacaccagctagaagtggtccctctttcatatccaaaccagaacacatttgggtattcctgagactttatagagcgtgtattgtttgttatacgaacctaacctaccttgttgttttctcatattaagaaatttaaatctactttgttttagtgaagctattttggtaatgtataagcaattttggttctgtttagggagaattcagggtttccatgacttgatttgagctttgcatatttcaaataagtaacacagccattttaatttagctaaataaaaaaatttcttttttctctcaa

SEQ ID NO: 361603 - DNA, 4302 bp, Homo sapiens
tccttctcacggattactcaagaacaatttcgaacaatggaatctaatcagaaaagctcattccaagaaatccccaaacttaatgaagaactactcagcaagcaaaaacaacttgagaagattgaatctggagagatgggtttgaacaaagtctggataaacatcacagaaatgaataagcagatttctctgttgacttctgcagtgaaccacctcaaagccaatgttaagtcagctgcagacttgattagcctgcctaccactgtagagggacttcagaagagtgtagcttccattggcaatactttaaacagcgtccatcttgctgtggaagcactacagaaaactgtggatgaacacaagaaaacgatggaattactgcagagtgatatgaatcagcacttcttgaaggagactcctggaagcaaccagatcattccgtcaccttcagccacatcagaacttgacaataaaacccacagtgagaatttgaaacagatgggtgatagatctgccactctgaaaagacagtctttggatcaagtcaccaacagaacagatacagtaaaaatccaaagcataaagaaagaagatagttcaaattctcaggtatccaagctaagagagaaactccagctgatcagtgctcttacaaacaaacctgagagcaacaggcctccagagaccgccgatgaagagcaagtagagagtttcacatcaaagccatcagcattgccaaaattttcacagtttcttggagacccagttgagaaagctgcccaactaagacctatctccctaccaggagtttctagcactgaagatcttcaggatttattccgcaagactggccaggacgtggatgggaagctgacctaccaggaaatctggacctccctaggttctgctatgccagaaccagagagcttgagagcatttgattccgatggagatggaagatactcattcctggagctaagggtagctttaggtatctagcttcatcaggcatattttagaaatggactgcctaatatctatttacctaacaacaaaacaacccttacttacccatcagtcctctagtcctccaaactactgtagcagatactttgccaccttttaacttgtttgaagaagctatataaaagttatttttttaaagaagaagaccattttacttatgatgttcagaaatctatgatttcctacaaccagtaagatcttacattttaaaattgccagaaaaaaaattaaagccctctttttttctctttcctttttttgaggggaggagaccttatcttttaaagctgggaaatgtatatagagagagaataagccacttttatatttcacttaaatttgccttaaattagctgcactttatagagactcagaaaatgtcttttctttaaaagataggccttttctgtttgtaaatatttaaatgaaagaaagcattgtgcatattgtgtggaaagtaggaagaatggttttgaacaggatatgaacaaatgacttattaaaaattgctgatctggtgtaggtggcagctgaaactacatccatgtctccataaggtatccctcaaaggcccaggcgctgccagggggtttgtcctggtagctggaggaaccgatttcagggagtagacactggagacaatactgactccaggcatggctcatggaagtaggattctggttctttgttcctattccctcagctaatcccaacctgggaatcagagaagtcttggggatttttctcatttttagtactatttcagggtttatgagcataaaaagttatccattggggagctccattttccctgctgagtgagctagattgccttccccacccacccacttaagtctgtcttaaagccgtagctggctcccaccaccagtaccatctccatttgaatggcagggctaaattcccccagccattatctcacactgaccacccagagctttagaagagagctgtgcttctaattttgacccagaaaaccataccccttgagattttacctagaggctaaccaagagcctaatatgtttctctgggggatgactaaagccaaaaaggctgtgagatgaaacatgtgaaataatattcagtttccttaccattaccagctcagaagtagctagaggctttctacccaaaggatgccaaagtatagcagggcaggcctggagctagggccttcacatggtggtagcaagtttttcaaatctaatacaatcaagtacaatacttcctttaaatgcttctgtggacctggcatgaaagatccctagattgaaaggaataatacctccatgtctcctgtatgttgagtctagaattgctgtgttgttcttagaagcagtctttgggcaacaacttgaaaggggaaaaaaaaactacaaaaacttaactttggtataggccaagtcagggagaaagtagagaaagctgtcatgccacagacttctttagtggagatcatttcctttttaactttgttcaggttgcccttcaccatggatacagtccggtacccttaaacatttaagggctgtttttttttttctttacatgatgttcagcttggtattaaccaaacttaaattttttttccagaagtattaaaatttagttaaagcaagatgaagtcttttcccatgaatgtgtccccttatctcattatagcttatgctcagtttcactttcttggaaaggttaaaacaaattagcctggcactttaggtaacttgaaaataactctcacccttctgactgccttccatccactctcaccccacacctttttttaatatatatacacccttacagattttctaacaaccaaataaaattctagcaataaattgaattatactgctatatttgtatatactgtaccataaatagtatgtctgtacctggaaggtatttttttgagaactgatttatatgaaatatacttgagggtaatgtagcttgtcctttttagtttcaaattcttattcataggcagatactttgaagacaccttaactctttgttgtgtgtattttcccttgcatcagataactatacatggagaaatccattttgttttttggtttatcttctgttcttcctaccttgtgcttgtctgactagtatcacccctgagccagtatacagtaccatcctctccccctaccaagtttggcagaggtgtttatactgcattctcagatctatgaatatttttgtcatcctgcctgagaaagtacatcttccaggcaaaagtagggtatcttgaactcctttcttctgagttgagcagactcactggcttaagcatcccataagcctattatttagtgtgaatttgggacttttatttgtatgttgtcttaacttactgagcctgtgacttgtatttagctgtagtcaagcctcaccagccatatctcatctctgagaggaagactggatagtgagtttggttttggttttggttttaaacccttttaccttttcagtctggcagctcctactgctgctttcctaagttactcaaagcactgcttcttggtccttgttttcttttgccttgtactatcttgtataatgtttactaaaagagcctccccataaatcagagaggcaaaaaggtagcatataaaaagaagaaccaaaagaagagaaaacctgacttctagatgactgtggtgtcatctaaaaggcagaggtgcctgaccctcaggaatgtgtatgatgcaacagagctgaagaatgggttcccttcacctactgctggccattgtcccttctgttggagattcctttctttatggttgctgttcataaccccttcaacacccccccttgctggtcctgccggtcacagttgaggattttggctgtgatgggctcatactcataatggcctgttgagttgtttttagtgacaggttttgtttgctgcacacctcattggcttgcttaccaacaccagctagaagtggtccctctttcatatccaaaccagaacacatttgggtattcctgagactttatagagcgtgtattgtttgttatacgaacctaacctaccttgttgttttctcatattaagaaatttaaatctactttgttttagtgaagctattttggtaatgtataagcaattttggttctgtttagggagaattcagggtttccatgacttgatttgagctttgcatatttcaaataagtaacacagccattttaatttagctaaataaaaaaatttcttttttctctcaa

SEQ ID NO: 361604 - DNA, 4990 bp, Homo sapiens
ggagtgcggcttactggcaggcggcgcaggcggccgctgccaaaggggaagtgatctggggctggagcgatggcccggggctggagctcgcggccgccgccgccgcagccgccgccaccaacgccaacaacaacgtgtcgggagcagccgcggccgaagccggagcaggggccggagtcgcggctggagtggggcctgcgcgtgtgagtggccgagagttgcccgtgccggagacctcaaactccgggcgggagcgctttcggtcggccgagccgccgtcgcccgcggcaccgtgtccccaaggcccagacagcggggcgggggtctatcaggcgcgggactggcttctctcaggccgacccttctagccgggctccggatcttcctcggcctcgggcccccttcacgttcaggacggaggccggagaacggtgatcatcacacaccccagccggcttcctggccagggcattttctctgcggccaagcagtgttgggattgtagctgctgggagccccctcctgccgccacctctcctgcaaggaagggactgacgcgttcccactttcttactctgcacctccccactctcttcccattcaagaacgagtttctcttccctctccattggaaatcctgctccggaggtccaaaacacgtattttaagcgtgcccttcctcacctcctggagcacccttagaagtattgcctacttatccgggctgagaatccttcatttttgacctggcttttttttcgccctttgggagataaaggtccctctccaccctctactaacactctgcacccaaggccttatcctttggggtcaccagctccttggccatttctatgtgatttcccccacccatctgagttccagtttcctctgggctccaatctccagtccctggcggatctggtcagtcccacccctaggtgggagtgaccagggggctctggcccaggattcccaaccctggaaggcagctccaaggcaggaagagaattgggcatcgggtacgaacctggcagctcaggagtcggggctccactcaccccacacaaaaagatgaaaaagcgcaaagagctcaatgcattgattggtttggctggggacagccggagaaagaagcccaagaaaggcccaagcagtcaccgcctgcttcgcactgagcctcccgactcagactctgagtccagctccgaagaggaagaggaattcggtgtggttggaaatcgctctcgctttgccaagggagactatttacgatgctgcaagatctgttatccgctctgtggttttgtcatccttgctgcctgtgttgtggcctgtgttggcttggtgtggatgcaggttgctctcaaggaggatctggatgccctcaaggaaaaatttcgaacaatggaatctaatcagaaaagctcattccaagaaatccccaaacttaatgaagaactactcagcaagcaaaaacaacttgagaagattgaatctggagagatgggtttgaacaaagtctggataaacatcacagaaatgaataagcagatttctctgttgacttctgcagtgaaccacctcaaagccaatgttaagtcagctgcagacttgattagcctgcctaccactgtagagggacttcagaagagtgtagcttccattggcaatactttaaacagcgtccatcttgctgtggaagcactacagaaaactgtggatgaacacaagaaaacgatggaattactgcagagtgatatgaatcagcacttcttgaaggagactcctggaagcaaccagatcattccgtcaccttcagccacatcagaacttgacaataaaacccacagtgagaatttgaaacaggatatcctgtaccttcacaactctttagaggaggtaaacagtgccctagtggggtaccagagacagaatgatcttaaactcgagggaatgaacgagacagtcagtaatcttacccagagagtcaacctgatagaaagcgatgtggttgctatgagcaaggtagaaaagaaagcaaacctgtccttcagcatgatgggtgatagatctgccactctgaaaagacagtctttggatcaagtcaccaacagaacagatacagtaaaaatccaaagcataaagaaagaagatagttcaaattctcaggtatccaagctaagagagaaactccagctgatcagtgctcttacaaacaaacctgagagcaacaggcctccagagaccgccgatgaagagcaagtagagagtttcacatcaaagccatcagcattgccaaaattttcacagtttcttggagacccagttgagaaagctgcccaactaagacctatctccctaccaggagtttctagcactgaagatcttcaggatttattccgcaagactggccaggacgtggatgggaagctgacctaccaggaaatctggacctccctaggttctgctatgccagaaccagagagcttgagagcatttgattccgatggagatggaagatactcattcctggagctaagggtagctttaggtatctagcttcatcaggcatattttagaaatggactgcctaatatctatttacctaacaacaaaacaacccttacttacccatcagtcctctagtcctccaaactactgtagcagatactttgccaccttttaacttgtttgaagaagctatataaaagttatttttttaaagaagaagaccattttacttatgatgttcagaaatctatgatttcctacaaccagtaagatcttacattttaaaattgccagaaaaaaaattaaagccctctttttttctctttcctttttttgaggggaggagaccttatcttttaaagctgggaaatgtatatagagagagaataagccacttttatatttcacttaaatttgccttaaattagctgcactttatagagactcagaaaatgtcttttctttaaaagataggccttttctgtttgtaaatatttaaatgaaagaaagcattgtgcatattgtgtggaaagtaggaagaatggttttgaacaggatatgaacaaatgacttattaaaaattgctgatctggtgtaggtggcagctgaaactacatccatgtctccataaggtatccctcaaaggcccaggcgctgccagggggtttgtcctggtagctggaggaaccgatttcagggagtagacactggagacaatactgactccaggcatggctcatggaagtaggattctggttctttgttcctattccctcagctaatcccaacctgggaatcagagaagtcttggggatttttctcatttttagtactatttcagggtttatgagcataaaaagttatccattggggagctccattttccctgctgagtgagctagattgccttccccacccacccacttaagtctgtcttaaagccgtagctggctcccaccaccagtaccatctccatttgaatggcagggctaaattcccccagccattatctcacactgaccacccagagctttagaagagagctgtgcttctaattttgacccagaaaaccataccccttgagattttacctagaggctaaccaagagcctaatatgtttctctgggggatgactaaagccaaaaaggctgtgagatgaaacatgtgaaataatattcagtttccttaccattaccagctcagaagtagctagaggctttctacccaaaggatgccaaagtatagcagggcaggcctggagctagggccttcacatggtggtagcaagtttttcaaatctaatacaatcaagtacaatacttcctttaaatgcttctgtggacctggcatgaaagatccctagattgaaaggaataatacctccatgtctcctgtatgttgagtctagaattgctgtgttgttcttagaagcagtctttgggcaacaacttgaaaggggaaaaaaaaactacaaaaacttaactttggtataggccaagtcagggagaaagtagagaaagctgtcatgccacagacttctttagtggagatcatttcctttttaactttgttcaggttgcccttcaccatggatacagtccggtacccttaaacatttaagggctgtttttttttttctttacatgatgttcagcttggtattaaccaaacttaaattttttttccagaagtattaaaatttagttaaagcaagatgaagtcttttcccatgaatgtgtccccttatctcattatagcttatgctcagtttcactttcttggaaaggttaaaacaaattagcctggcactttaggtaacttgaaaataactctcacccttctgactgccttccatccactctcaccccacacctttttttaatatatatacacccttacagattttctaacaaccaaataaaattctagcaataaattgaattataaaaaaaaaaaaaaaaaaaaaaaaaaaaaaaaaaaaaaaaaaaaaaaaaagggggggggcgcccaaaaattcccccgggggggcccattttaggggttcccacgtttttgtgtgagccacaagggggccccattaggagggaggcgcgtatataaacagaccaaggcagctgggcacgacgtattaacaacaggtctggtagagggggaaaacgggctcaactggcggaaaatctgggaagagaggaaccctaactacagggggggggaacaaatatttgtggcgacaaacaatctatccttcatagaggagagtgttatttaaagagcactacaggaaggggggaaaaatattataaacacaatttacagagacgggggtttatataagtggttgtgtgcttaaaacaataaaacgaggggcaaaaatagatgctagggtagggtaatgaaaaaaaatttttgccgctatacaccggggagattttatatactttttgagagacaaatttttttttatcaccggggagg

SEQ ID NO: 361605 - DNA, 4171 bp, Homo sapiens
ttgtaaggtggtaagagcatgaaattctgcctaaagtggtctagtcacaaggtgaagcaagatatttcggaaagttatttagttagtgtgaaatagctcctagaaaacaagatcctgctcatttaggaaatgggtgtcgcataggcacctgagcaagggtacatttcctttactgctgacacatgcattccttcccccatcaaccaaatgttcacagtgaatcagatcatctgtagcataatgttcccttaatggtttcaaatccagcaagatacttatcagtgctgaggaccaaagacatcaccagtatatgttgattcattcttttattgtctttatagggaacctactgagggtcaaacactacatgctaaacaggctctgggaatacagtggacacttagatgaagtcttactaccaccttaaaccttctataatctttgttttgtgcagaaagaagatagttcaaattctcaggtatccaagctaagagagaaactccagctgatcagtgctcttacaaacaaacctgagagcaacaggcctccagagaccgccgatgaagagcaagtagagagtttcacatcaaagccatcagcattgccaaaattttcacagtttcttggagacccagttgagaaagctgcccaactaagacctatctccctaccaggagtttctagcactgaagatcttcaggatttattccgcaagactggccaggacgtggatgggaagctgacctaccaggaaatctggacctccctaggttctgctatgccagaaccagagagcttgagagcatttgattccgatggagatggaagatactcattcctggagctaagggtagctttaggtatctagcttcatcaggcatattttagaaatggactgcctaatatctatttacctaacaacaaaacaacccttacttacccatcagtcctctagtcctccaaactactgtagcagatactttgccaccttttaacttgtttgaagaagctatataaaagttatttttttaaagaagaagaccattttacttatgatgttcagaaatctatgatttcctacaaccagtaagatcttacattttaaaattgccagaaaaaaaattaaagccctctttttttctctttcctttttttgaggggaggagaccttatcttttaaagctgggaaatgtatatagagagagaataagccacttttatatttcacttaaatttgccttaaattagctgcactttatagagactcagaaaatgtcttttctttaaaagataggccttttctgtttgtaaatatttaaatgaaagaaagcattgtgcatattgtgtggaaagtaggaagaatggttttgaacaggatatgaacaaatgacttattaaaaattgctgatctggtgtaggtggcagctgaaactacatccatgtctccataaggtatccctcaaaggcccaggcgctgccagggggtttgtcctggtagctggaggaaccgatttcagggagtagacactggagacaatactgactccaggcatggctcatggaagtaggattctggttctttgttcctattccctcagctaatcccaacctgggaatcagagaagtcttggggatttttctcatttttagtactatttcagggtttatgagcataaaaagttatccattggggagctccattttccctgctgagtgagctagattgccttccccacccacccacttaagtctgtcttaaagccgtagctggctcccaccaccagtaccatctccatttgaatggcagggctaaattcccccagccattatctcacactgaccacccagagctttagaagagagctgtgcttctaattttgacccagaaaaccataccccttgagattttacctagaggctaaccaagagcctaatatgtttctctgggggatgactaaagccaaaaaggctgtgagatgaaacatgtgaaataatattcagtttccttaccattaccagctcagaagtagctagaggctttctacccaaaggatgccaaagtatagcagggcaggcctggagctagggccttcacatggtggtagcaagtttttcaaatctaatacaatcaagtacaatacttcctttaaatgcttctgtggacctggcatgaaagatccctagattgaaaggaataatacctccatgtctcctgtatgttgagtctagaattgctgtgttgttcttagaagcagtctttgggcaacaacttgaaaggggaaaaaaaaactacaaaaacttaactttggtataggccaagtcagggagaaagtagagaaagctgtcatgccacagacttctttagtggagatcatttcctttttaactttgttcaggttgcccttcaccatggatacagtccggtacccttaaacatttaagggctgtttttttttttctttacatgatgttcagcttggtattaaccaaacttaaattttttttccagaagtattaaaatttagttaaagcaagatgaagtcttttcccatgaatgtgtccccttatctcattatagcttatgctcagtttcactttcttggaaaggttaaaacaaattagcctggcactttaggtaacttgaaaataactctcacccttctgactgccttccatccactctcaccccacacctttttttaatatatatacacccttacagattttctaacaaccaaataaaattctagcaataaattgaattatactgctatatttgtatatactgtaccataaatagtatgtctgtacctggaaggtatttttttgagaactgatttatatgaaatatacttgagggtaatgtagcttgtcctttttagtttcaaattcttattcataggcagatactttgaagacaccttaactctttgttgtgtgtattttcccttgcatcagataactatacatggagaaatccattttgttttttggtttatcttctgttcttcctaccttgtgcttgtctgactagtatcacccctgagccagtatacagtaccatcctctccccctaccaagtttggcagaggtgtttatactgcattctcagatctatgaatatttttgtcatcctgcctgagaaagtacatcttccaggcaaaagtagggtatcttgaactcctttcttctgagttgagcagactcactggcttaagcatcccataagcctattatttagtgtgaatttgggacttttatttgtatgttgtcttaacttactgagcctgtgacttgtatttagctgtagtcaagcctcaccagccatatctcatctctgagaggaagactggatagtgagtttggttttggttttggttttaaacccttttaccttttcagtctggcagctcctactgctgctttcctaagttactcaaagcactgcttcttggtccttgttttcttttgccttgtactatcttgtataatgtttactaaaagagcctccccataaatcagagaggcaaaaaggtagcatataaaaagaagaaccaaaagaagagaaaacctgacttctagatgactgtggtgtcatctaaaaggcagaggtgcctgaccctcaggaatgtgtatgatgcaacagagctgaagaatgggttcccttcacctactgctggccattgtcccttctgttggagattcctttctttatggttgctgttcataaccccttcaacacccccccttgctggtcctgccggtcacagttgaggattttggctgtgatgggctcatactcataatggcctgttgagttgtttttagtgacaggttttgtttgctgcacacctcattggcttgcttaccaacaccagctagaagtggtccctctttcatatccaaaccagaacacatttgggtattcctgagactttatagagcgtgtattgtttgttatacgaacctaacctaccttgttgttttctcatattaagaaatttaaatctactttgttttagtgaagctattttggtaatgtataagcaattttggttctgtttagggagaattcagggtttccatgacttgatttgagctttgcatatttcaaataagtaacacagccattttaatttagctaaataaaaaaatttcttttttctctcaa

SEQ ID NO: 361606 - DNA, 3663 bp, Homo sapiens
aatatatttttaagggatcaaaaattagtcttcctgatttagtgaaatcctaaactttaccatttggaaacaaaatttgcggagtagcttttcttttagtgttttaaattcagttgagactacttttaactaaatttagctgtatgtttagacgtatacattttttgtaattcatttttgacagatcttcaggatttattccgcaagactggccaggacgtggatgggaagctgacctaccaggaaatctggacctccctaggttctgctatgccagaaccagagagcttgagagcatttgattccgatggagatggaagatactcattcctggagctaagggtagctttaggtatctagcttcatcaggcatattttagaaatggactgcctaatatctatttacctaacaacaaaacaacccttacttacccatcagtcctctagtcctccaaactactgtagcagatactttgccaccttttaacttgtttgaagaagctatataaaagttatttttttaaagaagaagaccattttacttatgatgttcagaaatctatgatttcctacaaccagtaagatcttacattttaaaattgccagaaaaaaaattaaagccctctttttttctctttcctttttttgaggggaggagaccttatcttttaaagctgggaaatgtatatagagagagaataagccacttttatatttcacttaaatttgccttaaattagctgcactttatagagactcagaaaatgtcttttctttaaaagataggccttttctgtttgtaaatatttaaatgaaagaaagcattgtgcatattgtgtggaaagtaggaagaatggttttgaacaggatatgaacaaatgacttattaaaaattgctgatctggtgtaggtggcagctgaaactacatccatgtctccataaggtatccctcaaaggcccaggcgctgccagggggtttgtcctggtagctggaggaaccgatttcagggagtagacactggagacaatactgactccaggcatggctcatggaagtaggattctggttctttgttcctattccctcagctaatcccaacctgggaatcagagaagtcttggggatttttctcatttttagtactatttcagggtttatgagcataaaaagttatccattggggagctccattttccctgctgagtgagctagattgccttccccacccacccacttaagtctgtcttaaagccgtagctggctcccaccaccagtaccatctccatttgaatggcagggctaaattcccccagccattatctcacactgaccacccagagctttagaagagagctgtgcttctaattttgacccagaaaaccataccccttgagattttacctagaggctaaccaagagcctaatatgtttctctgggggatgactaaagccaaaaaggctgtgagatgaaacatgtgaaataatattcagtttccttaccattaccagctcagaagtagctagaggctttctacccaaaggatgccaaagtatagcagggcaggcctggagctagggccttcacatggtggtagcaagtttttcaaatctaatacaatcaagtacaatacttcctttaaatgcttctgtggacctggcatgaaagatccctagattgaaaggaataatacctccatgtctcctgtatgttgagtctagaattgctgtgttgttcttagaagcagtctttgggcaacaacttgaaaggggaaaaaaaaactacaaaaacttaactttggtataggccaagtcagggagaaagtagagaaagctgtcatgccacagacttctttagtggagatcatttcctttttaactttgttcaggttgcccttcaccatggatacagtccggtacccttaaacatttaagggctgtttttttttttctttacatgatgttcagcttggtattaaccaaacttaaattttttttccagaagtattaaaatttagttaaagcaagatgaagtcttttcccatgaatgtgtccccttatctcattatagcttatgctcagtttcactttcttggaaaggttaaaacaaattagcctggcactttaggtaacttgaaaataactctcacccttctgactgccttccatccactctcaccccacacctttttttaatatatatacacccttacagattttctaacaaccaaataaaattctagcaataaattgaattatactgctatatttgtatatactgtaccataaatagtatgtctgtacctggaaggtatttttttgagaactgatttatatgaaatatacttgagggtaatgtagcttgtcctttttagtttcaaattcttattcataggcagatactttgaagacaccttaactctttgttgtgtgtattttcccttgcatcagataactatacatggagaaatccattttgttttttggtttatcttctgttcttcctaccttgtgcttgtctgactagtatcacccctgagccagtatacagtaccatcctctccccctaccaagtttggcagaggtgtttatactgcattctcagatctatgaatatttttgtcatcctgcctgagaaagtacatcttccaggcaaaagtagggtatcttgaactcctttcttctgagttgagcagactcactggcttaagcatcccataagcctattatttagtgtgaatttgggacttttatttgtatgttgtcttaacttactgagcctgtgacttgtatttagctgtagtcaagcctcaccagccatatctcatctctgagaggaagactggatagtgagtttggttttggttttggttttaaacccttttaccttttcagtctggcagctcctactgctgctttcctaagttactcaaagcactgcttcttggtccttgttttcttttgccttgtactatcttgtataatgtttactaaaagagcctccccataaatcagagaggcaaaaaggtagcatataaaaagaagaaccaaaagaagagaaaacctgacttctagatgactgtggtgtcatctaaaaggcagaggtgcctgaccctcaggaatgtgtatgatgcaacagagctgaagaatgggttcccttcacctactgctggccattgtcccttctgttggagattcctttctttatggttgctgttcataaccccttcaacacccccccttgctggtcctgccggtcacagttgaggattttggctgtgatgggctcatactcataatggcctgttgagttgtttttagtgacaggttttgtttgctgcacacctcattggcttgcttaccaacaccagctagaagtggtccctctttcatatccaaaccagaacacatttgggtattcctgagactttatagagcgtgtattgtttgttatacgaacctaacctaccttgttgttttctcatattaagaaatttaaatctactttgttttagtgaagctattttggtaatgtataagcaattttggttctgtttagggagaattcagggtttccatgacttgatttgagctttgcatatttcaaataagtaacacagccattttaatttagctaaataaaaaaatttcttttttctctcaa

SEQ ID NO: 361607 - DNA, 3320 bp, Homo sapiens
cggcacgagcggcacgagcggcacgagcatattttagaaatggactgcctaatatctatttacctaacaacaaaacaacccttacttacccatcagtcctctagtcctccaaactactgtagcagatactttgccaccttttaacttgtttgaagaagctatataaaagttatttttttaaagaagaagaccattttacttatgatgttcagaaatctatgatttcctacaaccagtaagatcttacattttaaaattgccagaaaaaaaattaaagccctctttttttctctttcctttttttgaggggaggagaccttatcttttaaagctgggaaatgtatatagagagagaataagccacttttatatttcacttaaatttgccttaaattagctgcactttatagagactcagaaaatgtcttttctttaaaagataggccttttctgtttgtaaatatttaaatgaaagaaagcattgtgcatattgtgtggaaagtaggaagaatggttttgaacaggatatgaacaaatgacttattaaaaattgctgatctggtgtaggtggcagctgaaactacatccatgtctccataaggtatccctcaaaggcccaggcgctgccagggggtttgtcctggtagctggaggaaccgatttcagggagtagacactggagacaatactgactccaggcatggctcatggaagtaggattctggttctttgttcctattccctcagctaatcccaacctgggaatcagagaagtcttggggatttttctcatttttagtactatttcagggtttatgagcataaaaagttatccattggggagctccattttccctgctgagtgagctagattgccttccccacccacccacttaagtctgtcttaaagccgtagctggctcccaccaccagtaccatctccatttgaatggcagggctaaattcccccagccattatctcacactgaccacccagagctttagaagagagctgtgcttctaattttgacccagaaaaccataccccttgagattttacctagaggctaaccaagagcctaatatgtttctctgggggatgactaaagccaaaaaggctgtgagatgaaacatgtgaaataatattcagtttccttaccattaccagctcagaagtagctagaggctttctacccaaaggatgccaaagtatagcagggcaggcctggagctagggccttcacatggtggtagcaagtttttcaaatctaatacaatcaagtacaatacttcctttaaatgcttctgtggacctggcatgaaagatccctagattgaaaggaataatacctccatgtctcctgtatgttgagtctagaattgctgtgttgttcttagaagcagtctttgggcaacaacttgaaaggggaaaaaaaaactacaaaaacttaactttggtataggccaagtcagggagaaagtagagaaagctgtcatgccacagacttctttagtggagatcatttcctttttaactttgttcaggttgcccttcaccatggatacagtccggtacccttaaacatttaagggctgtttttttttttctttacatgatgttcagcttggtattaaccaaacttaaattttttttccagaagtattaaaatttagttaaagcaagatgaagtcttttcccatgaatgtgtccccttatctcattatagcttatgctcagtttcactttcttggaaaggttaaaacaaattagcctggcactttaggtaacttgaaaataactctcacccttctgactgccttccatccactctcaccccacacctttttttaatatatatacacccttacagattttctaacaaccaaataaaattctagcaataaattgaattatactgctatatttgtatatactgtaccataaatagtatgtctgtacctggaaggtatttttttgagaactgatttatatgaaatatacttgagggtaatgtagcttgtcctttttagtttcaaattcttattcataggcagatactttgaagacaccttaactctttgttgtgtgtattttcccttgcatcagataactatacatggagaaatccattttgttttttggtttatcttctgttcttcctaccttgtgcttgtctgactagtatcacccctgagccagtatacagtaccatcctctccccctaccaagtttggcagaggtgtttatactgcattctcagatctatgaatatttttgtcatcctgcctgagaaagtacatcttccaggcaaaagtagggtatcttgaactcctttcttctgagttgagcagactcactggcttaagcatcccataagcctattatttagtgtgaatttgggacttttatttgtatgttgtcttaacttactgagcctgtgacttgtatttagctgtagtcaagcctcaccagccatatctcatctctgagaggaagactggatagtgagtttggttttggttttggttttaaacccttttaccttttcagtctggcagctcctactgctgctttcctaagttactcaaagcactgcttcttggtccttgttttcttttgccttgtactatcttgtataatgtttactaaaagagcctccccataaatcagagaggcaaaaaggtagcatataaaaagaagaaccaaaagaagagaaaacctgacttctagatgactgtggtgtcatctaaaaggcagaggtgcctgaccctcaggaatgtgtatgatgcaacagagctgaagaatgggttcccttcacctactgctggccattgtcccttctgttggagattcctttctttatggttgctgttcataaccccttcaacacccccccttgctggtcctgccggtcacagttgaggattttggctgtgatgggctcatactcataatggcctgttgagttgtttttagtgacaggttttgtttgctgcacacctcattggcttgcttaccaacaccagctagaagtggtccctctttcatatccaaaccagaacacatttgggtattcctgagactttatagagcgtgtattgtttgttatacgaacctaacctaccttgttgttttctcatattaagaaatttaaatctactttgttttagtgaagctattttggtaatgtataagcaattttggttctgtttagggagaattcagggtttccatgacttgatttgagctttgcatatttcaaataagtaacacagccattttaatttagctaaataaaaaaatttcttttttctctcaa

SEQ ID NO: 361608 - DNA, 2411 bp, Homo sapiens
  misc_feature (14)..(14): n is a, c, g, or t
  misc_feature (16)..(16): n is a, c, g, or t
ttcccaatatatcngnctatccagtaccatctccatttgaatggcagggctaaattcccccagccattatctcacactgaccacccagagctttagaagagagctgtgcttctaattttgacccagaaaaccataccccttgagattttacctagaggctaaccaagagcctaatatgtttctctgggggatgactaaagccaaaaaggctgtgagatgaaacatgtgaaataatattcagtttccttaccattaccagctcagaagtagctagaggctttctacccaaaggatgccaaagtatagcagggcaggcctggagctagggccttcacatggtggtagcaagtttttcaaatctaatacaatcaagtacaatacttcctttaaatgcttctgtggacctggcatgaaagatccctagattgaaaggaataatacctccatgtctcctgtatgttgagtctagaattgctgtgttgttcttagaagcagtctttgggcaacaacttgaaaggggaaaaaaaaactacaaaaacttaactttggtataggccaagtcagggagaaagtagagaaagctgtcatgccacagacttctttagtggagatcatttcctttttaactttgttcaggttgcccttcaccatggatacagtccggtacccttaaacatttaagggctgtttttttttttctttacatgatgttcagcttggtattaaccaaacttaaattttttttccagaagtattaaaatttagttaaagcaagatgaagtcttttcccatgaatgtgtccccttatctcattatagcttatgctcagtttcactttcttggaaaggttaaaacaaattagcctggcactttaggtaacttgaaaataactctcacccttctgactgccttccatccactctcaccccacacctttttttaatatatatacacccttacagattttctaacaaccaaataaaattctagcaataaattgaattatactgctatatttgtatatactgtaccataaatagtatgtctgtacctggaaggtatttttttgagaactgatttatatgaaatatacttgagggtaatgtagcttgtcctttttagtttcaaattcttattcataggcagatactttgaagacaccttaactctttgttgtgtgtattttcccttgcatcagataactatacatggagaaatccattttgttttttggtttatcttctgttcttcctaccttgtgcttgtctgactagtatcacccctgagccagtatacagtaccatcctctccccctaccaagtttggcagaggtgtttatactgcattctcagatctatgaatatttttgtcatcctgcctgagaaagtacatcttccaggcaaaagtagggtatcttgaactcctttcttctgagttgagcagactcactggcttaagcatcccataagcctattatttagtgtgaatttgggacttttatttgtatgttgtcttaacttactgagcctgtgacttgtatttagctgtagtcaagcctcaccagccatatctcatctctgagaggaagactggatagtgagtttggttttggttttggttttaaacccttttaccttttcagtctggcagctcctactgctgctttcctaagttactcaaagcactgcttcttggtccttgttttcttttgccttgtactatcttgtataatgtttactaaaagagcctccccataaatcagagaggcaaaaaggtagcatataaaaagaagaaccaaaagaagagaaaacctgacttctagatgactgtggtgtcatctaaaaggcagaggtgcctgaccctcaggaatgtgtatgatgcaacagagctgaagaatgggttcccttcacctactgctggccattgtcccttctgttggagattcctttctttatggttgctgttcataaccccttcaacacccccccttgctggtcctgccggtcacagttgaggattttggctgtgatgggctcatactcataatggcctgttgagttgtttttagtgacaggttttgtttgctgcacacctcattggcttgcttaccaacaccagctagaagtggtccctctttcatatccaaaccagaacacatttgggtattcctgagactttatagagcgtgtattgtttgttatacgaacctaacctaccttgttgttttctcatattaagaaatttaaatctactttgttttagtgaagctattttggtaatgtataagcaattttggttctgtttagggagaattcagggtttccatgacttgatttgagctttgcatatttcaaataagtaacacagccattttaatttagctaaataaaaaaatttcttttttctctcaa

SEQ ID NO: 361609 - DNA, 2368 bp, Homo sapiens
ccgctgcacttgatgaaccgctcgcgagggtagtattgtacccagagctttagaagagagctgtgcttctaattttgacccagaaaaccataccccttgagattttacctagaggctaaccaagagcctaatatgtttctctgggggatgactaaagccaaaaaggctgtgagatgaaacatgtgaaataatattcagtttccttaccattaccagctcagaagtagctagaggctttctacccaaaggatgccaaagtatagcagggcaggcctggagctagggccttcacatggtggtagcaagtttttcaaatctaatacaatcaagtacaatacttcctttaaatgcttctgtggacctggcatgaaagatccctagattgaaaggaataatacctccatgtctcctgtatgttgagtctagaattgctgtgttgttcttagaagcagtctttgggcaacaacttgaaaggggaaaaaaaaactacaaaaacttaactttggtataggccaagtcagggagaaagtagagaaagctgtcatgccacagacttctttagtggagatcatttcctttttaactttgttcaggttgcccttcaccatggatacagtccggtacccttaaacatttaagggctgtttttttttttctttacatgatgttcagcttggtattaaccaaacttaaattttttttccagaagtattaaaatttagttaaagcaagatgaagtcttttcccatgaatgtgtccccttatctcattatagcttatgctcagtttcactttcttggaaaggttaaaacaaattagcctggcactttaggtaacttgaaaataactctcacccttctgactgccttccatccactctcaccccacacctttttttaatatatatacacccttacagattttctaacaaccaaataaaattctagcaataaattgaattatactgctatatttgtatatactgtaccataaatagtatgtctgtacctggaaggtatttttttgagaactgatttatatgaaatatacttgagggtaatgtagcttgtcctttttagtttcaaattcttattcataggcagatactttgaagacaccttaactctttgttgtgtgtattttcccttgcatcagataactatacatggagaaatccattttgttttttggtttatcttctgttcttcctaccttgtgcttgtctgactagtatcacccctgagccagtatacagtaccatcctctccccctaccaagtttggcagaggtgtttatactgcattctcagatctatgaatatttttgtcatcctgcctgagaaagtacatcttccaggcaaaagtagggtatcttgaactcctttcttctgagttgagcagactcactggcttaagcatcccataagcctattatttagtgtgaatttgggacttttatttgtatgttgtcttaacttactgagcctgtgacttgtatttagctgtagtcaagcctcaccagccatatctcatctctgagaggaagactggatagtgagtttggttttggttttggttttaaacccttttaccttttcagtctggcagctcctactgctgctttcctaagttactcaaagcactgcttcttggtccttgttttcttttgccttgtactatcttgtataatgtttactaaaagagcctccccataaatcagagaggcaaaaaggtagcatataaaaagaagaaccaaaagaagagaaaacctgacttctagatgactgtggtgtcatctaaaaggcagaggtgcctgaccctcaggaatgtgtatgatgcaacagagctgaagaatgggttcccttcacctactgctggccattgtcccttctgttggagattcctttctttatggttgctgttcataaccccttcaacacccccccttgctggtcctgccggtcacagttgaggattttggctgtgatgggctcatactcataatggcctgttgagttgtttttagtgacaggttttgtttgctgcacacctcattggcttgcttaccaacaccagctagaagtggtccctctttcatatccaaaccagaacacatttgggtattcctgagactttatagagcgtgtattgtttgttatacgaacctaacctaccttgttgttttctcatattaagaaatttaaatctactttgttttagtgaagctattttggtaatgtataagcaattttggttctgtttagggagaattcagggtttccatgacttgatttgagctttgcatatttcaaataagtaacacagccattttaatttagctaaataaaaaaatttcttttttctctcaa

SEQ ID NO: 361610 - DNA, 2426 bp, Homo sapiens
aacgtgttatctctcgcgaacgtgttatccctcgcgaacgtgttatctctcgcgaacgtgttatccctcgcgaacgtgttatcactcgcgaacgtgttatccctcgcgaacgtgttatctctcgcaaacgtgttatcccagaaaaccataccccttgagattttacctagaggctaaccaagagcctaatatgtttctctgggggatgactaaagccaaaaaggctgtgagatgaaacatgtgaaataatattcagtttccttaccattaccagctcagaagtagctagaggctttctacccaaaggatgccaaagtatagcagggcaggcctggagctagggccttcacatggtggtagcaagtttttcaaatctaatacaatcaagtacaatacttcctttaaatgcttctgtggacctggcatgaaagatccctagattgaaaggaataatacctccatgtctcctgtatgttgagtctagaattgctgtgttgttcttagaagcagtctttgggcaacaacttgaaaggggaaaaaaaaactacaaaaacttaactttggtataggccaagtcagggagaaagtagagaaagctgtcatgccacagacttctttagtggagatcatttcctttttaactttgttcaggttgcccttcaccatggatacagtccggtacccttaaacatttaagggctgtttttttttttctttacatgatgttcagcttggtattaaccaaacttaaattttttttccagaagtattaaaatttagttaaagcaagatgaagtcttttcccatgaatgtgtccccttatctcattatagcttatgctcagtttcactttcttggaaaggttaaaacaaattagcctggcactttaggtaacttgaaaataactctcacccttctgactgccttccatccactctcaccccacacctttttttaatatatatacacccttacagattttctaacaaccaaataaaattctagcaataaattgaattatactgctatatttgtatatactgtaccataaatagtatgtctgtacctggaaggtatttttttgagaactgatttatatgaaatatacttgagggtaatgtagcttgtcctttttagtttcaaattcttattcataggcagatactttgaagacaccttaactctttgttgtgtgtattttcccttgcatcagataactatacatggagaaatccattttgttttttggtttatcttctgttcttcctaccttgtgcttgtctgactagtatcacccctgagccagtatacagtaccatcctctccccctaccaagtttggcagaggtgtttatactgcattctcagatctatgaatatttttgtcatcctgcctgagaaagtacatcttccaggcaaaagtagggtatcttgaactcctttcttctgagttgagcagactcactggcttaagcatcccataagcctattatttagtgtgaatttgggacttttatttgtatgttgtcttaacttactgagcctgtgacttgtatttagctgtagtcaagcctcaccagccatatctcatctctgagaggaagactggatagtgagtttggttttggttttggttttaaacccttttaccttttcagtctggcagctcctactgctgctttcctaagttactcaaagcactgcttcttggtccttgttttcttttgccttgtactatcttgtataatgtttactaaaagagcctccccataaatcagagaggcaaaaaggtagcatataaaaagaagaaccaaaagaagagaaaacctgacttctagatgactgtggtgtcatctaaaaggcagaggtgcctgaccctcaggaatgtgtatgatgcaacagagctgaagaatgggttcccttcacctactgctggccattgtcccttctgttggagattcctttctttatggttgctgttcataaccccttcaacacccccccttgctggtcctgccggtcacagttgaggattttggctgtgatgggctcatactcataatggcctgttgagttgtttttagtgacaggttttgtttgctgcacacctcattggcttgcttaccaacaccagctagaagtggtccctctttcatatccaaaccagaacacatttgggtattcctgagactttatagagcgtgtattgtttgttatacgaacctaacctaccttgttgttttctcatattaagaaatttaaatctactttgttttagtgaagctattttggtaatgtataagcaattttggttctgtttagggagaattcagggtttccatgacttgatttgagctttgcatatttcaaataagtaacacagccattttaatttagctaaataaaaaaatttcttttttctctcaa

SEQ ID NO: 361611 - DNA, 3477 bp, Homo sapiens
ggagtgcggcttactggcaggcggcgcaggcggccgctgccaaaggggaagtgatctggggctggagcgatggcccggggctggagctcgcggccgccgccgccgcagccgccgccaccaacgccaacaacaacgtgtcgggagcagccgcggccgaagccggagcaggggccggagtcgcggctggagtggggcctgcgcgtgtgagtggccgagagttgcccgtgccggagacctcaaactccgggcgggagcgctttcggtcggccgagccgccgtcgcccgcggcaccgtgtccccaaggcccagacagcggggcgggggtctatcaggcgcgggactggcttctctcaggccgacccttctagccgggctccggatcttcctcggcctcgggcccccttcacgttcaggacggaggccggagaacggtgatcatcacacaccccagccggcttcctggccagggcattttctctgcggccaagcagtgttgggattgtagctgctgggagccccctcctgccgccacctctcctgcaaggaagggactgacgcgttcccactttcttactctgcacctccccactctcttcccattcaagaacgagtttctcttccctctccattggaaatcctgctccggaggtccaaaacacgtattttaagcgtgcccttcctcacctcctggagcacccttagaagtattgcctacttatccgggctgagaatccttcatttttgacctggcttttttttcgccctttgggagataaaggtccctctccaccctctactaacactctgcacccaaggccttatcctttggggtcaccagctccttggccatttctatgtgatttcccccacccatctgagttccagtttcctctgggctccaatctccagtccctggcggatctggtcagtcccacccctaggtgggagtgaccagggggctctggcccaggattcccaaccctggaaggcagctccaaggcaggaagagaattgggcatcgggtacgaacctggcagctcaggagtcggggctccactcaccccacacaaaaagatgaaaaagcgcaaagagctcaatgcattgattggtttggctggggacagccggagaaagaagcccaagaaaggcccaagcagtcaccgcctgcttcgcactgagcctcccgactcagactctgagtccagctccgaagaggaagaggaattcggtgtggttggaaatcgctctcgctttgccaagggagactatttacgatgctgcaagatctgttatccgctctgtggttttgtcatccttgctgcctgtgttgtggcctgtgttggcttggtgtggatgcaggttgctctcaaggaggatctggatgccctcaaggaaaaatttcgaacaatggaatctaatcagaaaagctcattccaagaaatccccaaacttaatgaagaactactcagcaagcaaaaacaacttgagaagattgaatctggagagatgggtttgaacaaagtctggataaacatcacagaaatgaataagcagatttctctgttgacttctgcagtgaaccacctcaaagccaatgttaagtcagctgcagacttgattagcctgcctaccactgtagagggacttcagaagagtgtagcttccattggcaatactttaaacagcgtccatcttgctgtggaagcactacagaaaactgtggatgaacacaagaaaacgatggaattactgcagagtgatatgaatcagcacttcttgaaggagactcctggaagcaaccagatcattccgtcaccttcagccacatcagaacttgacaataaaacccacagtgagaatttgaaacaggatatcctgtaccttcacaactctttagaggaggtaaacagtgccctagtggggtaccagagacagaatgatcttaaactcgagggaatgaacgagacagtcagtaatcttacccagagagtcaacctgatagaaagcgatgtggttgctatgagcaaggtagaaaagaaagcaaacctgtccttcagcatgatgggtgatagatctgccactctgaaaagacagtctttggatcaagtcaccaacagaacagatacagtaaaaatccaaagcataaagaaagaagatagttcaaattctcaggtatccaagctaagagagaaactccagctgatcagtgctcttacaaacaaacctgagagcaacaggcctccagagaccgccgatgaagagcaagtagagagtttcacatcaaagccatcagcattgccaaaattttcacagtttcttggagacccagttgagaaagctgcccaactaagacctatctccctaccaggagtttctagcactgaagatcttcaggatttattccgcaagactggccaggacgtggatgggaagctgacctaccaggaaatctggacctccctaggttctgctatgccagaaccagagagcttgagagcatttgattccgatggagatggaagatactcattcctggagctaagggtagctttaggtatctagcttcatcaggcatattttagaaatggactgcctaatatctatttacctaacaacaaaacaacccttacttacccatcagtcctctagtcctccaaactactgtagcagatactttgccaccttttaacttgtttgaagaagctatataaaagttatttttttaaagaagaagaccattttacttatgatgttcagaaatctatgatttcctacaaccagtaagatcttacattttaaaattgccagaaaaaaaattaaagccctctttttttctctttcctttttttgaggggaggagaccttatcttttaaagctgggaaatgtatatagagagagaataagccacttttatatttcacttaaatttgccttaaattagctgcactttatagagactcagaaaatgtcttttctttaaaagataggccttttctgtttgtaaatatttaaatgaaagaaagcattgtgcatattgtgtggaaagtaggaagaatggttttgaacaggatatgaacaaatgacttattaaaaattgctgatctggtgtaggtggcagctgaaactacatccatgtctccataaggtatccctcaaaggcccaggcgctgccagggggtttgtcctggtagctggaggaaccgatttcagggagtagacactggagacaatactgactccaggcatggctcatggaagtaggattctggttctttgttcctattccctcagctaatcccaacctgggaatcagagaagtcttggggatttttctcatttttagtactatttcagggtttatgagcataaaaagttatccattggggagctccattttccctgctgagtgagctagattgccttccccacccacccacttaagtctgtcttaactgcttggggatcctctagtcagc

SEQ ID NO: 361612 - DNA, 1314 bp, Homo sapiens
tacacacaacaatgagttaaggtgtcttcaaagtatctgcctatgaataagaatttgaagacaccttaactctttgttgtgtgtattttcccttgcatcagataactatacatggagaaatccattttgttttttggtttatcttctgttcttcctaccttgtgcttgtctgactagtatcacccctgagccagtatacagtaccatcctctccccctaccaagtttggcagaggtgtttatactgcattctcagatctatgaatatttttgtcatcctgcctgagaaagtacatcttccaggcaaaagtagggtatcttgaactcctttcttctgagttgagcagactcactggcttaagcatcccataagcctattatttagtgtgaatttgggacttttatttgtatgttgtcttaacttactgagcctgtgacttgtatttagctgtagtcaagcctcaccagccatatctcatctctgagaggaagactggatagtgagtttggttttggttttggttttaaacccttttaccttttcagtctggcagctcctactgctgctttcctaagttactcaaagcactgcttcttggtccttgttttcttttgccttgtactatcttgtataatgtttactaaaagagcctccccataaatcagagaggcaaaaaggtagcatataaaaagaagaaccaaaagaagagaaaacctgacttctagatgactgtggtgtcatctaaaaggcagaggtgcctgaccctcaggaatgtgtatgatgcaacagagctgaagaatgggttcccttcacctactgctggccattgtcccttctgttggagattcctttctttatggttgctgttcataaccccttcaacacccccccttgctggtcctgccggtcacagttgaggattttggctgtgatgggctcatactcataatggcctgttgagttgtttttagtgacaggttttgtttgctgcacacctcattggcttgcttaccaacaccagctagaagtggtccctctttcatatccaaaccagaacacatttgggtattcctgagactttatagagcgtgtattgtttgttatacgaacctaacctaccttgttgttttctcatattaagaaatttaaatctactttgttttagtgaagctattttggtaatgtataagcaattttggttctgtttagggagaattcagggtttccatgacttgatttgagctttgcatatttcaaataagtaacacagccattttaatttagctaaataaaaaaatttcttttttctctcaa

SEQ ID NO: 361613 - DNA, 2521 bp, Homo sapiens
ggagtgcggcttactggcaggcggcgcaggcggccgctgccaaaggggaagtgatctggggctggagcgatggcccggggctggagctcgcggccgccgccgccgcagccgccgccaccaacgccaacaacaacgtgtcgggagcagccgcggccgaagccggagcaggggccggagtcgcggctggagtggggcctgcgcgtgtgagtggccgagagttgcccgtgccggagacctcaaactccgggcgggagcgctttcggtcggccgagccgccgtcgcccgcggcaccgtgtccccaaggcccagacagcggggcgggggtctatcaggcgcgggactggcttctctcaggccgacccttctagccgggctccggatcttcctcggcctcgggcccccttcacgttcaggacggaggccggagaacggtgatcatcacacaccccagccggcttcctggccagggcattttctctgcggccaagcagtgttgggattgtagctgctgggagccccctcctgccgccacctctcctgcaaggaagggactgacgcgttcccactttcttactctgcacctccccactctcttcccattcaagaacgagtttctcttccctctccattggaaatcctgctccggaggtccaaaacacgtattttaagcgtgcccttcctcacctcctggagcacccttagaagtattgcctacttatccgggctgagaatccttcatttttgacctggcttttttttcgccctttgggagataaaggtccctctccaccctctactaacactctgcacccaaggccttatcctttggggtcaccagctccttggccatttctatgtgatttcccccacccatctgagttccagtttcctctgggctccaatctccagtccctggcggatctggtcagtcccacccctaggtgggagtgaccagggggctctggcccaggattcccaaccctggaaggcagctccaaggcaggaagagaattgggcatcgggtacgaacctggcagctcaggagtcggggctccactcaccccacacaaaaagatgaaaaagcgcaaagagctcaatgcattgattggtttggctggggacagccggagaaagaagcccaagaaaggcccaagcagtcaccgcctgcttcgcactgagcctcccgactcagactctgagtccagctccgaagaggaagaggaattcggtgtggttggaaatcgctctcgctttgccaagggagactatttacgatgctgcaagatctgttatccgctctgtggttttgtcatccttgctgcctgtgttgtggcctgtgttggcttggtgtggatgcaggttgctctcaaggaggatctggatgccctcaaggaaaaatttcgaacaatggaatctaatcagaaaagctcattccaagaaatccccaaacttaatgaagaactactcagcaagcaaaaacaacttgagaagattgaatctggagagatgggtttgaacaaagtctggataaacatcacagaaatgaataagcagatttctctgttgacttctgcagtgaaccacctcaaagccaatgttaagtcagctgcagacttgattagcctgcctaccactgtagagggacttcagaagagtgtagcttccattggcaatactttaaacagcgtccatcttgctgtggaagcactacagaaaactgtggatgaacacaagaaaacgatggaattactgcagagtgatatgaatcagcacttcttgaaggagactcctggaagcaaccagatcattccgtcaccttcagccacatcagaacttgacaataaaacccacagtgagaatttgaaacaggatatcctgtaccttcacaactctttagaggaggtaaacagtgccctagtggggtaccagagacagaatgatcttaaactcgagggaatgaacgagacagtcagtaatcttacccagagagtcaacctgatagaaagcgatgtggttgctatgagcaaggtagaaaagaaagcaaacctgtccttcagcatgatgggtgatagatctgccactctgaaaagacagtctttggatcaagtcaccaacagaacagatacagtaaaaatccaaagcataaagaaagaagatagttcaaattctcaggtatccaagctaagagagaaactccagctgatcagtgctcttacaaacaaacctgagagcaacaggcctccagagaccgccgatgaaggtgagagcagagccggcttcttaatatttcatggaggcttgagcagcttgcctctcacatggggagcagggaaggtgttccagcagtactgatcgcaccaagcgagtgatgcctgaacgcaccgagatgaagctgatacactttgctttcatttagaaaaggcccattttgtacatgatttgtactctagtctattaagggaagaattggtaatgtttagctggaaatagaattctccatgctgtctgcatccaattatag

SEQ ID NO: 361614 - DNA, 451 bp, Homo sapiens
aagggaattcgtgctggtgctaagggaattcgtgctggtgctaagggaatccgtgctggtgctttgtgatgggctcatactcataatggcctgttgagttgtttttagtgacaggttttgtttgctgcacacctcattggcttgcttaccaacaccagctagaagtggtccctctttcatatccaaaccagaacacatttgggtattcctgagactttatagagcgtgtattgtttgttatacgaacctaacctaccttgttgttttctcatattaagaaatttaaatctactttgttttagtgaagctattttggtaatgtataagcaattttggttctgtttagggagaattcagggtttccatgacttgatttgagctttgcatatttcaaataagtaacacagccattttaatttagctaaataaaaaaatttcttttttctctcaa

SEQ ID NO: 361615 - DNA, 347 bp, Homo sapiens
agagtgcgagggacaaagcaaagacagacgattgatggtcaaaaccaggaaaaggagtttacttcagtacttgacatagtaatggttgttcggtgctgctggcctgcttgtctaatttacgtctttagtggattccataactttatttatttccactctaggatatcctgtaccttcacaactctttagaggaggtaaacagtgccctagtggggtaccagagacagaatgatcttaaactcgagggaatgaacgagacagtcagtaatcttacccagagagtcaacctgatagaaagcgatgtggttgctatgagcaaggtagaaaagaaagcaaacctgtccttc

SEQ ID NO: 361616 - DNA, 319 bp, Homo sapiens
gcttgagagcatttgattccgatggagatggaagatactcattcctggagctaagggtagctttaggtatctagcttcatcaggcatattttagaaatggactgcctaatatctatttacctaacaacaaaacaacccttacttacccatcagtcctctagtcctccaaactactgtagcagatactttgccaccttttaacttgtttgaagaagctatataaaagttatttttttaaagaagaagaccattttacttatgatgttcagaaatctatgatttcctacaaccagtaagatcttacattttaaaattgcca

SEQ ID NO: 361617 - DNA, 6131 bp, Homo sapiens
ggagtgcggcttactggcaggcggcgcaggcggccgctgccaaaggggaagtgatctggggctggagcgatggcccggggctggagctcgcggccgccgccgccgcagccgccgccaccaacgccaacaacaacgtgtcgggagcagccgcggccgaagccggagcaggggccggagtcgcggctggagtggggcctgcgcgtgtgagtggccgagagttgcccgtgccggagacctcaaactccgggcgggagcgctttcggtcggccgagccgccgtcgcccgcggcaccgtgtccccaaggcccagacagcggggcgggggtctatcaggcgcgggactggcttctctcaggccgacccttctagccgggctccggatcttcctcggcctcgggcccccttcacgttcaggacggaggccggagaacggtgatcatcacacaccccagccggcttcctggccagggcattttctctgcggccaagcagtgttgggattgtagctgctgggagccccctcctgccgccacctctcctgcaaggaagggactgacgcgttcccactttcttactctgcacctccccactctcttcccattcaagaacgagtttctcttccctctccattggaaatcctgctccggaggtccaaaacacgtattttaagcgtgcccttcctcacctcctggagcacccttagaagtattgcctacttatccgggctgagaatccttcatttttgacctggcttttttttcgccctttgggagataaaggtccctctccaccctctactaacactctgcacccaaggccttatcctttggggtcaccagctccttggccatttctatgtgatttcccccacccatctgagttccagtttcctctgggctccaatctccagtccctggcggatctggtcagtcccacccctaggtgggagtgaccagggggctctggcccaggattcccaaccctggaaggcagctccaaggcaggaagagaattgggcatcgggtacgaacctggcagctcaggagtcggggctccactcaccccacacaaaaagatgaaaaagcgcaaagagctcaatgcattgattggtttggctggggacagccggagaaagaagcccaagaaaggcccaagcagtcaccgcctgcttcgcactgagcctcccgactcagactctgagtccagctccgaagaggaagaggaattcggtgtggttggaaatcgctctcgctttgccaagggagactatttacgatgctgcaagatctgttatccgctctgtggttttgtcatccttgctgcctgtgttgtggcctgtgttggcttggtgtggatgcaggttgctctcaaggaggatctggatgccctcaaggaaaaatttcgaacaatggaatctaatcagaaaagctcattccaagaaatccccaaacttaatgaagaactactcagcaagcaaaaacaacttgagaagattgaatctggagagatgggtttgaacaaagtctggataaacatcacagaaatgaataagcagatttctctgttgacttctgcagtgaaccacctcaaagccaatgttaagtcagctgcagacttgattagcctgcctaccactgtagagggacttcagaagagtgtagcttccattggcaatactttaaacagcgtccatcttgctgtggaagcactacagaaaactgtggatgaacacaagaaaacgatggaattactgcagagtgatatgaatcagcacttcttgaaggagactcctggaagcaaccagatcattccgtcaccttcagccacatcagaacttgacaataaaacccacagtgagaatttgaaacaggatatcctgtaccttcacaactctttagaggaggtaaacagtgccctagtggggtaccagagacagaatgatcttaaactcgagggaatgaacgagacagtcagtaatcttacccagagagtcaacctgatagaaagcgatgtggttgctatgagcaaggtagaaaagaaagcaaacctgtccttcagcatgatgggtgatagatctgccactctgaaaagacagtctttggatcaagtcaccaacagaacagatacagtaaaaatccaaagcataaagaaagaagatagttcaaattctcaggtatccaagctaagagagaaactccagctgatcagtgctcttacaaacaaacctgagagcaacaggcctccagagaccgccgatgaagagcaagtagagagtttcacatcaaagccatcagcattgccaaaattttcacagtttcttggagacccagttgagaaagctgcccaactaagacctatctccctaccaggagtttctagcactgaagatcttcaggatttattccgcaagactggccaggacgtggatgggaagctgacctaccaggaaatctggacctccctaggttctgctatgccagaaccagagagcttgagagcatttgattccgatggagatggaagatactcattcctggagctaagggtagctttaggtatctagcttcatcaggcatattttagaaatggactgcctaatatctatttacctaacaacaaaacaacccttacttacccatcagtcctctagtcctccaaactactgtagcagatactttgccaccttttaacttgtttgaagaagctatataaaagttatttttttaaagaagaagaccattttacttatgatgttcagaaatctatgatttcctacaaccagtaagatcttacattttaaaattgccagaaaaaaaattaaagccctctttttttctctttcctttttttgaggggaggagaccttatcttttaaagctgggaaatgtatatagagagagaataagccacttttatatttcacttaaatttgccttaaattagctgcactttatagagactcagaaaatgtcttttctttaaaagataggccttttctgtttgtaaatatttaaatgaaagaaagcattgtgcatattgtgtggaaagtaggaagaatggttttgaacaggatatgaacaaatgacttattaaaaattgctgatctggtgtaggtggcagctgaaactacatccatgtctccataaggtatccctcaaaggcccaggcgctgccagggggtttgtcctggtagctggaggaaccgatttcagggagtagacactggagacaatactgactccaggcatggctcatggaagtaggattctggttctttgttcctattccctcagctaatcccaacctgggaatcagagaagtcttggggatttttctcatttttagtactatttcagggtttatgagcataaaaagttatccattggggagctccattttccctgctgagtgagctagattgccttccccacccacccacttaagtctgtcttaaagccgtagctggctcccaccaccagtaccatctccatttgaatggcagggctaaattcccccagccattatctcacactgaccacccagagctttagaagagagctgtgcttctaattttgacccagaaaaccataccccttgagattttacctagaggctaaccaagagcctaatatgtttctctgggggatgactaaagccaaaaaggctgtgagatgaaacatgtgaaataatattcagtttccttaccattaccagctcagaagtagctagaggctttctacccaaaggatgccaaagtatagcagggcaggcctggagctagggccttcacatggtggtagcaagtttttcaaatctaatacaatcaagtacaatacttcctttaaatgcttctgtggacctggcatgaaagatccctagattgaaaggaataatacctccatgtctcctgtatgttgagtctagaattgctgtgttgttcttagaagcagtctttgggcaacaacttgaaaggggaaaaaaaaactacaaaaacttaactttggtataggccaagtcagggagaaagtagagaaagctgtcatgccacagacttctttagtggagatcatttcctttttaactttgttcaggttgcccttcaccatggatacagtccggtacccttaaacatttaagggctgtttttttttttctttacatgatgttcagcttggtattaaccaaacttaaattttttttccagaagtattaaaatttagttaaagcaagatgaagtcttttcccatgaatgtgtccccttatctcattatagcttatgctcagtttcactttcttggaaaggttaaaacaaattagcctggcactttaggtaacttgaaaataactctcacccttctgactgccttccatccactctcaccccacacctttttttaatatatatacacccttacagattttctaacaaccaaataaaattctagcaataaattgaattatactgctatatttgtatatactgtaccataaatagtatgtctgtacctggaaggtatttttttgagaactgatttatatgaaatatacttgagggtaatgtagcttgtcctttttagtttcaaattcttattcataggcagatactttgaagacaccttaactctttgttgtgtgtattttcccttgcatcagataactatacatggagaaatccattttgttttttggtttatcttctgttcttcctaccttgtgcttgtctgactagtatcacccctgagccagtatacagtaccatcctctccccctaccaagtttggcagaggtgtttatactgcattctcagatctatgaatatttttgtcatcctgcctgagaaagtacatcttccaggcaaaagtagggtatcttgaactcctttcttctgagttgagcagactcactggcttaagcatcccataagcctattatttagtgtgaatttgggacttttatttgtatgttgtcttaacttactgagcctgtgacttgtatttagctgtagtcaagcctcaccagccatatctcatctctgagaggaagactggatagtgagtttggttttggttttggttttaaacccttttaccttttcagtctggcagctcctactgctgctttcctaagttactcaaagcactgcttcttggtccttgttttcttttgccttgtactatcttgtataatgtttactaaaagagcctccccataaatcagagaggcaaaaaggtagcatataaaaagaagaaccaaaagaagagaaaacctgacttctagatgactgtggtgtcatctaaaaggcagaggtgcctgaccctcaggaatgtgtatgatgcaacagagctgaagaatgggttcccttcacctactgctggccattgtcccttctgttggagattcctttctttatggttgctgttcataaccccttcaacacccccccttgctggtcctgccggtcacagttgaggattttggctgtgatgggctcatactcataatggcctgttgagttgtttttagtgacaggttttgtttgctgcacacctcattggcttgcttaccaacaccagctagaagtggtccctctttcatatccaaaccagaacacatttgggtattcctgagactttatagagcgtgtattgtttgttatacgaacctaacctaccttgttgttttctcatattaagaaatttaaatctactttgttttagtgaagctattttggtaatgtataagcaattttggttctgtttagggagaattcagggtttccatgacttgatttgagctttgcatatttcaaataagtaacacagccattttaatttagctaaataaaaaaatttcttttttctctcaaaaaaaaaaaaaaaaaaaaaaaaaaaaaaaaaaaaaaaaaaaaaaaaaaaagaaaaaaaaaaaaaaaaaaaaaaaaaaaaaaaaaaaaaaaaaaaaaaaaaaaaaaaaaaccttgggggggggcccgggccccaaattcccctaatggggggcggtttaaaaattaaggggcggatgtttaaaaacgtaggaaggggaaaaccctgggggttcccaacttaaaggccttggaaaaaaatcccctttttgaaggggggcttaaaacca

SEQ ID NO: 361618 - DNA, 4924 bp, Homo sapiens
  misc_feature (36)..(36): n is a, c, g, or t
gcggccgccgccgccgcagccgccgccaccaacgcnaaccctggaaggcagctccaaggcaggaagagaattgggcatcgggtacgaacctggcagctcaggagtcggggctccactcaccccacacaaaaagatgaaaaagcgcaaagagctcaatgcattgattggtttggctggggacagccggagaaagaagcccaagaaaggcccaagcagtcaccgcctgcttcgcactgagcctcccgactcagactctgagtccagctccgaagaggaagaggaattcggtgtggttggaaatcgctctcgctttgccaagggagactatttacgatgctgcaagatctgttatccgctctgtggttttgtcatccttgctgcctgtgttgtggcctgtgttggcttggtgtggatgcaggttgctctcaaggaggatctggatgccctcaaggaaaaatttcgaacaatggaatctaatcagaaaagctcattccaagaaatccccaaacttaatgaagaactactcagcaagcaaaaacaacttgagaagattgaatctggagagatgggtttgaacaaagtctggataaacatcacagaaatgaataagcagatttctctgttgacttctgcagtgaaccacctcaaagccaatgttaagtcagctgcagacttgattagcctgcctaccactgtagagggacttcagaagagtgtagcttccattggcaatactttaaacagcgtccatcttgctgtggaagcactacagaaaactgtggatgaacacaagaaaacgatggaattactgcagagtgatatgaatcagcacttcttgaaggagactcctggaagcaaccagatcattccgtcaccttcagccacatcagaacttgacaataaaacccacagtgagaatttgaaacaggatatcctgtaccttcacaactctttagaggaggtaaacagtgccctagtggggtaccagagacagaatgatcttaaactcgagggaatgaacgagacagtcagtaatcttacccagagagtcaacctgatagaaagcgatgtggttgctatgagcaaggtagaaaagaaagcaaacctgtccttcagcatgatgggtgatagatctgccactctgaaaagacagtctttggatcaagtcaccaacagaacagatacagtaaaaatccaaagcataaagaaagaagatagttcaaattctcaggtatccaagctaagagagaaactccagctgatcagtgctcttacaaacaaacctgagagcaacaggcctccagagaccgccgatgaagagcaagtagagagtttcacatcaaagccatcagcattgccaaaattttcacagtttcttggagacccagttgagaaagctgcccaactaagacctatctccctaccaggagtttctagcactgaagatcttcaggatttattccgcaagactggccaggacgtggatgggaagctgacctaccaggaaatctggacctccctaggttctgctatgccagaaccagagagcttgagagcatttgattccgatggagatggaagatactcattcctggagctaagggtagctttaggtatctagcttcatcaggcatattttagaaatggactgcctaatatctatttacctaacaacaaaacaacccttacttacccatcagtcctctagtcctccaaactactgtagcagatactttgccaccttttaacttgtttgaagaagctatataaaagttatttttttaaagaagaagaccattttacttatgatgttcagaaatctatgatttcctacaaccagtaagatcttacattttaaaattgccagaaaaaaaattaaagccctctttttttctctttcctttttttgaggggaggagaccttatcttttaaagctgggaaatgtatatagagagagaataagccacttttatatttcacttaaatttgccttaaattagctgcactttatagagactcagaaaatgtcttttctttaaaagataggccttttctgtttgtaaatatttaaatgaaagaaagcattgtgcatattgtgtggaaagtaggaagaatggttttgaacaggatatgaacaaatgacttattaaaaattgctgatctggtgtaggtggcagctgaaactacatccatgtctccataaggtatccctcaaaggcccaggcgctgccagggggtttgtcctggtagctggaggaaccgatttcagggagtagacactggagacaatactgactccaggcatggctcatggaagtaggattctggttctttgttcctattccctcagctaatcccaacctgggaatcagagaagtcttggggatttttctcatttttagtactatttcagggtttatgagcataaaaagttatccattggggagctccattttccctgctgagtgagctagattgccttccccacccacccacttaagtctgtcttaaagccgtagctggctcccaccaccagtaccatctccatttgaatggcagggctaaattcccccagccattatctcacactgaccacccagagctttagaagagagctgtgcttctaattttgacccagaaaaccataccccttgagattttacctagaggctaaccaagagcctaatatgtttctctgggggatgactaaagccaaaaaggctgtgagatgaaacatgtgaaataatattcagtttccttaccattaccagctcagaagtagctagaggctttctacccaaaggatgccaaagtatagcagggcaggcctggagctagggccttcacatggtggtagcaagtttttcaaatctaatacaatcaagtacaatacttcctttaaatgcttctgtggacctggcatgaaagatccctagattgaaaggaataatacctccatgtctcctgtatgttgagtctagaattgctgtgttgttcttagaagcagtctttgggcaacaacttgaaaggggaaaaaaaaactacaaaaacttaactttggtataggccaagtcagggagaaagtagagaaagctgtcatgccacagacttctttagtggagatcatttcctttttaactttgttcaggttgcccttcaccatggatacagtccggtacccttaaacatttaagggctgtttttttttttctttacatgatgttcagcttggtattaaccaaacttaaattttttttccagaagtattaaaatttagttaaagcaagatgaagtcttttcccatgaatgtgtccccttatctcattatagcttatgctcagtttcactttcttggaaaggttaaaacaaattagcctggcactttaggtaacttgaaaataactctcacccttctgactgccttccatccactctcaccccacacctttttttaatatatatacacccttacagattttctaacaaccaaataaaattctagcaataaattgaattatactgctatatttgtatatactgtaccataaatagtatgtctgtacctggaaggtatttttttgagaactgatttatatgaaatatacttgagggtaatgtagcttgtcctttttagtttcaaattcttattcataggcagatactttgaagacaccttaactctttgttgtgtgtattttcccttgcatcagataactatacatggagaaatccattttgttttttggtttatcttctgttcttcctaccttgtgcttgtctgactagtatcacccctgagccagtatacagtaccatcctctccccctaccaagtttggcagaggtgtttatactgcattctcagatctatgaatatttttgtcatcctgcctgagaaagtacatcttccaggcaaaagtagggtatcttgaactcctttcttctgagttgagcagactcactggcttaagcatcccataagcctattatttagtgtgaatttgggacttttatttgtatgttgtcttaacttactgagcctgtgacttgtatttagctgtagtcaagcctcaccagccatatctcatctctgagaggaagactggatagtgagtttggttttggttttggttttaaacccttttaccttttcagtctggcagctcctactgctgctttcctaagttactcaaagcactgcttcttggtccttgttttcttttgccttgtactatcttgtataatgtttactaaaagagcctccccataaatcagagaggcaaaaaggtagcatataaaaagaagaaccaaaagaagagaaaacctgacttctagatgactgtggtgtcatctaaaaggcagaggtgcctgaccctcaggaatgtgtatgatgcaacagagctgaagaatgggttcccttcacctactgctggccattgtcccttctgttggagattcctttctttatggttgctgttcataaccccttcaacacccccccttgctggtcctgccggtcacagttgaggattttggctgtgatgggctcatactcataatggcctgttgagttgtttttagtgacaggttttgtttgctgcacacctcattggcttgcttaccaacaccagctagaagtggtccctctttcatatccaaaccagaacacatttgggtattcctgagactttatagagcgtgtattgtttgttatacgaacctaacctaccttgttgttttctcatattaagaaatttaaatctactttgttttagtgaagctattttggtaatgtataagcaattttggttctgtttagggagaattcagggtttccatgacttgatttgagctttgcatatttcaaataagtaacacagccattttaatttagctaaataaaaaaatttcttttttctctcaa

SEQ ID NO: 361619 - DNA, 5673 bp, Homo sapiens
ggagtgcggcttactggcaggcggcgcaggcggccgctgccaaaggggaagtgatctggggctggagcgatggcccggggctggagctcgcggccgccgccgccgcagccgccgccaccaacgccaacaacaacgtgtcgggagcagccgcggccgaagccggagcaggggccggagtcgcggctggagtggggcctgcgcgtgtgagtggccgagagttgcccgtgccggagacctcaaactccgggcgggagcgctttcggtcggccgagccgccgtcgcccgcggcaccgtgtccccaaggcccagacagcggggcgggggtctatcaggcgcgggactggcttctctcaggccgacccttctagccgggctccggatcttcctcggcctcgggcccccttcacgttcaggacggaggccggagaacggtgatcatcacacaccccagccggcttcctggccagggcattttctctgcggccaagcagtgttgggattgtagctgctgggagccccctcctgccgccacctctcctgcaaggaagggactgacgcgttcccactttcttactctgcacctccccactctcttcccattcaagaacgagtttctcttccctctccattggaaatcctgctccggaggtccaaaacacgtattttaagcgtgcccttcctcacctcctggagcacccttagaagtattgcctacttatccgggctgagaatccttcatttttgacctggcttttttttcgccctttgggagataaaggtccctctccaccctctactaacactctgcacccaaggccttatcctttggggtcaccagctccttggccatttctatgtgatttcccccacccatctgagttccagtttcctctgggctccaatctccagtccctggcggatctggtcagtcccacccctaggtgggagtgaccagggggctctggcccaggattcccaaccctggaaggcagctccaaggcaggaagagaattgggcatcgggtacgaacctggcagctcaggagtcggggctccactcaccccacacaaaaagatgaaaaagcgcaaagagctcaatgcattgattggtttggctggggacagccggagaaagaagcccaagaaaggcccaagcagtcaccgcctgcttcgcactgagcctcccgactcagactctgagtccagctccgaagaggaagaggaattcggtgtggttggaaatcgctctcgctttgccaagggagactatttacgatgctgcaagatctgttatccgctctgtggttttgtcatccttgctgcctgtgttgtggcctgtgttggcttggtgtggatgcaggttgctctcaaggaggatctggatgccctcaaggaaaaatttcgaacaatggaatctaatcagaaaagctcattccaagaaatccccaaacttaatgaagaactactcagcaagcaaaaacaacttgagaagattgaatctggagagatgggtttgaacaaagtctggataaacatcacagaaatgaataagcagatttctctgttgacttctgcagtgaaccacctcaaagccaatgttaagtcagctgcagacttgattagcctgcctaccactgtagagggacttcagaagagtgtagcttccattggcaatactttaaacagcgtccatcttgctgtggaagcactacagaaaactgtggatgaacacaagaaaacgatggaattactgcagagtgatatgaatcagcacttcttgaaggagactcctggaagcaaccagatcattccgtcaccttcagccacatcagaacttgacaataaaacccacagtgagaatttgaaacagatgggtgatagatctgccactctgaaaagacagtctttggatcaagtcaccaacagaacagatacagtaaaaatccaaagcataaagaaagaagatagttcaaattctcaggtatccaagctaagagagaaactccagctgatcagtgctcttacaaacaaacctgagagcaacaggcctccagagaccgccgatgaagagcaagtagagagtttcacatcaaagccatcagcattgccaaaattttcacagtttcttggagacccagttgagaaagctgcccaactaagacctatctccctaccaggagtttctagcactgaagatcttcaggatttattccgcaagactggccaggacgtggatgggaagctgacctaccaggaaatctggacctccctaggttctgctatgccagaaccagagagcttgagagcatttgattccgatggagatggaagatactcattcctggagctaagggtagctttaggtatctagcttcatcaggcatattttagaaatggactgcctaatatctatttacctaacaacaaaacaacccttacttacccatcagtcctctagtcctccaaactactgtagcagatactttgccaccttttaacttgtttgaagaagctatataaaagttatttttttaaagaagaagaccattttacttatgatgttcagaaatctatgatttcctacaaccagtaagatcttacattttaaaattgccagaaaaaaaattaaagccctctttttttctctttcctttttttgaggggaggagaccttatcttttaaagctgggaaatgtatatagagagagaataagccacttttatatttcacttaaatttgccttaaattagctgcactttatagagactcagaaaatgtcttttctttaaaagataggccttttctgtttgtaaatatttaaatgaaagaaagcattgtgcatattgtgtggaaagtaggaagaatggttttgaacaggatatgaacaaatgacttattaaaaattgctgatctggtgtaggtggcagctgaaactacatccatgtctccataaggtatccctcaaaggcccaggcgctgccagggggtttgtcctggtagctggaggaaccgatttcagggagtagacactggagacaatactgactccaggcatggctcatggaagtaggattctggttctttgttcctattccctcagctaatcccaacctgggaatcagagaagtcttggggatttttctcatttttagtactatttcagggtttatgagcataaaaagttatccattggggagctccattttccctgctgagtgagctagattgccttccccacccacccacttaagtctgtcttaaagccgtagctggctcccaccaccagtaccatctccatttgaatggcagggctaaattcccccagccattatctcacactgaccacccagagctttagaagagagctgtgcttctaattttgacccagaaaaccataccccttgagattttacctagaggctaaccaagagcctaatatgtttctctgggggatgactaaagccaaaaaggctgtgagatgaaacatgtgaaataatattcagtttccttaccattaccagctcagaagtagctagaggctttctacccaaaggatgccaaagtatagcagggcaggcctggagctagggccttcacatggtggtagcaagtttttcaaatctaatacaatcaagtacaatacttcctttaaatgcttctgtggacctggcatgaaagatccctagattgaaaggaataatacctccatgtctcctgtatgttgagtctagaattgctgtgttgttcttagaagcagtctttgggcaacaacttgaaaggggaaaaaaaaactacaaaaacttaactttggtataggccaagtcagggagaaagtagagaaagctgtcatgccacagacttctttagtggagatcatttcctttttaactttgttcaggttgcccttcaccatggatacagtccggtacccttaaacatttaagggctgtttttttttttctttacatgatgttcagcttggtattaaccaaacttaaattttttttccagaagtattaaaatttagttaaagcaagatgaagtcttttcccatgaatgtgtccccttatctcattatagcttatgctcagtttcactttcttggaaaggttaaaacaaattagcctggcactttaggtaacttgaaaataactctcacccttctgactgccttccatccactctcaccccacacctttttttaatatatatacacccttacagattttctaacaaccaaataaaattctagcaataaattgaattatactgctatatttgtatatactgtaccataaatagtatgtctgtacctggaaggtatttttttgagaactgatttatatgaaatatacttgagggtaatgtagcttgtcctttttagtttcaaattcttattcataggcagatactttgaagacaccttaactctttgttgtgtgtattttcccttgcatcagataactatacatggagaaatccattttgttttttggtttatcttctgttcttcctaccttgtgcttgtctgactagtatcacccctgagccagtatacagtaccatcctctccccctaccaagtttggcagaggtgtttatactgcattctcagatctatgaatatttttgtcatcctgcctgagaaagtacatcttccaggcaaaagtagggtatcttgaactcctttcttctgagttgagcagactcactggcttaagcatcccataagcctattatttagtgtgaatttgggacttttatttgtatgttgtcttaacttactgagcctgtgacttgtatttagctgtagtcaagcctcaccagccatatctcatctctgagaggaagactggatagtgagtttggttttggttttggttttaaacccttttaccttttcagtctggcagctcctactgctgctttcctaagttactcaaagcactgcttcttggtccttgttttcttttgccttgtactatcttgtataatgtttactaaaagagcctccccataaatcagagaggcaaaaaggtagcatataaaaagaagaaccaaaagaagagaaaacctgacttctagatgactgtggtgtcatctaaaaggcagaggtgcctgaccctcaggaatgtgtatgatgcaacagagctgaagaatgggttcccttcacctactgctggccattgtcccttctgttggagattcctttctttatggttgctgttcataaccccttcaacacccccccttgctggtcctgccggtcacagttgaggattttggctgtgatgggctcatactcataatggcctgttgagttgtttttagtgacaggttttgtttgctgcacacctcattggcttgcttaccaacaccagctagaagtggtccctctttcatatccaaaccagaacacatttgggtattcctgagactttatagagcgtgtattgtttgttatacgaacctaacctaccttgttgttttctcatattaagaaatttaaatctactttgttttagtgaagctattttggtaatgtataagcaattttggttctgtttagggagaattcagggtttccatgacttgatttgagctttgcatatttcaaataagtaacacagccattttaatttagctaaataaaaaaatttcttttttctctcaa

SEQ ID NO: 361620 - DNA, 5811 bp, Homo sapiens
ggagtgcggcttactggcaggcggcgcaggcggccgctgccaaaggggaagtgatctggggctggagcgatggcccggggctggagctcgcggccgccgccgccgcagccgccgccaccaacgccaacaacaacgtgtcgggagcagccgcggccgaagccggagcaggggccggagtcgcggctggagtggggcctgcgcgtgtgagtggccgagagttgcccgtgccggagacctcaaactccgggcgggagcgctttcggtcggccgagccgccgtcgcccgcggcaccgtgtccccaaggcccagacagcggggcgggggtctatcaggcgcgggactggcttctctcaggccgacccttctagccgggctccggatcttcctcggcctcgggcccccttcacgttcaggacggaggccggagaacggtgatcatcacacaccccagccggcttcctggccagggcattttctctgcggccaagcagtgttgggattgtagctgctgggagccccctcctgccgccacctctcctgcaaggaagggactgacgcgttcccactttcttactctgcacctccccactctcttcccattcaagaacgagtttctcttccctctccattggaaatcctgctccggaggtccaaaacacgtattttaagcgtgcccttcctcacctcctggagcacccttagaagtattgcctacttatccgggctgagaatccttcatttttgacctggcttttttttcgccctttgggagataaaggtccctctccaccctctactaacactctgcacccaaggccttatcctttggggtcaccagctccttggccatttctatgtgatttcccccacccatctgagttccagtttcctctgggctccaatctccagtccctggcggatctggtcagtcccacccctaggtgggagtgaccagggggctctggcccaggattcccaaccctggaaggcagctccaaggcaggaagagaattgggcatcgggtacgaacctggcagctcaggagtcggggctccactcaccccacacaaaaagatgaaaaagcgcaaagagctcaatgcattgattggtttggctggggacagccggagaaagaagcccaagaaaggcccaagcagtcaccgcctgcttcgcactgagcctcccgactcagactctgagtccagctccgaagaggaagaggaattcggtgtggttggaaatcgctctcgctttgccaagggagactatttacgatgctgcaagatctgttatccgctctgtggttttgtcatccttgctgcctgtgttgtggcctgtgttggcttggtgtggatgcaggttgctctcaaggaggatctggatgccctcaaggaaaaatttcgaacaatggaatctaatcagaaaagctcattccaagaaatccccaaacttaatgaagaactactcagcaagcaaaaacaacttgagaagattgaatctggagagatgggtttgaacaaagtctggataaacatcacagaaatgaataagcagatttctctgttgacttctgcagtgaaccacctcaaagccaatgttaagtcagctgcagacttgattagcctgcctaccactgtagagggacttcagaagagtgtagcttccattggcaatactttaaacagcgtccatcttgctgtggaagcactacagaaaactgtggatgaacacaagaaaacgatggaattactgcagagtgatatgaatcagcacttcttgaaggagactcctggaagcaaccagatcattccgtcaccttcagccacatcagaacttgacaataaaacccacagtgagaatttgaaacaggatatcctgtaccttcacaactctttagaggaggtaaacagtgccctagtggggtaccagagacagaatgatcttaaactcgagggaatgaacgagacagtcagtaatcttacccagagagtcaacctgatagaaagcgatgtggttgctatgagcaaggtagaaaagaaagcaaacctgtccttcagcatgatgggtgatagatctgccactctgaaaagacagtctttggatcaagtcaccaacagaacagatacagtaaaaatccaaagcataaagaaagaagatagttcaaattctcaggtatccaagctaagagagaaactccagctgatcagtgctcttacaaacaaacctgagagcaacaggcctccagagaccgccgatgaagagcaagtagagagtttcacatcaaagccatcagcattgcctatctccctaccaggagtttctagcactgaagatcttcaggatttattccgcaagactggccaggacgtggatgggaagctgacctaccaggaaatctggacctccctaggttctgctatgccagaaccagagagcttgagagcatttgattccgatggagatggaagatactcattcctggagctaagggtagctttaggtatctagcttcatcaggcatattttagaaatggactgcctaatatctatttacctaacaacaaaacaacccttacttacccatcagtcctctagtcctccaaactactgtagcagatactttgccaccttttaacttgtttgaagaagctatataaaagttatttttttaaagaagaagaccattttacttatgatgttcagaaatctatgatttcctacaaccagtaagatcttacattttaaaattgccagaaaaaaaattaaagccctctttttttctctttcctttttttgaggggaggagaccttatcttttaaagctgggaaatgtatatagagagagaataagccacttttatatttcacttaaatttgccttaaattagctgcactttatagagactcagaaaatgtcttttctttaaaagataggccttttctgtttgtaaatatttaaatgaaagaaagcattgtgcatattgtgtggaaagtaggaagaatggttttgaacaggatatgaacaaatgacttattaaaaattgctgatctggtgtaggtggcagctgaaactacatccatgtctccataaggtatccctcaaaggcccaggcgctgccagggggtttgtcctggtagctggaggaaccgatttcagggagtagacactggagacaatactgactccaggcatggctcatggaagtaggattctggttctttgttcctattccctcagctaatcccaacctgggaatcagagaagtcttggggatttttctcatttttagtactatttcagggtttatgagcataaaaagttatccattggggagctccattttccctgctgagtgagctagattgccttccccacccacccacttaagtctgtcttaaagccgtagctggctcccaccaccagtaccatctccatttgaatggcagggctaaattcccccagccattatctcacactgaccacccagagctttagaagagagctgtgcttctaattttgacccagaaaaccataccccttgagattttacctagaggctaaccaagagcctaatatgtttctctgggggatgactaaagccaaaaaggctgtgagatgaaacatgtgaaataatattcagtttccttaccattaccagctcagaagtagctagaggctttctacccaaaggatgccaaagtatagcagggcaggcctggagctagggccttcacatggtggtagcaagtttttcaaatctaatacaatcaagtacaatacttcctttaaatgcttctgtggacctggcatgaaagatccctagattgaaaggaataatacctccatgtctcctgtatgttgagtctagaattgctgtgttgttcttagaagcagtctttgggcaacaacttgaaaggggaaaaaaaaactacaaaaacttaactttggtataggccaagtcagggagaaagtagagaaagctgtcatgccacagacttctttagtggagatcatttcctttttaactttgttcaggttgcccttcaccatggatacagtccggtacccttaaacatttaagggctgtttttttttttctttacatgatgttcagcttggtattaaccaaacttaaattttttttccagaagtattaaaatttagttaaagcaagatgaagtcttttcccatgaatgtgtccccttatctcattatagcttatgctcagtttcactttcttggaaaggttaaaacaaattagcctggcactttaggtaacttgaaaataactctcacccttctgactgccttccatccactctcaccccacacctttttttaatatatatacacccttacagattttctaacaaccaaataaaattctagcaataaattgaattatactgctatatttgtatatactgtaccataaatagtatgtctgtacctggaaggtatttttttgagaactgatttatatgaaatatacttgagggtaatgtagcttgtcctttttagtttcaaattcttattcataggcagatactttgaagacaccttaactctttgttgtgtgtattttcccttgcatcagataactatacatggagaaatccattttgttttttggtttatcttctgttcttcctaccttgtgcttgtctgactagtatcacccctgagccagtatacagtaccatcctctccccctaccaagtttggcagaggtgtttatactgcattctcagatctatgaatatttttgtcatcctgcctgagaaagtacatcttccaggcaaaagtagggtatcttgaactcctttcttctgagttgagcagactcactggcttaagcatcccataagcctattatttagtgtgaatttgggacttttatttgtatgttgtcttaacttactgagcctgtgacttgtatttagctgtagtcaagcctcaccagccatatctcatctctgagaggaagactggatagtgagtttggttttggttttggttttaaacccttttaccttttcagtctggcagctcctactgctgctttcctaagttactcaaagcactgcttcttggtccttgttttcttttgccttgtactatcttgtataatgtttactaaaagagcctccccataaatcagagaggcaaaaaggtagcatataaaaagaagaaccaaaagaagagaaaacctgacttctagatgactgtggtgtcatctaaaaggcagaggtgcctgaccctcaggaatgtgtatgatgcaacagagctgaagaatgggttcccttcacctactgctggccattgtcccttctgttggagattcctttctttatggttgctgttcataaccccttcaacacccccccttgctggtcctgccggtcacagttgaggattttggctgtgatgggctcatactcataatggcctgttgagttgtttttagtgacaggttttgtttgctgcacacctcattggcttgcttaccaacaccagctagaagtggtccctctttcatatccaaaccagaacacatttgggtattcctgagactttatagagcgtgtattgtttgttatacgaacctaacctaccttgttgttttctcatattaagaaatttaaatctactttgttttagtgaagctattttggtaatgtataagcaattttggttctgtttagggagaattcagggtttccatgacttgatttgagctttgcatatttcaaataagtaacacagccattttaatttagctaaataaaaaaatttcttttttctctcaa

SEQ ID NO: 361621 - DNA, 4052 bp, Homo sapiens
ctaccaccttttatccttcaaagccttaaagtttgtgactgaaacagctagaagcactagtttcaacttcgtctctggcctttctccctctctcctcccatctcccactcctctgcaatttctgttgagagtgttctgagatcctttaaataagtttgacgaatttgtttaaaagtgctaggtgttcaagttttaatgtttgcctttaatcttccctttgtttgtttgtttttgttttgccctttaagatgggtgatagatctgccactctgaaaagacagtctttggatcaagtcaccaacagaacagatacagtaaaaatccaaagcataaagaaagaagatagttcaaattctcaggtatccaagctaagagagaaactccagctgatcagtgctcttacaaacaaacctgagagcaacaggcctccagagaccgccgatgaagagcaagtagagagtttcacatcaaagccatcagcattgccaaaattttcacagtttcttggagacccagttgagaaagctgcccaactaagacctatctccctaccaggagtttctagcactgaagatcttcaggatttattccgcaagactggccaggacgtggatgggaagctgacctaccaggaaatctggacctccctaggttctgctatgccagaaccagagagcttgagagcatttgattccgatggagatggaagatactcattcctggagctaagggtagctttaggtatctagcttcatcaggcatattttagaaatggactgcctaatatctatttacctaacaacaaaacaacccttacttacccatcagtcctctagtcctccaaactactgtagcagatactttgccaccttttaacttgtttgaagaagctatataaaagttatttttttaaagaagaagaccattttacttatgatgttcagaaatctatgatttcctacaaccagtaagatcttacattttaaaattgccagaaaaaaaattaaagccctctttttttctctttcctttttttgaggggaggagaccttatcttttaaagctgggaaatgtatatagagagagaataagccacttttatatttcacttaaatttgccttaaattagctgcactttatagagactcagaaaatgtcttttctttaaaagataggccttttctgtttgtaaatatttaaatgaaagaaagcattgtgcatattgtgtggaaagtaggaagaatggttttgaacaggatatgaacaaatgacttattaaaaattgctgatctggtgtaggtggcagctgaaactacatccatgtctccataaggtatccctcaaaggcccaggcgctgccagggggtttgtcctggtagctggaggaaccgatttcagggagtagacactggagacaatactgactccaggcatggctcatggaagtaggattctggttctttgttcctattccctcagctaatcccaacctgggaatcagagaagtcttggggatttttctcatttttagtactatttcagggtttatgagcataaaaagttatccattggggagctccattttccctgctgagtgagctagattgccttccccacccacccacttaagtctgtcttaaagccgtagctggctcccaccaccagtaccatctccatttgaatggcagggctaaattcccccagccattatctcacactgaccacccagagctttagaagagagctgtgcttctaattttgacccagaaaaccataccccttgagattttacctagaggctaaccaagagcctaatatgtttctctgggggatgactaaagccaaaaaggctgtgagatgaaacatgtgaaataatattcagtttccttaccattaccagctcagaagtagctagaggctttctacccaaaggatgccaaagtatagcagggcaggcctggagctagggccttcacatggtggtagcaagtttttcaaatctaatacaatcaagtacaatacttcctttaaatgcttctgtggacctggcatgaaagatccctagattgaaaggaataatacctccatgtctcctgtatgttgagtctagaattgctgtgttgttcttagaagcagtctttgggcaacaacttgaaaggggaaaaaaaaactacaaaaacttaactttggtataggccaagtcagggagaaagtagagaaagctgtcatgccacagacttctttagtggagatcatttcctttttaactttgttcaggttgcccttcaccatggatacagtccggtacccttaaacatttaagggctgtttttttttttctttacatgatgttcagcttggtattaaccaaacttaaattttttttccagaagtattaaaatttagttaaagcaagatgaagtcttttcccatgaatgtgtccccttatctcattatagcttatgctcagtttcactttcttggaaaggttaaaacaaattagcctggcactttaggtaacttgaaaataactctcacccttctgactgccttccatccactctcaccccacacctttttttaatatatatacacccttacagattttctaacaaccaaataaaattctagcaataaattgaattatactgctatatttgtatatactgtaccataaatagtatgtctgtacctggaaggtatttttttgagaactgatttatatgaaatatacttgagggtaatgtagcttgtcctttttagtttcaaattcttattcataggcagatactttgaagacaccttaactctttgttgtgtgtattttcccttgcatcagataactatacatggagaaatccattttgttttttggtttatcttctgttcttcctaccttgtgcttgtctgactagtatcacccctgagccagtatacagtaccatcctctccccctaccaagtttggcagaggtgtttatactgcattctcagatctatgaatatttttgtcatcctgcctgagaaagtacatcttccaggcaaaagtagggtatcttgaactcctttcttctgagttgagcagactcactggcttaagcatcccataagcctattatttagtgtgaatttgggacttttatttgtatgttgtcttaacttactgagcctgtgacttgtatttagctgtagtcaagcctcaccagccatatctcatctctgagaggaagactggatagtgagtttggttttggttttggttttaaacccttttaccttttcagtctggcagctcctactgctgctttcctaagttactcaaagcactgcttcttggtccttgttttcttttgccttgtactatcttgtataatgtttactaaaagagcctccccataaatcagagaggcaaaaaggtagcatataaaaagaagaaccaaaagaagagaaaacctgacttctagatgactgtggtgtcatctaaaaggcagaggtgcctgaccctcaggaatgtgtatgatgcaacagagctgaagaatgggttcccttcacctactgctggccattgtcccttctgttggagattcctttctttatggttgctgttcataaccccttcaacacccccccttgctggtcctgccggtcacagttgaggattttggctgtgatgggctcatactcataatggcctgttgagttgtttttagtgacaggttttgtttgctgcacacctcattggcttgcttaccaacaccagctagaagtggtccctctttcatatccaaaccagaacacatttgggtattcctgagactttatagagcgtgtattgtttgttatacgaacctaacctaccttgttgttttctcatattaagaaatttaaatctactttgttttagtgaagctattttggtaatgtataagcaattttggttctgtttagggagaattcagggtttccatgacttgatttgagctttgcatatttcaaataagtaacacagccattttaatttagctaaataaaaaaatttcttttttctctcaa

SEQ ID NO: 361622 - DNA, 4460 bp, Homo sapiens
ggagtgcggcttactggcaggcggcgcaggcggccgctgccaaaggggaagtgatctggggctggagcgatggcccggggctggagctcgcggccgccgccgccgcagccgccgccaccaacgccaacaacaacgtgtcgggagcagccgcggccgaagccggagcaggggccggagtcgcggctggagtggggcctgcgcgtgtgagtggccgagagttgcccgtgccggagacctcaaactccgggcgggagcgctttcggtcggccgagccgccgtcgcccgcggcaccgtgtccccaaggcccagacagcggggcgggggtctatcaggcgcgggactggcttctctcaggccgacccttctagccgggctccggatcttcctcggcctcgggcccccttcacgttcaggacggaggccggagaacggtgatcatcacacaccccagccggcttcctggccagggcattttctctgcggccaagcagtgttgggattgtagctgctgggagccccctcctgccgccacctctcctgcaaggaagggactgacgcgttcccactttcttactctgcacctccccactctcttcccattcaagaacgagtttctcttccctctccattggaaatcctgctccggaggtccaaaacacgtattttaagcgtgcccttcctcacctcctggagcacccttagaagtattgcctacttatccgggctgagaatccttcatttttgacctggcttttttttcgccctttgggagataaaggtccctctccaccctctactaacactctgcacccaaggccttatcctttggggtcaccagctccttggccatttctatgtgatttcccccacccatctgagttccagtttcctctgggctccaatctccagtccctggcggatctggtcagtcccacccctaggtgggagtgaccagggggctctggcccaggattcccaaccctggaaggcagctccaaggcaggaagagaattgggcatcgggtacgaacctggcagctcaggagtcggggctccactcaccccacacaaaaagatgaaaaagcgcaaagagctcaatgcattgattggtttggctggggacagccggagaaagaagcccaagaaaggcccaagcagtcaccgcctgcttcgcactgagcctcccgactcagactctgagtccagctccgaagaggaagaggaattcggtgtggttggaaatcgctctcgctttgccaagggagactatttacgatgctgcaagatctgttatccgctctgtggttttgtcatccttgctgcctgtgttgtggcctgtgttggcttggtgtggatgcaggttgctctcaaggaggatctggatgccctcaaggaaaaatttcgaacaatggaatctaatcagaaaagctcattccaagaaatccccaaacttaatgaagaactactcagcaagcaaaaacaacttgagaagattgaatctggagagatgggtttgaacaaagtctggataaacatcacagaaatgaataagcagatttctctgttgacttctgcagtgaaccacctcaaagccaatgttaagtcagctgcagacttgattagcctgcctaccactgtagagggacttcagaagagtgtagcttccattggcaatactttaaacagcgtccatcttgctgtggaagcactacagaaaactgtggatgaacacaagaaaacgatggaattactgcagagtgatatgaatcagcacttcttgaaggagactcctggaagcaaccagatcattccgtcaccttcagccacatcagaacttgacaataaaacccacagtgagaatttgaaacaggatatcctgtaccttcacaactctttagaggaggtaaacagtgccctagtggggtaccagagacagaatgatcttaaactcgagggaatgaacgagacagtcagtaatcttacccagagagtcaacctgatagaaagcgatgtggttgctatgagcaaggtagaaaagaaagcaaacctgtccttcagcatgatgggtgatagatctgccactctgaaaagacagtctttggatcaagtcaccaacagaacagatacagtaaaaatccaaagcataaagaaagaagatagttcaaattctcaggtatccaagctaagagagaaactccagctgatcagtgctcttacaaacaaacctgagagcaacaggcctccagagaccgccgatgaagagcaagtagagagtttcacatcaaagccatcagcattgccaaaattttcacagtttcttggagacccagttgagaaagctgcccaactaagacctatctccctaccaggagtttctagcactgaagatcttcaggatttattccgcaagactggccaggacgtggatgggaagctgacctaccaggaaatctggacctccctaggttctgctatgccagaaccagagagcttgagagcatttgattccgatggagatggaagatactcattcctggagctaagggtagctttaggtatctagcttcatcaggcatattttagaaatggactgcctaatatctatttacctaacaacaaaacaacccttacttacccatcagtcctctagtcctccaaactactgtagcagatactttgccaccttttaacttgtttgaagaagctatataaaagttatttttttaaagaagaagaccattttacttatgatgttcagaaatctatgatttcctacaaccagtaagatcttacattttaaaattgccagaaaaaaaattaaagccctctttttttctctttcctttttttgaggggaggagaccttatcttttaaagctgggaaatgtatatagagagagaataagccacttttatatttcacttaaatttgccttaaattagctgcactttatagagactcagaaaatgtcttttctttaaaagataggccttttctgtttgtaaatatttaaatgaaagaaagcattgtgcatattgtgtggaaagtaggaagaatggttttgaacaggatatgaacaaatgacttattaaaaattgctgatctggtgtaggtggcagctgaaactacatccatgtctccataaggtatccctcaaaggcccaggcgctgccagggggtttgtcctggtagctggaggaaccgatttcagggagtagacactggagacaatactgactccaggcatggctcatggaagtaggattctggttctttgttcctattccctcagctaatcccaacctgggaatcagagaagtcttggggatttttctcatttttagtactatttcagggtttatgagcataaaaagttatccattggggagctccattttccctgctgagtgagctagattgccttccccacccacccacttaagtctgtcttaaagccgtagctggctcccaccaccagtaccatctccatttgaatggcagggctaaattcccccagccattatctcacactgaccacccagagctttagaagagagctgtgcttctaattttgacccagaaaaccataccccttgagattttacctagaggctaaccaagagcctaatatgtttctctgggggatgactaaagccaaaaaggctgtgagatgaaacatgtgaaataatattcagtttccttaccattaccagctcagaagtagctagaggctttctacccaaaggatgccaaagtatagcagggcaggcctggagctagggccttcacatggtggtagcaagtttttcaaatctaatacaatcaagtacaatacttcctttaaatgcttctgtggacctggcatgaaagatccctagattgaaaggaataatacctccatgtctcctgtatgttgagtctagaattgctgtgttgttcttagaagcagtctttgggcaacaacttgaaaggggaaaaaaaaactacaaaaacttaactttggtataggccaagtcagggagaaagtagagaaagctgtcatgccacagacttctttagtggagatcatttcctttttaactttgttcaggttgcccttcaccatggatacagtccggtacccttaaacatttaagggctgtttttttttttctttacatgatgttcagcttggtattaaccaaacttaaattttttttccagaagtattaaaatttagttaaagcaagatgaagtcttttcccatgaatgtgtccccttatctcattatagcttatgctcagtttcactttcttggaaaggttaatgccttccatccactctcaccccacacctttttttaatatatatacacccttacagattttctaacaaccaaataaaattctagcaataaattgaattatcgcctttcctgctttattagataaaccgccctataattgtaaattatgtccctg

SEQ ID NO: 361623 - DNA, 2463 bp, Homo sapiens
ggagtgcggcttactggcaggcggcgcaggcggccgctgccaaaggggaagtgatctggggctggagcgatggcccggggctggagctcgcggccgccgccgccgcagccgccgccaccaacgccaacaacaacgtgtcgggagcagccgcggccgaagccggagcaggggccggagtcgcggctggagtggggcctgcgcgtgtgagtggccgagagttgcccgtgccggagacctcaaactccgggcgggagcgctttcggtcggccgagccgccgtcgcccgcggcaccgtgtccccaaggcccagacagcggggcgggggtctatcaggcgcgggactggcttctctcaggccgacccttctagccgggctccggatcttcctcggcctcgggcccccttcacgttcaggacggaggccggagaacggtgatcatcacacaccccagccggcttcctggccagggcattttctctgcggccaagcagtgttgggattgtagctgctgggagccccctcctgccgccacctctcctgcaaggaagggactgacgcgttcccactttcttactctgcacctccccactctcttcccattcaagaacgagtttctcttccctctccattggaaatcctgctccggaggtccaaaacacgtattttaagcgtgcccttcctcacctcctggagcacccttagaagtattgcctacttatccgggctgagaatccttcatttttgacctggcttttttttcgccctttgggagataaaggtccctctccaccctctactaacactctgcacccaaggccttatcctttggggtcaccagctccttggccatttctatgtgatttcccccacccatctgagttccagtttcctctgggctccaatctccagtccctggcggatctggtcagtcccacccctaggtgggagtgaccagggggctctggcccaggattcccaaccctggaaggcagctccaaggcaggaagagaattgggcatcgggtacgaacctggcagctcaggagtcggggctccactcaccccacacaaaaagatgaaaaagcgcaaagagctcaatgcattgattggtttggctggggacagccggagaaagaagcccaagaaaggcccaagcagtcaccgcctgcttcgcactgagcctcccgactcagactctgagtccagctccgaagaggaagaggaattcggtgtggttggaaatcgctctcgctttgccaagggagactatttacgatgctgcaagatctgttatccgctctgtggttttgtcatccttgctgcctgtgttgtggcctgtgttggcttggtgtggatgcaggttgctctcaaggaggatctggatgccctcaaggaaaaatttcgaacaatggaatctaatcagaaaagctcattccaagaaatccccaaacttaatgaagaactactcagcaagcaaaaacaacttgagaagattgaatctggagagatgggtttgaacaaagtctggataaacatcacagaaatgaataagcagatttctctgttgacttctgcagtgaaccacctcaaagccaatgttaagtcagctgcagacttgattagcctgcctaccactgtagagggacttcagaagagtgtagcttccattggcaatactttaaacagcgtccatcttgctgtggaagcactacagaaaactgtggatgaacacaagaaaacgatggaattactgcagagtgatatgaatcagcacttcttgaaggagactcctggaagcaaccagatcattccgtcaccttcagccacatcagaacttgacaataaaacccacagtgagaatttgaaacaggatatcctgtaccttcacaactctttagaggaggtaaacagtgccctagtggggtaccagagacagaatgatcttaaactcgagggaatgaacgagacagtcagtaatcttacccagagagtcaacctgatagaaagcgatgtggttgctatgagcaaggtagaaaagaaagcaaacctgtccttcagcatgatgggtgatagatctgccactctgaaaagacagtctttggatcaagtcaccaacagaacagatacagtaaaaatccaaagcataaagaaagaagatagttcaaattctcaggtatccaagctaagagagaaactccagctgatcagtgctcttacaaacaaacctgagagcaacaggcctccagagaccgccgatgaagagcaagtagagagtttcacatcaaagccatcagcattgccaaaattttcacagtttcttggagacccagttgagaaagctgcccaactaagacctatctccctaccaggagtttctagcactgaaggtaaatttttataccacggggtagtaatgggaatgttcaaagtaataactttttaatgttattttcacttgtcaaaa

SEQ ID NO: 361624 - DNA, 1749 bp, Homo sapiens
ggagtgcggcttactggcaggcggcgcaggcggccgctgccaaaggggaagtgatctggggctggagcgatggcccggggctggagctcgcggccgccgccgccgcagccgccgccaccaacgccaacaacaacgtgtcgggagcagccgcggccgaagccggagcaggggccggagtcgcggctggagtggggcctgcgcgtgtgagtggccgagagttgcccgtgccggagacctcaaactccgggcgggagcgctttcggtcggccgagccgccgtcgcccgcggcaccgtgtccccaaggcccagacagcggggcgggggtctatcaggcgcgggactggcttctctcaggccgacccttctagccgggctccggatcttcctcggcctcgggcccccttcacgttcaggacggaggccggagaacggtgatcatcacacaccccagccggcttcctggccagggcattttctctgcggccaagcagtgttgggattgtagctgctgggagccccctcctgccgccacctctcctgcaaggaagggactgacgcgttcccactttcttactctgcacctccccactctcttcccattcaagaacgagtttctcttccctctccattggaaatcctgctccggaggtccaaaacacgtattttaagcgtgcccttcctcacctcctggagcacccttagaagtattgcctacttatccgggctgagaatccttcatttttgacctggcttttttttcgccctttgggagataaaggtccctctccaccctctactaacactctgcacccaaggccttatcctttggggtcaccagctccttggccatttctatgtgatttcccccacccatctgagttccagtttcctctgggctccaatctccagtccctggcggatctggtcagtcccacccctaggtgggagtgaccagggggctctggcccaggattcccaaccctggaaggcagctccaaggcaggaagagaattgggcatcgggtacgaacctggcagctcaggagtcggggctccactcaccccacacaaaaagatgaaaaagcgcaaagagctcaatgcattgattggtttggctggggacagccggagaaagaagcccaagaaaggcccaagcagtcaccgcctgcttcgcactgagcctcccgactcagactctgagtccagctccgaagaggaagaggaattcggtgtggttggaaatcgctctcgctttgccaagtgagtagtggtgaaaggtggaatgggaagaaggcatctccttgcactaccaaggggccacattgacaggaaggagaaaggaagtccttaggaagaaaaaagggtgtaggccttggaagtcaaagagggaaaaacggttttagggagaaggtaagttcagatcctgaatgaagaataagttagagatctgtctttaggtgtagaaagaaaagctccaaatctgaggtggaaatgtggacttggagaatgtgccaagagcccagggagtcctaaagaagcaaagaatggagacagaggagcagagaagctttggggactagactttttaaaacagtgtagaacaaaggagaagcagagactttaagactgcagattatttcgtttttgcactcttgatgagtctgaatattggtggtggggaaatatggtgagagatatactgtaggaagtatgagccttgagagtaggtggggtcggggggcaaaagaag

SEQ ID NO: 361625 - DNA, 475 bp, Homo sapiens
cttcctttctctctcagctctccgtctctctttctctctcagcctctttctttctccctgtctcccccactgtcagcacctcttctgtgtggtgagtggaccgcttaccccactaggtgaagatgtcagcccaggagagctgcctcagcctcatcaagtacttcctcttcgttttcaacctcttcttcttccctcggcagcctgatcttattttttaaaaacaaaaacagaaaaaaaaaaccactgtctgtggtctaggtattctacagaatccaaaagttgtccaagtgtgataggaatgctcaattgaaaccaatgaaggacttctatctgccctaggatataatggaaagttctattaaaattagtagaccatttaaaaacacctgataactctgtatttgacaaaaagcccccactgcaagtactgacacattcctatcaaatagttaggatttactaatttatgaggcag

SEQ ID NO: 361626 - DNA, 1244 bp, Homo sapiens
cttcctttctctctcagctctccgtctctctttctctctcagcctctttctttctccctgtctcccccactgtcagcacctcttctgtgtggtgagtggaccgcttaccccactaggtgaagatgtcagcccaggagagctgcctcagcctcatcaagtacttcctcttcgttttcaacctcttcttcttcgtcctcggcagcctgatcttctgcttcggcatctggatcctcatcgacaagaccagcttcgtgtcctttgtgggcttggccttcgtgcctctgcagatctggtccaaagtcctggccatctcaggaatcttcaccatgggcatcgccctcctgggttgtgtgggggccctcaaggagctccgctgcctcctgggcctgtattttgggatgctgctgctcctgtttgccacacagatcaccctgggaatcctcatctccactcagcgggcccagctggagcgaagcttgcgggacgtcgtagagaaaaccatccaaaagtacggcaccaaccccgaggagaccgcggccgaggagagctgggactatgtgcagttccagctgcgctgctgcggctggcactacccgcaggactggttccaagtcctcatcctgagaggtaacgggtcggaggcgcaccgcgtgccctgctcctgctacaacttgtcggcgaccaacgactccacaatcctagataaggtgatcttgccccagctcagcaggcttggacacctggcgcggtccagacacagtgcagacatctgcgctgtccctgcagagagccacatctaccgcgagggctgcgcgcagggcctccagaagtggctgcacaacaaccttatttccatagtgggcatttgcctgggcgtcggcctactcgagctcgggttcatgacgctctcgatattcctgtgcagaaacctggaccacgtctacaaccggctcgctcgataccgttaggccccgccctccccaaagtcccgccccgcccccgtcacgtgcgctgggcacttccctgctgcctgtaaatatttgtttaatccccagttcgcctggagccctccgccttcacattcccctggggacccacgtggctgcgtgcccctgctgctgtcacctctcccacgggacctggggctttcgtccacagcttcctgtccccatctgtcggcctaccaccacccacaagattatttttcacccaaacctcaaataaatcccctgcgtttttggtaa

SEQ ID NO: 361627 - DNA, 1546 bp, Homo sapiens
  misc_feature (1253)..(1253): n is a, c, g, or t
cttcctttctctctcagctctccgtctctctttctctctcagcctctttctttctccctgtctcccccactgtcagcacctcttctgtgtggtgagtggaccgcttaccccactaggtgaagatgtcagcccaggagagctgcctcagcctcatcaagtacttcctcttcgttttcaacctcttcttcttcgtcctcggcagcctgatcttctgcttcggcatctggatcctcatcgacaagaccagcttcgtgtcctttgtgggcttggccttcgtgcctctgcagatctggtccaaagtcctggccatctcaggaatcttcaccatgggcatcgccctcctgggttgtgtgggggccctcaaggagctccgctgcctcctgggcctgtattttgggatgctgctgctcctgtttgccacacagatcaccctgggaatcctcatctccactcagcgggcccagctggagcgaagcttgcgggacgtcgtagagaaaaccatccaaaagtacggcaccaaccccgaggagaccgcggccgaggagagctgggactatgtgcagttccagctgcgctgctgcggctggcactacccgcaggactggttccaagtcctcatcctgagaggtaacgggtcggaggcgcaccgcgtgccctgctcctgctacaacttgtcggcgaccaacgactccacaatcctagataaggtgatcttgccccagctcagcaggcttggacacctggcgcggtccagacacagtgcagacatctgcgctgtccctgcagagagccacatctaccgcgagggctgcgcgcagggcctccagaagtggctgcacaacaaccttatttccatagtgggcatttgcctgggcgtcggcctactcgagctcgggttcatgacgctctcgatattcctgtgcagaaacctggaccacgtctacaaccggctcgctcgataccgttaggccccgccctccccaaagtcccgccccgcccccgtcacgtgcgctgggcacttccctgctgcctgtaaatatttgtttaatccccagttcgcctggagccctccgccttcacattcccctggggacccacgtggctgcgtgcccctgctgctgtcacctctcccacgggacctggggctttcgtccacagcttcctgtccccatctgtcggcctaccaccacccacaagattatttttcacccaaacctcaaataaatcccctgcgtttttggtaaaaaaaaaanaaaatgagactgagttctatattctggggagttaatggggttgcctcccagcttcttataagactcacagtataactaaacatgatatatcagcttttgcctttcaatttatcaatctcttaaagagaatccaactctattacgatttgtatatgatcaaacttccatatttgccttgggaataatggacaaagggaaatactcttaattccatgaataaaaactttgcagaaaaattaacagtggttaattttcgaaaacttccctttttagacagtagataccacccactt

SEQ ID NO: 361628 - DNA, 1420 bp, Homo sapiens
cttcctttctctctcagctctccgtctctctttctctctcagcctctttctttctccctgtctcccccactgtcagcacctcttctgtgtggtgagtggaccgcttaccccactaggtgaagatgtcagcccaggagagctgcctcagcctcatcaagtacttcctcttcgttttcaacctcttcttcttcgtcctcggcagcctgatcttctgcttcggcatctggatcctcatcgacaagaccagcttcgtgtcctttgtgggcttggccttcgtgcctctgcagatctggtccaaagtcctggccatctcaggaatcttcaccatgggcatcgccctcctgggttgtgtgggggccctcaaggagctccgctgcctcctgggcctgtattttgggatgctgctgctcctgtttgccacacagatcaccctgggaatcctcatctccactcagcgggcccagctggagcgaagcttgcgggacgtcgtagagaaaaccatccaaaagtacggcaccaaccccgaggagaccgcggccgaggagagctgggactatgtgcagttccagctgcgctgctgcggctggcactacccgcaggactggttccaagtcctcatcctgagaggtaacgggtcggaggcgcaccgcgtgccctgctcctgctacaacttgtcggcgaccaacgactccacaatcctagataaggtgatcttgccccagctcagcaggcttggacacctggcgcggtccagacacagtgcagacatctgcgctgtccctgcagagagccacatctaccgcgagggctgcgcgcagggcctccagaagtggctgcacaacaaccttatttccatagtgggcatttgcctgggcgtcggcctactcgagctcgggttcatgacgctctcgatattcctgtgcagaaacctggaccacgtctacaaccggctcgctcgataccgttaggccccgccctccccaaagtcccgccccgcccccgtcacgtgcgctgggcacttccctgctgcctgtaaatatttgtttaatccccagttcgcctggagccctccgccttcacattcccctggggacccacgtggctgcgtgcccctgctgctgtcacctctcccacgggacctggggctttcgtccacagcttcctgtccccatctgtcggcctaccaccacccacaagattatttttcacccaaacctcaaataaatcccctgcgtttttggtaaaatagctttatcctctgtcagaacacaaacaaacaaactttgagaggggaggaaggaaaccgtctagctcagggctcacttaggagagggatgagattagaaagttcaacacactgcttgtgcagcggagataaagtcaagaccctagcacccacttataaatatctcgttatatt

SEQ ID NO: 361629 - DNA, 1563 bp, Homo sapiens
cttcctttctctctcagctctccgtctctctttctctctcagcctctttctttctccctgtctcccccactgtcagcacctcttctgtgtggtgagtggaccgcttaccccactaggtgaagatgtcagcccaggagagctgcctcagcctcatcaagtacttcctcttcgttttcaacctcttcttcttcgtcctcggcagcctgatcttctgcttcggcatctggatcctcatcgacaagaccagcttcgtgtcctttgtgggcttggccttcgtgcctctgcagatctggtccaaagtcctggccatctcaggaatcttcaccatgggcatcgccctcctgggttgtgtgggggccctcaaggagctccgctgcctcctgggcctgtattttgggatgctgctgctcctgtttgccacacagatcaccctgggaatcctcatctccactcagcgggcccagctggagcgaagcttgcgggacgtcgtagagaaaaccatccaaaagtacggcaccaaccccgaggagaccgcggccgaggagagctgggactatgtgcagttccagctgcgctgctgcggctggcactacccgcaggactggttccaagtcctcatcctgagaggtaacgggtcggaggcgcaccgcgtgccctgctcctgctacaacttgtcggcgaccaacgactccacaatcctagataaggtgatcttgccccagctcagcaggcttggacacctggcgcggtccagacacagtgcagacatctgcgctgtccctgcagagagccacatctaccgcgagggctgcgcgcagggcctccagaagtggctgcacaacaaccttatttccatagtgggcatttgcctgggcgtcggcctactcgagctcgggttcatgacgctctcgatattcctgtgcagaaacctggaccacgtctacaaccggctcgctcgataccgttaggccccgccctccccaaagtcccgccccgcccccgtcacgtgcgctgggcacttccctgctgcctgtaaatatttgtttaatccccagttcgcctggagccctccgccttcacattcccctggggacccacgtggctgcgtgcccctgctgctgtcacctctcccacgggacctggggctttcgtccacagcttcctgtccccatctgtcggcctaccaccacccacaagattatttttcacccaaacctcaaataaatcccctgcgtttttggtaaaaaaaaacaaacaaaacagcgaagacatcgactcagatgaacggacacgaaaaacacacggagggcactactcgcgggggcggcgaacagaagatgaaaccgagaggccagcgctcaatggatcgtgcacccgaccagttggtaaggacagtaaacaggggcccccccaaagaggggcttgtaaagcaagcaggggacgcttcgagagtagcacaacgccaccgacaagatcacagccgaggacccatgcgagccacgcatcacagcagtacacaacgagagcacaaaccaagaagccaaacacagtcagcctgtctca

SEQ ID NO: 361630 - DNA, 1155 bp, Homo sapiens
cttcctttctctctcagctctccgtctctctttctctctcagcctctttctttctccctgtctcccccactgtcagcacctcttctgtgtggtgagtggaccgcttaccccactaggtgaagatgtcagcccaggagagctgcctcagcctcatcaagtacttcctcttcgttttcaacctcttcttcttcgtcctcggcagcctgatcttctgcttcggcatctggatcctcatcgacaagaccagcttcgtgtcctttgtgggcttggccttcgtgcctctgcagatctggtccaaagtcctggccatctcaggaatcttcaccatgggcatcgccctcctgggttgtgtgggggccctcaaggagctccgctgcctcctgggcctgtattttgggatgctgctgctcctgtttgccacacagatcaccctgggaatcctcatctccactcagcgggcccagctggagcgaagcttgcgggacgtcgtagagaaaaccatccaaaagtacggcaccaaccccgaggagaccgcggccgaggagagctgggactatgtgcagttccagctgcgctgctgcggctggcactacccgcaggactggttccaagtcctcatcctgagaggtaacgggtcggaggcgcaccgcgtgccctgctcctgctacaacttgtcggcgaccaacgactccacaatcctagataaggtgatcttgccccagctcagcaggcttggacacctggcgcggtccagacacagtgcagacatctgcgctgtccctgcagagagccacatctaccgcgagggctgcgcgcagggcctccagaagtggctgcacaacaaccttatttccatagtgggcatttgcctgggcgtcggcctactcgagctcgggttcatgacgctctcgatattcctgtgcagaaacctggaccacgtctacaaccggctcgctcgataccgttaggccccgccctccccaaagtcccgccccgcccccgtcacgtgcgctgggcacttccctgctgctgtcacctctcccacgggacctggggctttcgtccacagcttcctgtccccatctgtcggcctaccaccacccacaagattatttttcacccaaacctcaaataaatcccctgcgtttttggtaa

SEQ ID NO: 361631 - DNA, 2080 bp, Homo sapiens
cttcctttctctctcagctctccgtctctctttctctctcagcctctttctttctccctgtctcccccactgtcagcacctcttctgtgtggtgagtggaccgcttaccccactaggtgaagatgtcagcccaggagagctgcctcagcctcatcaagtacttcctcttcgttttcaacctcttcttcttcgtcctcggcagcctgatcttctgcttcggcatctggatcctcatcgacaagaccagcttcgtgtcctttgtgggcttggccttcgtgcctctgcagatctggtccaaagtcctggccatctcaggaatcttcaccatgggcatcgccctcctgggttgtgtgggggccctcaaggagctccgctgcctcctgggcctgtattttgggatgctgctgctcctgtttgccacacagatcaccctgggaatcctcatctccactcagcgggcccagctggagcgaagcttgcgggacgtcgtagagaaaaccatccaaaagtacggcaccaaccccgaggagaccgcggccgaggagagctgggactatgtgcagttccagctgcgctgctgcggctggcactacccgcaggactggttccaagtcctcatcctgagaggtaacgggtcggaggcgcaccgcgtgccctgctcctgctacaacttgtcggcgaccaacgactccacaatcctagataaggtgatcttgccccagctcagcaggcttggacacctggcgcggtccagacacagtgcagacatctgcgctgtccctgcagagagccacatctaccgcgagggctgcgcgcagggcctccagaagtggctgcacaacaaccttatttccatagtgggcatttgcctgggcgtcggcctactcgaggtgatctggccccgcccccacccggaacgggcctaaatccctagatggccctgcccttcatttcgcgtccttcggttgcctgggaaggacgagctcagggcggagcgcagcccaccccggccctcccgccgctccacccagcaccggagggtaggggcggcccagcttcagggagccctgattgggtgtacgcagggaaagcctcctgctattggctgcgatctccctcccctttctccgcagatgactgtcatggtgctgagcgtacagctacagcgcagggcactccgccggaaatgcgagccgcacgtgccgggcgctggggattcgagccccgggcccagcctgatcgctgacggcggcggcgggcacagcggcagtctgtggggtggctggggcatggcgggtgcctgccccaactggggagacaaggcaccgcagggcaagctgcccatggccctggggctctggccgctgtgggttcaagacgaggaccagcctgacactggaagtgcgggcgcagaattagaggaggcacaattagaggctgaggcagagggggaagacagatgagcctccaaaataaaggaccctgggcttgcttccgaccttactccttctcagcctctacccccacttgtagcagctattcccgcctcatcagccagccctgcggcagttcccgtcgagccccgcccttttctacctatccccttctccagccccttcccgcccaattcacggccccacccctgacctttctcgcccgggtgggcatcacccccgtctcgccagcaccccttcgacttctctgacctcatctcctttctctatagctcgggttcatgacgctctcgatattcctgtgcagaaacctggaccacgtctacaaccggctcgctcgataccgttaggccccgccctccccaaagtcccgccccgcccccgtcacgtgcgctgggcacttccctgctgcctgtaaatatttgtttaatccccagttcgcctggagccctccgccttcacattcccctggggacccacgtggctgcgtgcccctgctgctgtcacctctcccacgggacctggggctttcgtccacagcttcctgtccccatctgtcggcctaccaccacccacaagattatttttcacccaaacctcaaataaatcccctgcgtttttggtaa

SEQ ID NO: 361632 - DNA, 2602 bp, Homo sapiens
cttcctttctctctcagctctccgtctctctttctctctcagcctctttctttctccctgtctcccccactgtcagcacctcttctgtgtggtgagtggaccgcttaccccactaggtgaagatgtcagcccaggagagctgcctcagcctcatcaagtcctcggcagcctgatcttctgcttcggcatctggatcctcatcgacaagaccagcttcgtgtcctttgtgggcttggccttcgtgcctctgcagatctggtccaaagtcctggccatctcaggaatcttcaccatgggcatcgccctcctgggttgtgtgggggccctcaaggagctccgctgcctcctgggcctgtattttgggatgctgctgctcctgtttgccacacagatcaccctgggaatcctcatctccactcagcgggcccagctggagcgaagcttgcgggacgtcgtagagaaaaccatccaaaagtacggcaccaaccccgaggagaccgcggccgaggagagctgggactatgtgcagttccagctgcgctgctgcggctggcactacccgcaggactggttccaagtcctcatcctgagaggtaacgggtcggaggcgcaccgcgtgccctgctcctgctacaacttgtcggcgaccaacgactccacaatcctagataaggtgatcttgccccagctcagcaggcttggacacctggcgcggtccagacacagtgcagacatctgcgctgtccctgcagagagccacatctaccgcgagggctgcgcgcagggcctccagaagtggctgcacaacaaccttatttccatagtgggcatttgcctgggcgtcggcctactcgagatgactgtcatggtgctgagcgtacagctacagcgcagggcactccgccggaaatgcgagccgcacgtgccgggcgctggggattcgagccccgggcccagcctgatcgctgacggcggcggcgggcacagcggcagtctgtggggtggctggggcatggcgggtgcctgccccaactggggagacaaggcaccgcagggcaagctgcccatggccctggggctctggccgctgtgggttcaagacgaggaccagcctgacactggaagtgcgggcgcagaattagaggaggcacaattagaggctgaggcagagggggaagacagatgagcctccaaaataaaggaccctgggcttgcttccgaccttactccttctcagcctctacccccacttgtagcagctattcccgcctcatcagccagccctgcggcagttcccgtcgagccccgcccttttctacctatccccttctccagccccttcccgcccaattcacggccccacccctgacctttctcgcccgggtgggcatcacccccgtctcgccagcaccccttcgacttctctgacctcatctcctttctctatagctcgggttcatgacgctctcgatattcctgtgcagaaacctggaccacgtctacaaccggctcgctcgataccgttaggccccgccctccccaaagtcccgccccgcccccgtcacgtgcgctgggcacttccctgctgcctgtaaatatttgtttaatccccagttcgcctggagccctccgccttcacattcccctggggacccacgtggctgcgtgcccctgctgctgtcacctctcccacgggacctggggctttcgtccacagcttcctgtccccatctgtcggcctaccaccacccacaagattatttttcacccaaacctcaaataaatcccctgcgtttttggtaaaatagctttatcctctgtcagaacacaaacaaacaaactttgagaggggaggaaggaaaccgtctagctcagggctcacttaggagagggatgagattagaaagttcaacacactgcttgtgcagcggagataaagtcaagaccctagcacccacttataaatatctcgttatattaaaaaaaaaaaaaatgtccagggcccacctggctctgctcctgcacagaaagggttcatcttcactttgtgatctcacaggtcatggagtgagggtggtagagaggggcagaaatttcagggggaggggtggctgggaaaaagtaaaggggacaagccaatgtgtaactagcgctctccaagacatgcagaggagtgggggtggcctgtcaggggctgaaaagaaaagccagtgctgtacctggggggttgtctcactcctgtccccacaatccctgatactccggagtgatctgtcctttcagacacccactgtgaggtcccaatatcggggtttatcctttcctcagtcccagcctgttcagctctccaaccaagttttgggggcccctctaatgggggggatggccccagttgcttaggcctctgaggtcaacccctttacatcacagccctctccccaaataagaagcatgaggtgagctggaggaccctccctgggaggagggtgttctggggggtgagccagttttggggtcccccttcagtccctgaccaggcggtaaatgtgatgctgggccccacgctcgctggtggagactcgaagacataggcggtgcagag

SEQ ID NO: 361633 - DNA, 157 bp, Homo sapiens
tcatcgacaagaccagcttcgtgtcctttgtgggtgaggggggctggggcaggtgggagggcctcccccaacccaagcaacttcctggggtctcccttgtctcagggagacctacggtgccctactctgcaggcaggctacaggctcccatccactg

SEQ ID NO: 361634 - DNA, 2043 bp, Homo sapiens
cttcctttctctctcagctctccgtctctctttctctctcagcctctttctttctccctgtctcccccactgtcagcacctcttctgtgtggtgagtggaccgcttaccccactaggtgaagatgtcagcccaggagagctgcctcagcctcatcaagtacttcctcttcgttttcaacctcttcttcttcgtcctcggcagcctgatcttctgcttcggcatctggatcctcatcgacaagaccagcttcgtgtcctttgtgggcttggccttcgtgcctctgcagatctggtccaaagtcctggccatctcaggaatcttcaccatgggcatcgccctcctgggttgtgtgggggccctcaaggagctccgctgcctcctgggcctgtattttgggatgctgctgctcctgtttgccacacagatcaccctgggaatcctcatctccactcagcgggcccagctggagcgaagcttgcgggacgtcgtagagaaaaccatccaaaagtacggcaccaaccccgaggagaccgcggccgaggagagctgggactatgtgcagttccagctgcgctgctgcggctggcactacccgcaggactggttccaagtcctcatcctgagaggtaacgggtcggaggcgcaccgcgtgccctgctcctgctacaacttgtcggcgaccaacgactccacaatcctagataaggtgatcttgccccagctcagcaggcttggacacctggcgcggtccagacacagtgcagacatctgcgctgtccctgcagagagccacatctaccgcgagggctgcgcgcagggcctccagaagtggctgcacaacaaccttatttccatagtgggcatttgcctgggcgtcggcctactcgagctcgggttcatgacgctctcgatattcctgtgcagaaacctggaccacgtctacaaccggctcgctcgataccgttaggccccgccctccccaaagtcccgccccgcccccgtcacgtgcgctgggcacttccctgctgcctgtaaatatttgtttaatccccagttcgcctggagccctccgccttcacattcccctggggacccacgtggctgcgtgcccctgctgctgtcacctctcccacgggacctggggctttcgtccacagcttcctgtccccatctgtcggcctaccaccacccacaagattatttttcacccaaacctcaaataaatcccctgcgtttttggtaaaatagctttatcctctgtcagaacacaaacaaacaaactttgagaggggaggaaggaaaccgtctagctcagggctcacttaggagagggatgagattagaaagttcaacacactgcttgtgcagcggagataaagtcaagaccctagcacccacttataaatatctcgttatattaaaaaaaaaaaaaatgtccagggcccacctggctctgctcctgcacagaaagggttcatcttcactttgtgatctcacaggtcatggagtgagggtggtagagaggggcagaaatttcagggggaggggtggctgggaaaaagtaaaggggacaagccaatgtgtaactagcgctctccaagacatgcagaggagtgggggtggcctgtcaggggctgaaaagaaaagccagtgctgtacctggggggttgtctcactcctgtccccacaatccctgatactccggagtgatctgtcctttcagacacccactgtgaggtcccaatatcggggtttatcctttcctcagtcccagcctgttcagctctccaaccaagttttgggggcccctctaatgggggggatggccccagttgcttaggcctctgaggtcaacccctttacatcacagccctctccccaaataagaagcatgaggtgagctggaggaccctccctgggaggagggtgttctggggggtgagccagttttggggtcccccttcagtccctgaccaggcggtaaatgtgatgctgggccccacgctcgctggtggagactcgaagacataggcggtgcagag

SEQ ID NO: 361635 - DNA, 1738 bp, Homo sapiens
cttcctttctctctcagctctccgtctctctttctctctcagcctctttctttctccctgtctcccccactgtcagcacctcttctgtgtggtgagtggaccgcttaccccactaggtgaagatgtcagcccaggagagctgcctcagcctcatcaagtacttcctcttcgttttcaacctcttcttcttcgtcctcggcagcctgatcttctgcttcggcatctggatcctcatcgacaagaccagcttcgtgtcctttgtgggcttggccttcgtgcctctgcagatctggtccaaagtcctggccatctcaggaatcttcaccatgggcatcgccctcctgggttgtgtgggggccctcaaggagctccgctgcctcctgggcctgtattttgggatgctgctgctcctgtttgccacacagatcaccctgggaatcctcatctccactcagcgggcccagctggagcgaagcttgcgggacgtcgtagagaaaaccatccaaaagtacggcaccaaccccgaggagaccgcggccgaggagagctgggactatgtgcagttccagctgcgctgctgcggctggcactacccgcaggactggttccaagtcctcatcctgagaggtaacgggtcggaggcgcaccgcgtgccctgctcctgctacaacttgtcggcgaccaacgactccacaatcctagataaggtgatcttgccccagctcagcaggcttggacacctggcgcggtccagacacagtgcagacatctgcgctgtccctgcagagagccacatctaccgcgagggctgcgcgcagggcctccagaagtggctgcacaacaaccttatttccatagtgggcatttgcctgggcgtcggcctactcgagctcgggttcatgacgctctcgatattcctgtgcagaaacctggaccacgtctacaaccggctcgctcgataccgttaggccccgccctccccaaagtcccgccccgcccccgtcacgtgcgctgggcacttccctgctgcctgtaaatatttgtttaatccccagttcgcctggagccctccgccttcacattcccctggggacccacgtggctgcgtgcccctgctgctgtcacctctcccacgggacctggggctttcgtccacagcttcctgtccccatctgtcggcctaccaccacccacaagattatttttcacccaaacctcaaataaatcccctgcgtttttggtaaaatagctttatcctctgtcagaacacaaacaaacaaactttgagaggggaggaaggaaaccgtctagctcagggctcacttaggagagggatgagattagaaagttcaacacactgcttgtgcagcggagataaagtcaagaccctagcacccacttataaatatctcgttatattaaaaaaaaaaaaaatgtccagggcccacctggctctgctcctgcacagaaagggttcatcttcactttgtgatctcacaggtcatggagtgagggtggtagagaggggcagaaatttcagggggaggggtggctgggaaaaagtaaaggggacaagccaatgtgtaactagcgctctccaagacatgtgttccaggctctcatactggctgctcactccgtagaagccaccactgctgatgctgccaccggcccctgcctcctcaccacttgggccccagttcaggtccgcccagaacttgaccaggaagaaggcatg

SEQ ID NO: 361636 - DNA, 2879 bp, Homo sapiens
cttcctttctctctcagctctccgtctctctttctctctcagcctctttctttctccctgtctcccccactgtcagcacctcttctgtgtggtgagtggaccgcttaccccactaggtgaagatgtcagcccaggagagctgcctcagcctcatcaagtacttcctcttcgttttcaacctcttcttcttcgtcctcggcagcctgatcttctgcttcggcatctggatcctcatcgacaagaccagcttcgtgtcctttgtgggcttggccttcgtgcctctgcagatctggtccaaagtcctggccatctcaggaatcttcaccatgggcatcgccctcctgggttgtgtgggggccctcaaggagctccgctgcctcctgggcctgtattttgggatgctgctgctcctgtttgccacacagatcaccctgggaatcctcatctccactcagcgggcccagctggagcgaagcttgcgggacgtcgtagagaaaaccatccaaaagtacggcaccaaccccgaggagaccgcggccgaggagagctgggactatgtgcagttccagctgcgctgctgcggctggcactacccgcaggactggttccaagtcctcatcctgagaggtaacgggtcggaggcgcaccgcgtgccctgctcctgctacaacttgtcggcgaccaacgactccacaatcctagataaggtgatcttgccccagctcagcaggcttggacacctggcgcggtccagacacagtgcagacatctgcgctgtccctgcagagagccacatctaccgcgagggctgcgcgcagggcctccagaagtggctgcacaacaaccttatttccatagtgggcatttgcctgggcgtcggcctactcgaggtgatctggccccgcccccacccggaacgggcctaaatccctagatggccctgcccttcatttcgcgtccttcggttgcctgggaaggacgagctcagggcggagcgcagcccaccccggccctcccgccgctccacccagcaccggagggtaggggcggcccagcttcagggagccctgattgggtgtacgcagggaaagcctcctgctattggctgcgatctccctcccctttctccgcagatgactgtcatggtgctgagcgtacagctacagcgcagggcactccgccggaaatgcgagccgcacgtgccgggcgctggggattcgagccccgggcccagcctgatcgctgacggcggcggcgggcacagcggcagtctgtggggtggctggggcatggcgggtgcctgccccaactggggagacaaggcaccgcagggcaagctgcccatggccctggggctctggccgctgtgggttcaagacgaggaccagcctgacactggaagtgcgggcgcagaattagaggaggcacaattagaggctgaggcagagggggaagacagatgagcctccaaaataaaggaccctgggcttgcttccgaccttactccttctcagcctctacccccacttgtagcagctattcccgcctcatcagccagccctgcggcagttcccgtcgagccccgcccttttctacctatccccttctccagccccttcccgcccaattcacggccccacccctgacctttctcgcccgggtgggcatcacccccgtctcgccagcaccccttcgacttctctgacctcatctcctttctctatagctcgggttcatgacgctctcgatattcctgtgcagaaacctggaccacgtctacaaccggctcgctcgataccgttaggccccgccctccccaaagtcccgccccgcccccgtcacgtgcgctgggcacttccctgctgcctgtaaatatttgtttaatccccagttcgcctggagccctccgccttcacattcccctggggacccacgtggctgcgtgcccctgctgctgtcacctctcccacgggacctggggctttcgtccacagcttcctgtccccatctgtcggcctaccaccacccacaagattatttttcacccaaacctcaaataaatcccctgcgtttttggtaaaatagctttatcctctgtcagaacacaaacaaacaaactttgagaggggaggaaggaaaccgtctagctcagggctcacttaggagagggatgagattagaaagttcaacacactgcttgtgcagcggagataaagtcaagaccctagcacccacttataaatatctcgttatattaaaaaaaaaaaaaatgtccagggcccacctggctctgctcctgcacagaaagggttcatcttcactttgtgatctcacaggtcatggagtgagggtggtagagaggggcagaaatttcagggggaggggtggctgggaaaaagtaaaggggacaagccaatgtgtaactagcgctctccaagacatgcagaggagtgggggtggcctgtcaggggctgaaaagaaaagccagtgctgtacctggggggttgtctcactcctgtccccacaatccctgatactccggagtgatctgtcctttcagacacccactgtgaggtcccaatatcggggtttatcctttcctcagtcccagcctgttcagctctccaaccaagttttgggggcccctctaatgggggggatggccccagttgcttaggcctctgaggtcaacccctttacatcacagccctctccccaaataagaagcatgaggtgagctggaggaccctccctgggaggagggtgttctggggggtgagccagttttggggtcccccttcagtccctgaccaggcggtaaatgtgatgctgggccccacgctcgctggtggagactcgaagacataggcggtgcagag

SEQ ID NO: 361637 - DNA, 1210 bp, Homo sapiens
cttcctttctctctcagctctccgtctctctttctctctcagcctctttctttctccctgtctcccccactgtcagcacctcttctgtgtggtgagtggaccgcttaccccactaggtgaagatgtcagcccaggagagctgcctcagcctcatcaagtcctcggcagcctgatcttctgcttcggcatctggatcctcatcgacaagaccagcttcgtgtcctttgtgggcttggccttcgtgcctctgcagatctggtccaaagtcctggccatctcaggaatcttcaccatgggcatcgccctcctgggttgtgtgggggccctcaaggagctccgctgcctcctgggcctgtattttgggatgctgctgctcctgtttgccacacagatcaccctgggaatcctcatctccactcagcgggcccagctggagcgaagcttgcgggacgtcgtagagaaaaccatccaaaagtacggcaccaaccccgaggagaccgcggccgaggagagctgggactatgtgcagttccagctgcgctgctgcggctggcactacccgcaggactggttccaagtcctcatcctgagaggtaacgggtcggaggcgcaccgcgtgccctgctcctgctacaacttgtcggcgaccaacgactccacaatcctagataaggtgatcttgccccagctcagcaggcttggacacctggcgcggtccagacacagtgcagacatctgcgctgtccctgcagagagccacatctaccgcgagggctgcgcgcagggcctccagaagtggctgcacaacaaccttatttccatagtgggcatttgcctgggcgtcggcctactcgagctcgggttcatgacgctctcgatattcctgtgcagaaacctggaccacgtctacaaccggctcgctcgataccgttaggccccgccctccccaaagtcccgccccgcccccgtcacgtgcgctgggcacttccctgctgcctgtaaatatttgtttaatccccagttcgcctggagccctccgccttcacattcccctggggacccacgtggctgcgtgcccctgctgctgtcacctctcccacgggacctggggctttcgtccacagcttcctgtccccatctgtcggcctaccaccacccacaagattatttttcacccaaacctcaaataaatcccctgcgtttttggtaa

SEQ ID NO: 361638 - DNA, 1160 bp, Homo sapiens
cttcctttctctctcagctctccgtctctctttctctctcagcctctttctttctccctgtctcccccactgtcagcacctcttctgtgtggtgagtggaccgcttaccccactaggtgaagatgtcagcccaggagagctgcctcagcctcatcaagtacttcctcttcgttttcaacctcttcttcttcgtcctcggcagcctgatcttctgcttcggcatctggatcctcatcgacaagaccagcttcgtgtcctttgtgggcttggccttcgtgcctctgcagatctggtccaaagtcctggccatctcaggaatcttcaccatgggcatcgccctcctgggttgtgtgggggccctcaaggagctccgctgcctcctgggcctgtattttgggatgctgctgctcctgtttgccacacagatcaccctgggaatcctcatctccactcagcgggcccagctggagcgaagcttgcgggacgtcgtagagaaaaccatccaaaagtacggcaccaaccccgaggagaccgcggccgaggagagctgggactatgtgcagttccagctgcgctgctgcggctggcactacccgcaggactggttccaagtcctcatcctgagaggtaacgggtcggaggcgcaccgcgtgccctgctcctgctacaacttgtcggcgaccaacgactccacaatcctagataaggtgatcttgccccagctcagcaggcttggacacctggcgcggtccagacacagtgcagacatctgcgctgtccctgcagagagccacatctaccgcgagctcgggttcatgacgctctcgatattcctgtgcagaaacctggaccacgtctacaaccggctcgctcgataccgttaggccccgccctccccaaagtcccgccccgcccccgtcacgtgcgctgggcacttccctgctgcctgtaaatatttgtttaatccccagttcgcctggagccctccgccttcacattcccctggggacccacgtggctgcgtgcccctgctgctgtcacctctcccacgggacctggggctttcgtccacagcttcctgtccccatctgtcggcctaccaccacccacaagattatttttcacccaaacctcaaataaatcccctgcgtttttggtaa

SEQ ID NO: 361639 - DNA, 2271 bp, Homo sapiens
tggaatacagatgtctagggaggggccaggcttggaaaaggtgaagcgagggtgcactagtaaggagactagagtgccctggtgactaggggagcgggtagatgcctgaagacggtgagggttggcctgaaaagaacgctgggcctgggcttgagagtcccagaaagaatccctttaacttttccctacaccccccagggctgcgcgcagggcctccagaagtggctgcacaacaaccttatttccatagtgggcatttgcctgggcgtcggcctactcgaggtgatctggccccgcccccacccggaacgggcctaaatccctagatggccctgcccttcatttcgcgtccttcggttgcctgggaaggacgagctcagggcggagcgcagcccaccccggccctcccgccgctccacccagcaccggagggtaggggcggcccagcttcagggagccctgattgggtgtacgcagggaaagcctcctgctattggctgcgatctccctcccctttctccgcagatgactgtcatggtgctgagcgtacagctacagcgcagggcactccgccggaaatgcgagccgcacgtgccgggcgctggggattcgagccccgggcccagcctgatcgctgacggcggcggcgggcacagcggcagtctgtggggtggctggggcatggcgggtgcctgccccaactggggagacaaggcaccgcagggcaagctgcccatggccctggggctctggccgctgtgggttcaagacgaggaccagcctgacactggaagtgcgggcgcagaattagaggaggcacaattagaggctgaggcagagggggaagacagatgagcctccaaaataaaggaccctgggcttgcttccgaccttactccttctcagcctctacccccacttgtagcagctattcccgcctcatcagccagccctgcggcagttcccgtcgagccccgcccttttctacctatccccttctccagccccttcccgcccaattcacggccccacccctgacctttctcgcccgggtgggcatcacccccgtctcgccagcaccccttcgacttctctgacctcatctcctttctctatagctcgggttcatgacgctctcgatattcctgtgcagaaacctggaccacgtctacaaccggctcgctcgataccgttaggccccgccctccccaaagtcccgccccgcccccgtcacgtgcgctgggcacttccctgctgcctgtaaatatttgtttaatccccagttcgcctggagccctccgccttcacattcccctggggacccacgtggctgcgtgcccctgctgctgtcacctctcccacgggacctggggctttcgtccacagcttcctgtccccatctgtcggcctaccaccacccacaagattatttttcacccaaacctcaaataaatcccctgcgtttttggtaaaatagctttatcctctgtcagaacacaaacaaacaaactttgagaggggaggaaggaaaccgtctagctcagggctcacttaggagagggatgagattagaaagttcaacacactgcttgtgcagcggagataaagtcaagaccctagcacccacttataaatatctcgttatattaaaaaaaaaaaaaatgtccagggcccacctggctctgctcctgcacagaaagggttcatcttcactttgtgatctcacaggtcatggagtgagggtggtagagaggggcagaaatttcagggggaggggtggctgggaaaaagtaaaggggacaagccaatgtgtaactagcgctctccaagacatgcagaggagtgggggtggcctgtcaggggctgaaaagaaaagccagtgctgtacctggggggttgtctcactcctgtccccacaatccctgatactccggagtgatctgtcctttcagacacccactgtgaggtcccaatatcggggtttatcctttcctcagtcccagcctgttcagctctccaaccaagttttgggggcccctctaatgggggggatggccccagttgcttaggcctctgaggtcaacccctttacatcacagccctctccccaaataagaagcatgaggtgagctggaggaccctccctgggaggagggtgttctggggggtgagccagttttggggtcccccttcagtccctgaccaggcggtaaatgtgatgctgggccccacgctcgctggtggagactcgaagacataggcggtgcagag

SEQ ID NO: 361640 - DNA, 2262 bp, Homo sapiens
ggtagtgagccggctgagaggcatggagacgcaggaacttcggggggccctggctcttctcctcctttgctttttcacatctgccagtcaggatctgcaggtaattgacctgctgactgtgggcgagtctcggcagatggtagctgtggcagagaagatccggacagccttgctcactgctggggacatctacctcttatccaccttccgcctgccccccaagcagggtggtgtcctctttggcctctattctcgccaagacaacactcgatggctggaggcctctgttgtaggcaagatcaacaaagtactggtgcgataccagcgggaggatggcaaagtccacgccgtgaacctacagcaagcgggcctggctgatgggcgcacacacacagttctcctgcgactccgaggtccctccagacccagccctgccctacatctctacgtggactgcaaactgggtgaccaacatgcaggccttccagcactggcccccattcctccagcggaggtcgatgggctggagattaggactggacagaaggcgtatttgaggatgcagggctttgtggaatctatgaaaattattctgggtgggtccatggcccgggtaggagccctgagtgagtgtccattccaaggggacgagtccatccacagtgcagtgaccaatgcactgcactccattctaggggagcagaccaaggcgctggtcacccaactcaccctcttcaaccagatcctggtggagctgcgggatgatatacgagaccaggtgaaggaaatgtccctgatccgaaacaccattatggagtgtcaggtgtgcggcttccatgagcagcgttcccactgcagccccaatccctgcttccgaggtgtggactgcatggaagtgtacgagtacccaggctaccgctgtgggccctgcccccctggcctgcagggcaacggcacccactgcagtgacatcaatgagtgtgctcacgctgacccctgtttcccgggctccagctgcatcaacaccatgcccggcttccactgtgaggcctgtcctcgagggtacaagggcacacaggtgtctggtgtgggcattgactatgcccgggccagcaaacaggtctgcaatgacatcgatgaatgcaacgatggcaacaatggtggctgtgacccaaactccatctgcaccaacactgtgggctctttcaagtgtggtccctgccgcctgggtttcctgggcaaccagagccagggctgcctcccagcccggacctgccacagcccagcccacagcccctgccacatccatgctcactgtctctttgaacgcaatggtgcagtgtcctgccagtgtaacgtgggctgggctgggaatgggaacgtgtgtgggactgacacagacatcgatggctacccagaccaagcactgccctgcatggacaacaacaaacactgcaaacaggacaactgccttttgacacccaactctgggcaggaagatgctgataatgatggtgtgggggaccagtgtgatgatgatgctgatggggatgggatcaagaatgttgaggacaactgccggctgttccccaacaaagaccagcagaactcagatacagattcatttggtgatgcctgtgacaattgccccaacgttcccaacaatgaccagaaggacacagatggcaatggggaaggagatgcctgtgacaacgacgtggatggggatggcatccccaatggattggacaattgccctaaagtccccaacccactacagacagacagggatgaggacggggtgggagatgcttgcgacagctgccctgaaatgagcaatcctacccagacagatgcagacagcgacctggtgggggatgtctgtgatactaatgaagacagtgctgattagcgatggggatgggcatcaggacaccaaggacaactgcccacagctgccaaatagctcccagctggactctgataacgatggacttggagatgagtgtgatggggatgatgacaatgatggcatcccagattatgtgcctcctggtcccgataactgccgcctggtacccaatcccaatcagaaggactcagatggcaatggcgttggtgatgtgtgtgaggatgactttgacaatgatgctgtggtcgaccccctggatgtgtgtcctgaaagtgcagaggtaacgcttacggattttctgcctatcagaccgtcgtcctgcctgagatgggatcctctagatcacctcc

SEQ ID NO: 361641 - DNA, 2369 bp, Homo sapiens
ggtagtgagccggctgagaggcatggagacgcaggaacttcggggggccctggctcttctcctcctttgctttttcacatctgccagtcaggatctgcaggtaattgacctgctgactgtgggcgagtctcggcagatggtagctgtggcagagaagatccggacagccttgctcactgctggggacatctacctcttatccaccttccgcctgccccccaagcagggtggtgtcctctttggcctctattctcgccaagacaacactcgatggctggaggcctctgttgtaggcaagatcaacaaagtactggtgcgataccagcgggaggatggcaaagtccacgccgtgaacctacagcaagcgggcctggctgatgggcgcacacacacagttctcctgcgactccgaggtccctccagacccagccctgccctacatctctacgtggactgcaaactgggtgaccaacatgcaggccttccagcactggcccccattcctccagcggaggtcgatgggctggagattaggactggacagaaggcgtatttgaggatgcagggctttgtggaatctatgaaaattattctgggtgggtccatggcccgggtaggagccctgagtgagtgtccattccaaggggacgagtccatccacagtgcagtgaccaatgcactgcactccattctaggggagcagaccaaggcgctggtcacccaactcaccctcttcaaccagatcctggtggagctgcgggatgatatacgagaccaggtgaaggaaatgtccctgatccgaaacaccattatggagtgtcaggtgtgcggcttccatgagcagcgttcccactgcagccccaatccctgcttccgaggtgtggactgcatggaagtgtacgagtacccaggctaccgctgtgggccctgcccccctggcctgcagggcaacggcacccactgcagtgacatcaatgagtgtgctcacgctgacccctgtttcccgggctccagctgcatcaacaccatgcccggcttccactgtgaggcctgtcctcgagggtacaagggcacacaggtgtctggtgtgggcattgactatgcccgggccagcaaacaggtctgcaatgacatcgatgaatgcaacgatggcaacaatggtggctgtgacccaaactccatctgcaccaacactgtgggctctttcaagtgtggtccctgccgcctgggtttcctgggcaaccagagccagggctgcctcccagcccggacctgccacagcccagcccacagcccctgccacatccatgctcactgtctctttgaacgcaatggtgcagtgtcctgccagtgtaacgtgggctgggctgggaatgggaacgtgtgtgggactgacacagacatcgatggctacccagaccaagcactgccctgcatggacaacaacaaacactgcaaacaggacaactgccttttgacacccaactctgggcaggaagatgctgataatgatggtgtgggggaccagtgtgatgatgatgctgatggggatgggatcaagaatgttgaggacaactgccggctgttccccaacaaagaccagcagaactcagatacagattcatttggtgatgcctgtgacaattgccccaacgttcccaacaatgaccagaaggacacagatggcaatggggaaggagatgcctgtgacaacgacgtggatggggatggtgcaggcctggggctgaaggggtggctgggggacctgtgagaatttggatcaggtggggatgaagcagggaagctaggaagtctctgtgaaatagggaggcaggcttgtggacgttggcctgggtgaggagagattacctgcagcagatgtcaataggaatgtgaggtagggcgtagtgttaggcagagtgtggactagagggtgagacaagaaacaggcagatttcctggccagttgtcctctgggtggggagacaaagttcgggactttcaccaactgctgattagcgatggggatgggcatcaggacaccaaggacaactgcccacagctgccaaatagctcccagctggactctgataacgatggacttggagatgagtgtgatggggatgatgacaatgatggcatcccagattatgtgcctcctggtcccgataactgccgcctggtacccaatcccaatcagaaggactcagatggcaatggcgttggtgatgtgtgtgaggatgactttgacaatgatgctgtggtcgaccccctggatgtgtgtcctgaaagtgcagaggtaacgcttacggattttctgcctatcagaccgtcgtcctgcctgagatgggatcctctagatcacctcc

SEQ ID NO: 361642 - DNA, 2305 bp, Homo sapiens
cccatccagaggtggcccacgtagcgggacagcgctgtcggcccggcgcgcctcggagtgtcacggcgcctcgtccaagtggagccccgaacccctgaaggcgcggcaggctctggagagcggggtcttgtgcgcctgggccagtaattgacctgctgactgtgggcgagtctcggcagatggtagctgtggcagagaagatccggacagccttgctcactgctggggacatctacctcttatccaccttccgcctgccccccaagcagggtggtgtcctctttggcctctattctcgccaagacaacactcgatggctggaggcctctgttgtaggcaagatcaacaaagtactggtgcgataccagcgggaggatggcaaagtccacgccgtgaacctacagcaagcgggcctggctgatgggcgcacacacacagttctcctgcgactccgaggtccctccagacccagccctgccctacatctctacgtggactgcaaactgggtgaccaacatgcaggccttccagcactggcccccattcctccagcggaggtcgatgggctggagattaggactggacagaaggcgtatttgaggatgcagggctttgtggaatctatgaaaattattctgggtgggtccatggcccgggtaggagccctgagtgagtgtccattccaaggggacgagtccatccacagtgcagtgaccaatgcactgcactccattctaggggagcagaccaaggcgctggtcacccaactcaccctcttcaaccagatcctggtggagctgcgggatgatatacgagaccaggtgaaggaaatgtccctgatccgaaacaccattatggagtgtcaggtgtgcggcttccatgagcagcgttcccactgcagccccaatccctgcttccgaggtgtggactgcatggaagtgtacgagtacccaggctaccgctgtgggccctgcccccctggcctgcagggcaacggcacccactgcagtgacatcaatgagtgtgctcacgctgacccctgtttcccgggctccagctgcatcaacaccatgcccggcttccactgtgaggcctgtcctcgagggtacaagggcacacaggtgtctggtgtgggcattgactatgcccgggccagcaaacaggtctgcaatgacatcgatgaatgcaacgatggcaacaatggtggctgtgacccaaactccatctgcaccaacactgtgggctctttcaagtgtggtccctgccgcctgggtttcctgggcaaccagagccagggctgcctcccagcccggacctgccacagcccagcccacagcccctgccacatccatgctcactgtctctttgaacgcaatggtgcagtgtcctgccagtgtaacgtgggctgggctgggaatgggaacgtgtgtgggactgacacagacatcgatggctacccagaccaagcactgccctgcatggacaacaacaaacactgcaaacaggacaactgccttttgacacccaactctgggcaggaagatgctgataatgatggtgtgggggaccagtgtgatgatgatgctgatggggatgggatcaagaatgttgaggacaactgccggctgttccccaacaaagaccagcagaactcagatacagattcatttggtgatgcctgtgacaattgccccaacgttcccaacaatgaccagaaggacacagatggcaatggggaaggagatgcctgtgacaacgacgtggatggggatggcatccccaatggattggacaattgccctaaagtccccaacccactacagacagacagggatgaggacggggtgggagatgcttgcgacagctgccctgaaatgagcaatcctacccagacagatgcagacagcgacctggtgggggatgtctgtgatactaatgaagacagtgctgattagcgatggggatgggcatcaggacaccaaggacaactgcccacagctgccaaatagctcccagctggactctgataacgatggacttggagatgagtgtgatggggatgatgacaatgatggcatcccagattatgtgcctcctggtcccgataactgccgcctggtacccaatcccaatcagaaggactcagatggcaatggcgttggtgatgtgtgtgaggatgactttgacaatgatgctgtggtcgaccccctggatgtgtgtcctgaaagtgcagaggtaacgcttacggattttctgcctatcagaccgtcgtcctgcctgagatgggatcctctagatcacctcc

SEQ ID NO: 361643 - DNA, 2125 bp, Homo sapiens
ggtagtgagccggctgagaggcatggagacgcaggaacttcggggggccctggctcttctcctcctttgctttttcacatctgccagtcaggatctgcaggtaattgacctgctgactgtgggcgagtctcggcagatggtagctgtggcagagaagatccggacagccttgctcactgctggggacatctacctcttatccaccttccgcctgccccccaagcagggtggtgtcctctttggcctctattctcgccaagacaacactcgatggctggaggcctctgttgtaggcaagatcaacaaagtactggtgcgataccagcgggaggatggcaaagtccacgccgtgaacctacagcaagcgggcctggctgatgggcgcacacacacagttctcctgcgactccgaggtccctccagacccagccctgccctacatctctacgtggactgcaaactgggtgaccaacatgcaggccttccagcactggcccccattcctccagcggaggtcgatgggctggagattaggactggacagaaggcgtatttgaggatgcagggctttgtggaatctatgaaaattattctgggtgggtccatggcccgggtaggagccctgagtgagtgtccattccaaggggacgagtccatccacagtgcagtgaccaatgcactgcactccattctaggggagcagaccaaggcgctggtcacccaactcaccctcttcaaccagatcctggtggagctgcgggatgatatacgagaccaggtgaaggaaatgtccctgatccgaaacaccattatggagtgtcaggtgtgcggcttccatgagcagcgttcccactgcagccccaatccctgcttccgaggtgtggactgcatggaagtgtacgagtacccaggctaccgctgtgggccctgcccccctggcctgcagggcaacggcacccactgcagtgacatcaatgagtgtgctcacgctgacccctgtttcccgggctccagctgcatcaacaccatgcccggcttccactgtgaggcctgtcctcgagggtacaagggcacacaggtgtctggtgtgggcattgactatgcccgggccagcaaacaggtctgcaatgacatcgatgaatgcaacgatggcaacaatggtggctgtgacccaaactccatctgcaccaacactgtgggctctttcaagtgtggtccctgccgcctgggtttcctgggcaaccagagccagggctgcctcccagcccggacctgccacagcccagcccacagcccctgccacatccatgctcactgtctctttgaacgcaatggtgcagtgtcctgccagtgtaacgtgggctgggctgggaatgggaacgtgtgtgggactgacacagacatcgatggctacccagaccaagcactgccctgcatggacaacaacaaacactgcaaacaggacaactgccttttgacacccaactctgggcaggaagatgctgataatgatggtgtgggggaccagtgtgatgatgatgctgatggggatgggatcaagaatgttgaggacaactgccggctgttccccaacaaagaccagcagaactcagatacagattcatttggtgatgcctgtgacaattgccccaacgttcccaacaatgaccagaaggacacagatggcaatggggaaggagatgcctgtgacaacgacgtggatggggatggcatccccaatggattggacaattgccctaaagtccccaacccactacagacagacagggatgaggacggggtgggagatgcttgcgacagctgccctgaaatgagcaatcctacccaggtacagggagatggtaaggacaggggagggatgagggtactgatggatgaagccccagccctttggatggaaagtggtcagatcaccctcttcagagttatcaagaggagatggtgagaacaggtccctctctctcagacagatgcagacagcgacctggtgggggatgtctgtgatactaatgaagacagcccactggcaagctgcttcttggaggtgctgaacagagacggagactcgctcgggaacccatgctggaggtcagtggcgcgttcc

SEQ ID NO: 361644 - DNA, 843 bp, Homo sapiens
ggtagtgagccggctgagaggcatggagacgcaggaacttcggggggccctggctcttctcctcctttgctttttcacatctgccagtcaggatctgcaggtaattgacctgctgactgtgggcgagtctcggcagatggtagctgtggcagagaagatccggacagccttgctcactgctggggacatctacctcttatccaccttccgcctgccccccaagcagggtggtgtcctctttggcctctattctcgccaagacaacactcgatggctggaggcctctgttgtaggcaagatcaacaaagtactggtgcgataccagcgggaggatggcaaagtccacgccgtgaacctacagcaagcgggcctggctgatgggcgcacacacacagttctcctgcgactccgaggtccctccagacccagccctgccctacatctctacgtggactgcaaactgggtgaccaacatgcaggccttccagcactggcccccattcctccagcggaggtcgatgggctggagattaggactggacagaaggcgtatttgaggatgcagggctttgtggaatctatgaaaattattctgggtgggtccatggcccgggtaggagccctgagtgagtgtccattccaaggggacgagtccatccacagtgcaggtaacacagagacttgtttgctgacattggaccacggatcctgtggcctttggtgactcctgtcttcttgatctccctctcccttaaaacccattcctttggctcacctgttcctagggtttctaaccctgttattccaaatctttcacctgactccacaatctccaatacaccc

SEQ ID NO: 361645 - DNA, 622 bp, Homo sapiens
ttttttttttctcagatacagattcatttggtgatgcctgtgacaacgacgtggatggggatggtgcaggcctggggctgaaggggtggctgggggacctgtgagaatttggatcaggtggggatgaagcagggaagctaggaatgtgaggtagggcgtagtgttaggcagagtgtggactagagggtgagacaagaaacaggcagatttcctggccagttgtcctctgggtggggagacaaagttcgggactttcaccaactgctgattagcgatggggatgggcatcaggacaccaaggacaactgcccacagctgccaaatagctcccagctggactctgataacgatggacttggagatgagtgtgatggggatgatgacaatgatggcatcccagattatgtgcctcctggtcccgataactgccgcctggtacccaatcccaatcagaaggactcagatggcaatggcgttggtgatgtgtgtgaggatgactttgacaatgatgctgtggtcgaccccctggatgtgtgtcctgaaagtgcagaggtaacgcttacggattttctgcctatcagaccgtcgtcctgcctgagatgggatcctctagatcacctcc

SEQ ID NO: 361646 - DNA, 703 bp, Homo sapiens
agacagggtttcatcgtgttggccaggctggtctcgaactcctgacctcaggtgatctgcccgccttggcctcccaaagtactgggaatacaggcatgagccactgtgcccaggccatagtatattctaaattccttctatgatttagccttaattctctattgctattcagcaggaatttattcttacagtcatccctccattcctactgccagaccttcacctcacctggctgactgccaggggtctgattgtatggagagcaggctccagagactcccaggcagaagcgaagggaaggacaaggagtacctttaaatcctttatttggtacctgttcttctgctgattagcgatggggatgggcatcaggacaccaaggacaactgcccacagctgccaaatagctcccagctggactctgataacgatggacttggagatgagtgtgatggggatgatgacaatgatggcatcccagattatgtgcctcctggtcccgataactgccgcctggtacccaatcccaatcagaaggactcagatggcaatggcgttggtgatgtgtgtgaggatgactttgacaatgatgctgtggtcgaccccctggatgtgtgtcctgaaagtgcagaggtaacgcttacggattttctgcctatcagaccgtcgtcctgcctgagatgggatcctctagatcacctcc

SEQ ID NO: 361647 - DNA, 399 bp, Homo sapiens
ttgtggacgttggcctgggtgaggagagattacctgcagcagatgtcaataggaatgtgaggtagggcgtagtgttaggcagagtgtggactagagggtgagacaagaaacaggcagatttcctggccagttgtcctctgggtggggagacaaagttcgggactttcaccaacctagaagagagaatatggcatgttctagtaacaaccttgtgctacccatgtcttctaggcatccccaatggattggacaattgccctaaagtccccaacccactacagacagacagggatgaggacggggtgggagatgcttgcgacagctgccctgaaatgagcaatcctacccaggtacagggagatggtaaggacaggggagggatgagggtactgatggatg

SEQ ID NO: 361648 - DNA, 2303 bp, Homo sapiens
ggtagtgagccggctgagaggcatggagacgcaggaacttcggggggccctggctcttctcctcctttgctttttcacatctgccagtcaggatctgcaggtaattgacctgctgactgtgggcgagtctcggcagatggtagctgtggcagagaagatccggacagccttgctcactgctggggacatctacctcttatccaccttccgcctgccccccaagcagggtggtgtcctctttggcctctattctcgccaagacaacactcgatggctggaggcctctgttgtaggcaagatcaacaaagtactggtgcgataccagcgggaggatggcaaagtccacgccgtgaacctacagcaagcgggcctggctgatgggcgcacacacacagttctcctgcgactccgaggtccctccagacccagccctgccctacatctctacgtggactgcaaactgggtgaccaacatgcaggccttccagcactggcccccattcctccagcggaggtcgatgggctggagattaggactggacagaaggcgtatttgaggatgcagggctttgtggaatctatgaaaattattctgggtgggtccatggcccgggtaggagccctgagtgagtgtccattccaaggggacgagtccatccacagtgcagtgaccaatgcactgcactccattctaggggagcagaccaaggcgctggtcacccaactcaccctcttcaaccagatcctggtggagctgcgggatgatatacgagaccaggtgaaggaaatgtccctgatccgaaacaccattatggagtgtcaggtgtgcggcttccatgagcagcgttcccactgcagccccaatccctgcttccgaggtgtggactgcatggaagtgtacgagtacccaggctaccgctgtgggccctgcccccctggcctgcagggcaacggcacccactgcagtgacatcaatgagtgtgctcacgctgacccctgtttcccgggctccagctgcatcaacaccatgcccggcttccactgtgaggcctgtcctcgagggtacaagggcacacaggtgtctggtgtgggcattgactatgcccgggccagcaaacaggtctgcaatgacatcgatgaatgcaacgatggcaacaatggtggctgtgacccaaactccatctgcaccaacactgtgggctctttcaagtgtggtccctgccgcctgggtttcctgggcaaccagagccagggctgcctcccagcccggacctgccacagcccagcccacagcccctgccacatccatgctcactgtctctttgaacgcaatggtgcagtgtcctgccagtgtaacgtgggctgggctgggaatgggaacgtgtgtgggactgacacagacatcgatggctacccagaccaagcactgccctgcatggacaacaacaaacactgcaaacaggacaactgccttttgacacccaactctgggcaggaagatgctgataatgatggtgtgggggaccagtgtgatgatgatgctgatggggatgggatcaagaatgttgaggacaactgccggctgttccccaacaaagaccagcagaactcagatacagattcatttggtgatgcctgtgacaattgccccaacgttcccaacaatgaccagaaggacacagatggcaatggggaaggagatgcctgtgacaacgacgtggatggggatggcatccccaatggattggacaattgccctaaagtccccaacccactacagacagacagggatgaggacggggtgggagatgcttgcgacagctgccctgaaatgagcaatcctacccagacagatgcagacagcgacctggtgggggatgtctgtgatactaatgaagacagtgctgattagcgatggggatgggcatcaggacaccaaggacaactgcccacagctgccaaatagctcccagctggactctgataacgatggacttggagatgagtgtgatggggatgatgacaatgatggcatcccagattatgtgcctcctggtcccgataactgccgcctggtacccaatcccaatcagaaggactcagatgtggccagggccttcctgagcacccagcctcactctgcccaggcaatggcgttggtgatgtgtgtgaggatgactttgacaatgatgctgtggtcgaccccctggatgtgtgtcctgaaagtgcagaggtaacgcttacggattttctgcctatcagaccgtcgtcctgcctgagatgggatcctctagatcacctcc

SEQ ID NO: 361649 - DNA, 1967 bp, Homo sapiens
ggtagtgagccggctgagaggcatggagacgcaggaacttcggggggccctggctcttctcctcctttgctttttcacatctgccagtcaggatctgcaggtaattgacctgctgactgtgggcgagtctcggcagatggtagctgtggcagagaagatccggacagccttgctcactgctggggacatctacctcttatccaccttccgcctgccccccaagcagggtggtgtcctctttggcctctattctcgccaagacaacactcgatggctggaggcctctgttgtaggcaagatcaacaaagtactggtgcgataccagcgggaggatggcaaagtccacgccgtgaacctacagcaagcgggcctggctgatgggcgcacacacacagttctcctgcgactccgaggtccctccagacccagccctgccctacatctctacgtggactgcaaactgggtgaccaacatgcaggccttccagcactggcccccattcctccagcggaggtcgatgggctggagattaggactggacagaaggcgtatttgaggatgcagggctttgtggaatctatgaaaattattctgggtgggtccatggcccgggtaggagccctgagtgagtgtccattccaaggggacgagtccatccacagtgcagtgaccaatgcactgcactccattctaggggagcagaccaaggcgctggtcacccaactcaccctcttcaaccagatcctggtggagctgcgggatgatatacgagaccaggtgaaggaaatgtccctgatccgaaacaccattatggagtgtcaggtgtgcggcttccatgagcagcgttcccactgcagccccaatccctgcttccgaggtgtggactgcatggaagtgtacgagtacccaggctaccgctgtgggccctgcccccctggcctgcagggcaacggcacccactgcagtgacatcaatgagtgtgctcacgctgacccctgtttcccgggctccagctgcatcaacaccatgcccggcttccactgtgaggcctgtcctcgagggtacaagggcacacaggtgtctggtgtgggcattgactatgcccgggccagcaaacaggtctgcaatgacatcgatgaatgcaacgatggcaacaatggtggctgtgacccaaactccatctgcaccaacactgtgggctctttcaagtgtggtccctgccgcctgggtttcctgggcaaccagagccagggctgcctcccagcccggacctgccacagcccagcccacagcccctgccacatccatgctcactgtctctttgaacgcaatggtgcagtgtcctgccagtgtaacgtgggctgggctgggaatgggaacgtgtgtgggactgacacagacatcgatggctacccagaccaagcactgccctgcatggacaacaacaaacactgcaaacaggacaactgccttttgacacccaactctgggcaggaagatgctgataatgatggtgtgggggaccagtgtgatgatgatgctgatggggatgggatcaagaatgttgaggacaactgccggctgttccccaacaaagaccagcagaactcagatacagattcatttggtgatgcctgtgacaattgccccaacgttcccaacaatgaccagaaggacacagatggcaatggggaaggagatgcctgtgacaacgacgtggatggggatggcatccccaatggattggacaattgccctaaagtccccaacccactacagacagacagggatgaggacggggtgggagatgcttgcgacagctgccctgaaatgagcaatcctacccagacagatgcagacagcgacctggtgggggatgtctgtgatactaatgaagacagaatgctgtttgtctccccgtccagggtagagccaggcaaggtccagcccatcaaagccatgggtg

SEQ ID NO: 361650 - DNA, 2143 bp, Homo sapiens
ggtagtgagccggctgagaggcatggagacgcaggaacttcggggggccctggctcttctcctcctttgctttttcacatctgccagtcaggatctgcaggtaattgacctgctgactgtgggcgagtctcggcagatggtagctgtggcagagaagatccggacagccttgctcactgctggggacatctacctcttatccaccttccgcctgccccccaagcagggtggtgtcctctttggcctctattctcgccaagacaacactcgatggctggaggcctctgttgtaggcaagatcaacaaagtactggtgcgataccagcgggaggatggcaaagtccacgccgtgaacctacagcaagcgggcctggctgatgggcgcacacacacagttctcctgcgactccgaggtccctccagacccagccctgccctacatctctacgtggactgcaaactgggtgaccaacatgcaggccttccagcactggcccccattcctccagcggaggtcgatgggctggagattaggactggacagaaggcgtatttgaggatgcagggctttgtggaatctatgaaaattattctgggtgggtccatggcccgggtaggagccctgagtgagtgtccattccaaggggacgagtccatccacagtgcagtgaccaatgcactgcactccattctaggggagcagaccaaggcgctggtcacccaactcaccctcttcaaccagatcctggtggagctgcgggatgatatacgagaccaggtgaaggaaatgtccctgatccgaaacaccattatggagtgtcaggtgtgcggcttccatgagcagcgttcccactgcagccccaatccctgcttccgaggtgtggactgcatggaagtgtacgagtacccaggctaccgctgtgggccctgcccccctggcctgcagggcaacggcacccactgcagtgacatcaatgagtgtgctcacgctgacccctgtttcccgggctccagctgcatcaacaccatgcccggcttccactgtgaggcctgtcctcgagggtacaagggcacacaggtgtctggtgtgggcattgactatgcccgggccagcaaacaggtctgcaatgacatcgatgaatgcaacgatggcaacaatggtggctgtgacccaaactccatctgcaccaacactgtgggctctttcaagtgtggtccctgccgcctgggtttcctgggcaaccagagccagggctgcctcccagcccggacctgccacagcccagcccacagcccctgccacatccatgctcactgtctctttgaacgcaatggtgcagtgtcctgccagtgtaacgtgggctgggctgggaatgggaacgtgtgtgggactgacacagacatcgatggctacccagaccaagcactgccctgcatggacaacaacaaacactgcaaacaggacaactgccttttgacacccaactctgggcaggaagatgctgataatgatggtgtgggggaccagtgtgatgatgatgctgatggggatgggatcaagaatgttgaggcatccccaatggattggacaattgccctaaagtccccaacccactacagacagacagggatgaggacggggtgggagatgcttgcgacagctgccctgaaatgagcaatcctacccagacagatgcagacagcgacctggtgggggatgtctgtgatactaatgaagacagtgctgattagcgatggggatgggcatcaggacaccaaggacaactgcccacagctgccaaatagctcccagctggactctgataacgatggacttggagatgagtgtgatggggatgatgacaatgatggcatcccagattatgtgcctcctggtcccgataactgccgcctggtacccaatcccaatcagaaggactcagatgtggccagggccttcctgagcacccagcctcactctgcccaggcaatggcgttggtgatgtgtgtgaggatgactttgacaatgatgctgtggtcgaccccctggatgtgtgtcctgaaagtgcagaggtaacgcttacggattttctgcctatcagaccgtcgtcctgcctgagatgggatcctctagatcacctcc

SEQ ID NO: 361651 - DNA, 350 bp, Homo sapiens
ctgtttcccgggctccagctgcatcaacaccatgcccggcttccactgtgaggcctgtcctcgagggtacaagggcacacaggtgtctggtgtgggcattgactatgcccgggccagcaaacaggtcagactgggtagtgtgtgtggacaagggatcttggccttgtagaggccaggggcttctgggttggacatgggacccttgtgatgaatgggacatggatggctttgcatcggctttgggtctgggcttaatgttgatgttcacagataaggccataccagtgtcctctgctgtatctgaggagacccaccataggtctggttccacccaaagtctgccccttcag

SEQ ID NO: 361652 - DNA, 1253 bp, Homo sapiens
  misc_feature (11)..(11): n is a, c, g, or t
  misc_feature (13)..(13): n is a, c, g, or t
  misc_feature (21)..(21): n is a, c, g, or t
  misc_feature (42)..(42): n is a, c, g, or t
ccgggagaaantnaaaaaagnacataggctaggtgcgaggcngggtggtgtggtcagaagggaggtggccggtctccgtcgtgacctctgacggtttctgagcgttggcctttggcacgcgctacccccttttgctttggttctgccatgccgatgtaccaggtaaagccctatcacgggggcggcgcgcctctccgtgtggagcttcccacctgcatgtaccggctccccaacgtgcacggcaggagctacggcccagcgccgggcgctggccacgtgcaggaagagtctaacctgtctctgcaagctcttgagtcccgccaagatgatattttaaaacgtctgtatgagttgaaagctgcagttgatggcctctccaagatgattcaaacaccagatgcagacttggatgtaaccaacataatccaagcggatgagcccacgactttaaccaccaatgcgctggacttgaattcagtgcttgggaaggattacggggcgctgaaagacatcgtgatcaacgcaaacccggcctcccctcccctctccctgcttgtgctgcacaggctgctctgtgagcacttcagggtcctgtccacggtgcacacgcactcctcggtcaagagcgtgcctgaaaaccttctcaagtgctttggagaacagaataaaaaacagccccgccaagactatcagctgggattcactttaatttggaagaatgtgccgaagacgcagatgaaattcagcatccagacgatgtgccccatcgaaggcgaagggaacattgcacgtttcttgttctctctgtttggccagaagcataatgctgtcaacgcaacccttatagatagctgggtagatattgcgatttttcagttaaaagagggaagcagtaaagaaaaagccgctgttttccgctccatgaactctgctcttgggaagagcccttggctcgctgggaatgaactcaccgtagcagacgtggtgctgtggtctgtactccagcagatcggaggctgcagtgtgacagtgccagccaatgtgcagaggtggatgaggtcttgtgaaaacctggctccttttaacacggccctcaagctccttaagtgaattgccgtaactgattttaaagggtttagattttaagaatggtgctctttcatgcctattatcagtaaggggacttgtattagagtcagagtctttttatttaggccagttgtcaagtgtcaataaaagcatcatgtaattta

SEQ ID NO: 361653 - DNA, 1133 bp, Homo sapiens
  misc_feature (11)..(11): n is a, c, g, or t
  misc_feature (13)..(13): n is a, c, g, or t
  misc_feature (21)..(21): n is a, c, g, or t
  misc_feature (42)..(42): n is a, c, g, or t
ccgggagaaantnaaaaaagnacataggctaggtgcgaggcngggtggtgtggtcagaagggaggtggccggtctccgtcgtgacctctgacggtttctgagcgttggcctttggcacgcgctacccccttttgctttggttctgccatgccgatgtaccaggaagagtctaacctgtctctgcaagctcttgagtcccgccaagatgatattttaaaacgtctgtatgagttgaaagctgcagttgatggcctctccaagatgattcaaacaccagatgcagacttggatgtaaccaacataatccaagcggatgagcccacgactttaaccaccaatgcgctggacttgaattcagtgcttgggaaggattacggggcgctgaaagacatcgtgatcaacgcaaacccggcctcccctcccctctccctgcttgtgctgcacaggctgctctgtgagcacttcagggtcctgtccacggtgcacacgcactcctcggtcaagagcgtgcctgaaaaccttctcaagtgctttggagaacagaataaaaaacagccccgccaagactatcagctgggattcactttaatttggaagaatgtgccgaagacgcagatgaaattcagcatccagacgatgtgccccatcgaaggcgaagggaacattgcacgtttcttgttctctctgtttggccagaagcataatgctgtcaacgcaacccttatagatagctgggtagatattgcgatttttcagttaaaagagggaagcagtaaagaaaaagccgctgttttccgctccatgaactctgctcttgggaagagcccttggctcgctgggaatgaactcaccgtagcagacgtggtgctgtggtctgtactccagcagatcggaggctgcagtgtgacagtgccagccaatgtgcagaggtggatgaggtcttgtgaaaacctggctccttttaacacggccctcaagctccttaagtgaattgccgtaactgattttaaagggtttagattttaagaatggtgctctttcatgcctattatcagtaaggggacttgtattagagtcagagtctttttatttaggccagttgtcaagtgtcaataaaagcatcatgtaattta

SEQ ID NO: 361654 - DNA, 1284 bp, Homo sapiens
  misc_feature (11)..(11): n is a, c, g, or t
  misc_feature (13)..(13): n is a, c, g, or t
  misc_feature (21)..(21): n is a, c, g, or t
  misc_feature (42)..(42): n is a, c, g, or t
ccgggagaaantnaaaaaagnacataggctaggtgcgaggcngggtggtgtggtcagaagggaggtggccggtctccgtcgtgacctctgacggtttctgagcgttggcctttggcacgcgctacccccttttgctttggttctgccatgccgatgtaccagtagagacggggtttcaccatgttggccaggctggtcttgaactcctgacgtcagatgatctgcctacctggacctcccgaagtgctgggattacaggcgtgagccaccacacccagcccataatgtcttcttttaaagggtgggaggtttggaagagtctaacctgtctctgcaagctcttgagtcccgccaagatgatattttaaaacgtctgtatgagttgaaagctgcagttgatggcctctccaagatgattcaaacaccagatgcagacttggatgtaaccaacataatccaagcggatgagcccacgactttaaccaccaatgcgctggacttgaattcagtgcttgggaaggattacggggcgctgaaagacatcgtgatcaacgcaaacccggcctcccctcccctctccctgcttgtgctgcacaggctgctctgtgagcacttcagggtcctgtccacggtgcacacgcactcctcggtcaagagcgtgcctgaaaaccttctcaagtgctttggagaacagaataaaaaacagccccgccaagactatcagctgggattcactttaatttggaagaatgtgccgaagacgcagatgaaattcagcatccagacgatgtgccccatcgaaggcgaagggaacattgcacgtttcttgttctctctgtttggccagaagcataatgctgtcaacgcaacccttatagatagctgggtagatattgcgatttttcagttaaaagagggaagcagtaaagaaaaagccgctgttttccgctccatgaactctgctcttgggaagagcccttggctcgctgggaatgaactcaccgtagcagacgtggtgctgtggtctgtactccagcagatcggaggctgcagtgtgacagtgccagccaatgtgcagaggtggatgaggtcttgtgaaaacctggctccttttaacacggccctcaagctccttaagtgaattgccgtaactgattttaaagggtttagattttaagaatggtgctctttcatgcctattatcagtaaggggacttgtattagagtcagagtctttttatttaggccagttgtcaagtgtcaataaaagcatcatgtaattta

SEQ ID NO: 361655 - DNA, 1012 bp, Homo sapiens
gagccaccgtgcccggcccctaaacaatagtcttcatataggaagagtctaacctgtctctgcaagctcttgagtcccgccaagatgatattttaaaacgtctgtatgagttgaaagctgcagttgatggcctctccaagatgattcaaacaccagatgcagacttggatgtaaccaacataatccaagcggatgagcccacgactttaaccaccaatgcgctggacttgaattcagtgcttgggaaggattacggggcgctgaaagacatcgtgatcaacgcaaacccggcctcccctcccctctccctgcttgtgctgcacaggctgctctgtgagcacttcagggtcctgtccacggtgcacacgcactcctcggtcaagagcgtgcctgaaaaccttctcaagtgctttggagaacagaataaaaaacagccccgccaagactatcagctgggattcactttaatttggaagaatgtgccgaagacgcagatgaaattcagcatccagacgatgtgccccatcgaaggcgaagggaacattgcacgtttcttgttctctctgtttggccagaagcataatgctgtcaacgcaacccttatagatagctgggtagatattgcgatttttcagttaaaagagggaagcagtaaagaaaaagccgctgttttccgctccatgaactctgctcttgggaagagcccttggctcgctgggaatgaactcaccgtagcagacgtggtgctgtggtctgtactccagcagatcggaggctgcagtgtgacagtgccagccaatgtgcagaggtggatgaggtcttgtgaaaacctggctccttttaacacggccctcaagctccttaagtgaattgccgtaactgattttaaagggtttagattttaagaatggtgctctttcatgcctattatcagtaaggggacttgtattagagtcagagtctttttatttaggccagttgtcaagtgtcaataaaagcatcatgtaattta

SEQ ID NO: 361656 - DNA, 1255 bp, Homo sapiens
gctccctccccccccccccccccccctacgctagtaggccggtgatcggacgaggtcagaagggaggtggccggtctccgtcgtgacctctgacggtttctgagcgttggcctttggcacgcgctacccccttttgctttggttctgccatgccgatgtaccaggtaaagccctatcacgggggcggcgcgcctctccgtgtggagcttcccacctgcatgtaccggctccccaacgtgcacggcaggagctacggcccagcgccgggcgctggccacgtgcaggaagagtctaacctgtctctgcaagctcttgagtcccgccaagatgatattttaaaacgtctgtatgagttgaaagctgcagttgatggcctctccaagatgattcaaacaccagatgcagacttggatgtaaccaacataatccaagcggatgagcccacgactttaaccaccaatgcgctggacttgaattcagtgcttgggaaggattacggggcgctgaaagacatcgtgatcaacgcaaacccggcctcccctcccctctccctgcttgtgctgcacaggctgctctgtgagcacttcagggtcctgtccacggtgcacacgcactcctcggtcaagagcgtgcctgaaaaccttctcaagtgctttggagaacagaataaaaaacagccccgccaagactatcagctgggattcactttaatttggaagaatgtgccgaagacgcagatgaaattcagcatccagacgatgtgccccatcgaaggcgaagggaacattgcacgtttcttgttctctctgtttggccagaagcataatgctgtcaacgcaacccttatagatagctgggtagatattgcgatttttcagttaaaagagggaagcagtaaagaaaaagccgctgttttccgctccatgaactctgctcttgggaagagcccttggctcgctgggaatgaactcaccgtagcagacgtggtgctgtggtctgtactccagcagatcggaggctgcagtgtgacagtgccagccaatgtgcagaggtggatgaggtcttgtgaaaacctggctccttttaacacggccctcaagctccttaagtgaattgccgtaactgattttaaagggtttagattttaagaatggtgctctttcatgcctattatcagtaaggggacttgtattagagtcagagtctttttatttaggccagttgtcaagtgtcaataaaagcatcatgtaattta

SEQ ID NO: 361657 - DNA, 1046 bp, Homo sapiens
  misc_feature (11)..(11): n is a, c, g, or t
  misc_feature (13)..(13): n is a, c, g, or t
  misc_feature (21)..(21): n is a, c, g, or t
  misc_feature (42)..(42): n is a, c, g, or t
ccgggagaaantnaaaaaagnacataggctaggtgcgaggcngggtggtgtggtcagaagggaggtggccggtctccgtcgtgacctctgacggtttctgagcgttggcctttggcacgcgctacccccttttgctttggttctgccatgccgatgtaccaggtaaagccctatcacgggggcggcgcgcctctccgtgtggagcttcccacctgcatgtaccggctccccaacgtgcacggcaggagctacggcccagcgccgggcgctggccacgtgcaggattacggggcgctgaaagacatcgtgatcaacgcaaacccggcctcccctcccctctccctgcttgtgctgcacaggctgctctgtgagcacttcagggtcctgtccacggtgcacacgcactcctcggtcaagagcgtgcctgaaaaccttctcaagtgctttggagaacagaataaaaaacagccccgccaagactatcagctgggattcactttaatttggaagaatgtgccgaagacgcagatgaaattcagcatccagacgatgtgccccatcgaaggcgaagggaacattgcacgtttcttgttctctctgtttggccagaagcataatgctgtcaacgcaacccttatagatagctgggtagatattgcgatttttcagttaaaagagggaagcagtaaagaaaaagccgctgttttccgctccatgaactctgctcttgggaagagcccttggctcgctgggaatgaactcaccgtagcagacgtggtgctgtggtctgtactccagcagatcggaggctgcagtgtgacagtgccagccaatgtgcagaggtggatgaggtcttgtgaaaacctggctccttttaacacggccctcaagctccttaagtgaattgccgtaactgattttaaagggtttagattttaagaatggtgctctttcatgcctattatcagtaaggggacttgtattagagtcagagtctttttatttaggccagttgtcaagtgtcaataaaagcatcatgtaattta

SEQ ID NO: 361658 - DNA, 1339 bp, Homo sapiens
  misc_feature (11)..(11): n is a, c, g, or t
  misc_feature (13)..(13): n is a, c, g, or t
  misc_feature (21)..(21): n is a, c, g, or t
  misc_feature (42)..(42): n is a, c, g, or t
ccgggagaaantnaaaaaagnacataggctaggtgcgaggcngggtggtgtggtcagaagggaggtggccggtctccgtcgtgacctctgacggtttctgagcgttggcctttggcacgcgctacccccttttgctttggttctgccatgccgatgtaccaggtaaagccctatcacgggggcggcgcgcctctccgtgtggagcttcccacctgcatgtaccggctccccaacgtgcacggcaggagctacggcccagcgccgggcgctggccacgtgcagaaatggagtttcatcatgttgtcctctcgaactcctgacctcaagtgatccacccgcctcgcccttccaaagtgctgagattacaggaagagtctaacctgtctctgcaagctcttgagtcccgccaagatgatattttaaaacgtctgtatgagttgaaagctgcagttgatggcctctccaagatgattcaaacaccagatgcagacttggatgtaaccaacataatccaagcggatgagcccacgactttaaccaccaatgcgctggacttgaattcagtgcttgggaaggattacggggcgctgaaagacatcgtgatcaacgcaaacccggcctcccctcccctctccctgcttgtgctgcacaggctgctctgtgagcacttcagggtcctgtccacggtgcacacgcactcctcggtcaagagcgtgcctgaaaaccttctcaagtgctttggagaacagaataaaaaacagccccgccaagactatcagctgggattcactttaatttggaagaatgtgccgaagacgcagatgaaattcagcatccagacgatgtgccccatcgaaggcgaagggaacattgcacgtttcttgttctctctgtttggccagaagcataatgctgtcaacgcaacccttatagatagctgggtagatattgcgatttttcagttaaaagagggaagcagtaaagaaaaagccgctgttttccgctccatgaactctgctcttgggaagagcccttggctcgctgggaatgaactcaccgtagcagacgtggtgctgtggtctgtactccagcagatcggaggctgcagtgtgacagtgccagccaatgtgcagaggtggatgaggtcttgtgaaaacctggctccttttaacacggccctcaagctccttaagtgaattgccgtaactgattttaaagggtttagattttaagaatggtgctctttcatgcctattatcagtaaggggacttgtattagagtcagagtctttttatttaggccagttgtcaagtgtcaataaaagcatcatgtaattta

SEQ ID NO: 361659 - DNA, 1930 bp, Homo sapiens
ttcgatgagccgggacgtggcgccgctctagccagcgcctgggctctgtggcgggcgccgcagctccgcgtcccccgcgcctcctcccagcgcagacttcaagggctaccactggacccttcccctgtcttgaaccctgagccggcaccatgcacggacgcctgaaggtgaagacgtcagaagagcaggcggaggccaaaaggctagagcgagagcagaagctgaagctataccagtcagccacccaggccgtattccagaagcgccaggctggtgagctggatgagtccgtgctggaactgacaagccagattctgggagccaaccctgattttgccaccctctggaactgccgacgagaggtgctccagcagctggagactcagaagtctcctgaagagttggctgctctggtgaaggcagaactgggcttcctggagagctgcctgcgggtgaaccccaagtcttatggtacctggcaccaccgatgctggctgctaggccgcctgcctgagcccaactggacccgagagctggagctctgtgcccgtttcctggaggtggatgagcggaactttcactgctgggactatcggcggtttgtggccacacaggcagccgtgccccctgcagaagagctagccttcactgacagcctcatcacccgaaacttctccaactactcttcctggcattaccgctcctgtctcttgccccagctgcacccccagccggattctggaccacaggggcgcctccctgaggatgtgctgctcaaagagctggagctggtgcagaatgccttcttcactgaccccaatgaccagagtgcctggttttatcaccgttggctcctaggccgagctgacccccaggatgcactgcgctgcctgcatgtgagccgggacgaggcctgtctgactgtctccttctctcggcccctcttagtgggctccaggatggagatcttgctgctcatggttgatgattctcccctgattgtggagtggaggaccccagatggcaggaaccggcccagccatgtctggctctgtgacctgcctgctgcctccctcaacgaccagttgccccaacatacatttcgcgtcatttggacagcaggcgatgtccagaaagaatgcgtgcttttaaaaggccgccaggagggctggtgccgggactccacgacagacgagcagctattcaggtgtgagctgtcagtggagaagtccacagtgctgcagtctgagctggaatcctgtaaggagctgcaggagctggagcctgagaataaatggtgcctgcttaccatcatcctgctgatgcgggcactggaccccctgctgtatgagaaggagaccctgcagtacttccagaccctcaaggccgtggaccccatgcgggcaacgtatctggatgacctgcgcagcaagttcttgctggagaatagcgtgctcaagatggagtatgccgaggtgcgtgtgctgcacctggctcacaaggatctgacagtgctctgccatctggaacagctgctcttggtcacccatcttgacttgtcacacaatcgcctccgaaccctgccacctgcactggctgccctgcgctgccttgaggtgctgcaggccagtgataatgccatagagtccctggacggcgtcaccaacctaccccggctgcaggagctgctactgtgcaacaaccgcctccagcagcctgcagtgctccagcctcttgcctcctgccccaggctggtcctcctcaacctgcagggtaacccgctgtgccaagcggtgggcatcttggagcaactggctgaactgctgccttcagttagcagcgtcctcacctaagaggccctgccccctacccttgccctttaacttattgggactgaataaagaatggagaggccctctcaggctaccaa

SEQ ID NO: 361660 - DNA, 710 bp, Homo sapiens
ttcgatgagccgggacgtggcgccgctctagccagcgcctgggctctgtggcgggcgccgcagctccgcgtcccccgcgcctcctcccagcgcagacttcaagggctaccactggacccttcccctgtcttgaaccctgagccggcaccatgcacggacgcctgaaggtgaagacgtcagaagagcaggcggaggccaaaaggctagagcgagagcagaagctgaagctataccagtcagccacccaggccgtattccagaagcgccaggctggtgagctggatgagtccgtgctggaactgacaagccagattctgggagccaaccctgattttgccaccctctggaactgccgacgagaggtgctccagcagctggagactcagaagtctcctgaagagttggctgctctggtgaaggcagaactgggcttcctggagagctgcctgcgggtgaaccccaagtcttatggtacctggcaccaccgatgctggctgctaggccgcctgcctgagcccaactggacccgagagctggagctctgtgcccgtttcctggaggtggatgagcggaactctgcacccccagccggattctggaccacaggggcgcctccctgaggatgtgctgctcaaaggtttattgagcacctacttcatgcgtggctccaggggtgcttaagaatcagtccctggctgaaggaagcttaa

SEQ ID NO: 361661 - DNA, 2009 bp, Homo sapiens
ttcgatgagccgggacgtggcgccgctctagccagcgcctgggctctgtggcgggcgccgcagctccgcgtcccccgcgcctcctcccagcgcaggcacgcttgctgcttccggacacagctgtgggcggagctagtaggggcggggctacgtgattgacacttctctcctcagacttcaagggctaccactggacccttcccctgtcttgaaccctgagccggcaccatgcacggacgcctgaaggtgaagacgtcagaagagcaggcggaggccaaaaggctagagcgagagcagaagctgaagctataccagtcagccacccaggccgtattccagaagcgccaggctggtgagctggatgagtccgtgctggaactgacaagccagattctgggagccaaccctgattttgccaccctctggaactgccgacgagaggtgctccagcagctggagactcagaagtctcctgaagagttggctgctctggtgaaggcagaactgggcttcctggagagctgcctgcgggtgaaccccaagtcttatggtacctggcaccaccgatgctggctgctaggccgcctgcctgagcccaactggacccgagagctggagctctgtgcccgtttcctggaggtggatgagcggaactttcactgctgggactatcggcggtttgtggccacacaggcagccgtgccccctgcagaagagctagccttcactgacagcctcatcacccgaaacttctccaactactcttcctggcattaccgctcctgtctcttgccccagctgcacccccagccggattctggaccacaggggcgcctccctgaggatgtgctgctcaaagagctggagctggtgcagaatgccttcttcactgaccccaatgaccagagtgcctggttttatcaccgttggctcctaggccgagctgacccccaggatgcactgcgctgcctgcatgtgagccgggacgaggcctgtctgactgtctccttctctcggcccctcttagtgggctccaggatggagatcttgctgctcatggttgatgattctcccctgattgtggagtggaggaccccagatggcaggaaccggcccagccatgtctggctctgtgacctgcctgctgcctccctcaacgaccagttgccccaacatacatttcgcgtcatttggacagcaggcgatgtccagaaagaatgcgtgcttttaaaaggccgccaggagggctggtgccgggactccacgacagacgagcagctattcaggtgtgagctgtcagtggagaagtccacagtgctgcagtctgagctggaatcctgtaaggagctgcaggagctggagcctgagaataaatggtgcctgcttaccatcatcctgctgatgcgggcactggaccccctgctgtatgagaaggagaccctgcagtacttccagaccctcaaggccgtggaccccatgcgggcaacgtatctggatgacctgcgcagcaagttcttgctggagaatagcgtgctcaagatggagtatgccgaggtgcgtgtgctgcacctggctcacaaggatctgacagtgctctgccatctggaacagctgctcttggtcacccatcttgacttgtcacacaatcgcctccgaaccctgccacctgcactggctgccctgcgctgccttgaggtgctgcaggccagtgataatgccatagagtccctggacggcgtcaccaacctaccccggctgcaggagctgctactgtgcaacaaccgcctccagcagcctgcagtgctccagcctcttgcctcctgccccaggctggtcctcctcaacctgcagggtaacccgctgtgccaagcggtgggcatcttggagcaactggctgaactgctgccttcagttagcagcgtcctcacctaagaggccctgccccctacccttgccctttaacttattgggactgaataaagaatggagaggccctctcaggctaccaa

SEQ ID NO: 361662 - DNA, 2417 bp, Homo sapiens
ttcgatgagccgggacgtggcgccgctctagccagcgcctgggctctgtggcgggcgccgcagctccgcgtcccccgcgcctcctcccagcgcaggtgggtccgcccgcggggggcgggggtgcccgggagccgtgggacgggcgggtagcggcaacctttggggagcagagtggtccccaacgcccaggtgccccggctcgcgctctggcccgggcgaatcgggctataggaagggccacacggatggaagtcctagtccgggtgctcacctcttgtggaacgtgcaaagcctgtcccaggacctctttacactctgggggtctctgcccaggcacgcttgctgcttccggacacagctgtgggcggagctagtaggggcggggctacgtgattgacacttctctcctcagacttcaagggctaccactggacccttcccctgtcttgaaccctgagccggcaccatgcacggacgcctgaaggtgaagacgtcagaagagcaggcggaggccaaaaggctagagcgagagcagaagctgaagctataccagtcagccacccaggccgtattccagaagcgccaggctggtgagctggatgagtccgtgctggaactgacaagccagattctgggagccaaccctgattttgccaccctctggaactgccgacgagaggtgctccagcagctggagactcagaagtctcctgaagagttggctgctctggtgaaggcagaactgggcttcctggagagctgcctgcgggtgaaccccaagtcttatggtacctggcaccaccgatgctggctgctaggccgcctgcctgagcccaactggacccgagagctggagctctgtgcccgtttcctggaggtggatgagcggaactttcactgctgggactatcggcggtttgtggccacacaggcagccgtgccccctgcagaagagctagccttcactgacagcctcatcacccgaaacttctccaactactcttcctggcattaccgctcctgtctcttgccccagctgcacccccagccggattctggaccacaggggcgcctccctgaggatgtgctgctcaaagagctggagctggtgcagaatgccttcttcactgaccccaatgaccagagtgcctggttttatcaccgttggctcctaggccgagctgacccccaggatgcactgcgctgcctgcatgtgagccgggacgaggcctgtctgactgtctccttctctcggcccctcttagtgggctccaggatggagatcttgctgctcatggttgatgattctcccctgattgtggagtggaggaccccagatggcaggaaccggcccagccatgtctggctctgtgacctgcctgctgcctccctcaacgaccagttgccccaacatacatttcgcgtcatttggacagcaggcgatgtccagaaagaatgcgtgcttttaaaaggccgccaggagggctggtgccgggactccacgacagacgagcagctattcaggtggtgatagggaagcacaaaacaaggagaggggctctggactctgggcatcaggcagccagggcaggaggctggggcctcaaggagctgtttcagtctagatactgggaatgttgaccagtgcttcagggctgtgggcctcaactcctccccaccctgcccaccctcaggtgtgagctgtcagtggagaagtccacagtgctgcagtctgagctggaatcctgtaaggagctgcaggagctggagcctgagaataaatggtgcctgcttaccatcatcctgctgatgcgggcactggaccccctgctgtatgagaaggagaccctgcagtacttccagaccctcaaggccgtggaccccatgcgggcaacgtatctggatgacctgcgcagcaagttcttgctggagaatagcgtgctcaagatggagtatgccgaggtgcgtgtgctgcacctggctcacaaggatctgacagtgctctgccatctggaacagctgctcttggtcacccatcttgacttgtcacacaatcgcctccgaaccctgccacctgcactggctgccctgcgctgccttgaggtgctgcaggccagtgataatgccatagagtccctggacggcgtcaccaacctaccccggctgcaggagctgctactgtgcaacaaccgcctccagcagcctgcagtgctccagcctcttgcctcctgccccaggctggtcctcctcaacctgcagggtaacccgctgtgccaagcggtgggcatcttggagcaactggctgaactgctgccttcagttagcagcgtcctcacctaagaggccctgccccctacccttgccctttaacttattgggactgaataaagaatggagaggccctctcaggctaccaa

SEQ ID NO: 361663 - DNA, 2412 bp, Homo sapiens
ttcgatgagccgggacgtggcgccgctctagccagcgcctgggctctgtggcgggcgccgcagctccgcgtcccccgcgcctcctcccagcgcaggtgggtccgcccgcggggggcgggggtgcccgggagccgtgggacgggcgggtagcggcaacctttggggagcagagtggtccccaacgcccaggtgccccggctcgcgctctggcccgggcgaatcgggctataggaagggccacacggatggaagtcctagtccgggtgctcacctcttgtggaacgtgcaaagcctgtcccaggacctctttacactctgggggtctctgcccaggcacgcttgctgcttccggacacagctgtgggcggagctagtaggggcggggctacgtgattgacacttctctcctcagacttcaagggctaccactggacccttcccctgtcttgaaccctgagccggcaccatggtgagaaccctgagcccagcccttcacctccgcaggcccgcgccctcacccccagtggcagtgccatggttgccccgtatgaacctagggctccacagtgtggggtttttgcaggtcagcttctgcaaggcaacctgcactcttccaacccgttcatccttgtagcacggacgcctgaaggtgaagacgtcagaagagcaggcggaggccaaaaggctagagcgagagcagaagctgaagctataccagtcagccacccaggccgtattccagaagcgccaggctggtgagctggatgagtccgtgctggaactgacaagccagattctgggagccaaccctgattttgccaccctctggaactgccgacgagaggtgctccagcagctggagactcagaagtctcctgaagagttggctgctctggtgaaggcagaactgggcttcctggagagctgcctgcgggtgaaccccaagtcttatggtacctggcaccaccgatgctggctgctaggccgcctgcctgagcccaactggacccgagagctggagctctgtgcccgtttcctggaggtggatgagcggaactttcactgctgggactatcggcggtttgtggccacacaggcagccgtgccccctgcagaagagctagccttcactgacagcctcatcacccgaaacttctccaactactcttcctggcattaccgctcctgtctcttgccccagctgcacccccagccggattctggaccacaggggcgcctccctgaggatgtgctgctcaaagagctggagctggtgcagaatgccttcttcactgaccccaatgaccagagtgcctggttttatcaccgttggctcctaggccgagctgacccccaggatgcactgcgctgcctgcatgtgagccgggacgaggcctgtctgactgtctccttctctcggcccctcttagtgggctccaggatggagatcttgctgctcatggttgatgattctcccctgattgtggagtggaggaccccagatggcaggaaccggcccagccatgtctggctctgtgacctgcctgctgcctccctcaacgaccagttgccccaacatacatttcgcgtcatttggacagcaggcgatgtccagaaagaatgcgtgcttttaaaaggccgccaggagggctggtgccgggactccacgacagacgagcagctattcaggtgtgagctgtcagtggagaagtccacagtgctgcagtctgagctggaatcctgtaaggagctgcaggagctggagcctgagaataaatggtgcctgcttaccatcatcctgctgatgcgggcactggaccccctgctgtatgagaaggagaccctgcagtacttccagaccctcaaggccgtggaccccatgcgggcaacgtatctggatgacctgcgcagcaagttcttgctggagaatagcgtgctcaagatggagtatgccgaggtgcgtgtgctgcacctggctcacaaggatctgacagtgctctgccatctggaacagctgctcttggtcacccatcttgacttgtcacacaatcgcctccgaaccctgccacctgcactggctgccctgcgctgccttgaggtgctgcaggccagtgataatgccatagagtccctggacggcgtcaccaacctaccccggctgcaggagctgctactgtgcaacaaccgcctccagcagcctgcagtgctccagcctcttgcctcctgccccaggctggtcctcctcaacctgcagggtaacccgctgtgccaagcggtgggcatcttggagcaactggctgaactgctgccttcagttagcagcgtcctcacctaagaggccctgccccctacccttgccctttaacttattgggactgaataaagaatggagaggccctctcaggctaccaa

SEQ ID NO: 361664 - DNA, 1981 bp, Homo sapiens
ttcgatgagccgggacgtggcgccgctctagccagcgcctgggctctgtggcgggcgccgcagctccgcgtcccccgcgcctcctcccagcgcagacttcaagggctaccactggacccttcccctgtcttgaaccctgagccggcaccatggtcagcttctgcaaggcaacctgcactcttccaacccgttcatccttgtagcacggacgcctgaaggtgaagacgtcagaagagcaggcggaggccaaaaggctagagcgagagcagaagctgaagctataccagtcagccacccaggccgtattccagaagcgccaggctggtgagctggatgagtccgtgctggaactgacaagccagattctgggagccaaccctgattttgccaccctctggaactgccgacgagaggtgctccagcagctggagactcagaagtctcctgaagagttggctgctctggtgaaggcagaactgggcttcctggagagctgcctgcgggtgaaccccaagtcttatggtacctggcaccaccgatgctggctgctaggccgcctgcctgagcccaactggacccgagagctggagctctgtgcccgtttcctggaggtggatgagcggaactttcactgctgggactatcggcggtttgtggccacacaggcagccgtgccccctgcagaagagctagccttcactgacagcctcatcacccgaaacttctccaactactcttcctggcattaccgctcctgtctcttgccccagctgcacccccagccggattctggaccacaggggcgcctccctgaggatgtgctgctcaaagagctggagctggtgcagaatgccttcttcactgaccccaatgaccagagtgcctggttttatcaccgttggctcctaggccgagctgacccccaggatgcactgcgctgcctgcatgtgagccgggacgaggcctgtctgactgtctccttctctcggcccctcttagtgggctccaggatggagatcttgctgctcatggttgatgattctcccctgattgtggagtggaggaccccagatggcaggaaccggcccagccatgtctggctctgtgacctgcctgctgcctccctcaacgaccagttgccccaacatacatttcgcgtcatttggacagcaggcgatgtccagaaagaatgcgtgcttttaaaaggccgccaggagggctggtgccgggactccacgacagacgagcagctattcaggtgtgagctgtcagtggagaagtccacagtgctgcagtctgagctggaatcctgtaaggagctgcaggagctggagcctgagaataaatggtgcctgcttaccatcatcctgctgatgcgggcactggaccccctgctgtatgagaaggagaccctgcagtacttccagaccctcaaggccgtggaccccatgcgggcaacgtatctggatgacctgcgcagcaagttcttgctggagaatagcgtgctcaagatggagtatgccgaggtgcgtgtgctgcacctggctcacaaggatctgacagtgctctgccatctggaacagctgctcttggtcacccatcttgacttgtcacacaatcgcctccgaaccctgccacctgcactggctgccctgcgctgccttgaggtgctgcaggccagtgataatgccatagagtccctggacggcgtcaccaacctaccccggctgcaggagctgctactgtgcaacaaccgcctccagcagcctgcagtgctccagcctcttgcctcctgccccaggctggtcctcctcaacctgcagggtaacccgctgtgccaagcggtgggcatcttggagcaactggctgaactgctgccttcagttagcagcgtcctcacctaagaggccctgccccctacccttgccctttaacttattgggactgaataaagaatggagaggccctctcaggctaccaa

SEQ ID NO: 361665 - DNA, 2109 bp, Homo sapiens
ttcgatgagccgggacgtggcgccgctctagccagcgcctgggctctgtggcgggcgccgcagctccgcgtcccccgcgcctcctcccagcgcaggtgggtccgcccgcggggggcgggggtgcccgggagccgtgggacgggcgggtagcggcaacctttggggagcagagtggtccccaacgcccaggtgccccggctcgcgctctggcccgggcgaatcgggctataggaagggccacacggatggaagtcctagtccgggtgctcacctcttgtggaacgtgcaaagcctgtcccaggacctctttacactctgggggtctctgcccaggcacgcttgctgcttccggacacagctgtgggcggagctagtaggggcggggctacgtgattgacacttctctcctcagacttcaagggctaccactggacccttcccctgtcttgaaccctgagccggcaccatgcacggacgcctgaaggtgaagacgtcagaagagcaggcggaggccaaaaggctagagcgagagcagaagctgaagctataccagtcagccacccaggccgtattccagaagcgccaggctggtgagctggatgagtccgtgctggaactgacaagccagattctgggagccaaccctgattttgccaccctctggaactgccgacgagaggtgctccagcagctggagactcagaagtctcctgaagagttggctgctctggtgaaggcagaactgggcttcctggagagctgcctgcgggtgaaccccaagtcttatggtacctggcaccaccgatgctggctgctaggccgcctgcctgagcccaactggacccgagagctggagctctgtgcccgtttcctggaggtggatgagcggaactttcactgctgggactatcggcggtttgtggccacacaggcagccgtgccccctgcagaagagctagccttcactgacagcctcatcacccgaaacttctccaactactcttcctggcattaccgctcctgtctcttgccccagctgcacccccagccggattctggaccacaggggcgcctccctgaggatgtgctgctcaaagagctggagctggtgcagaatgccttcttcactgaccccaatgaccagagtgcctggttttatcaccgttggctcctaggccgagctgacccccaggatgcactgcgctgcctgcatgtgagccgggacgaggcctgtctgactgtctccttctctcggcccctcttagtgggctccaggatggagatcttgctgctcatggttgatgattctcccctgattgtggagtggaggaccccagatggcaggaaccggcccagccatgtctggctctgtgacctgcctgctgcctccctcaacgaccagttgccccaacatacatttcgcgtcatttggacagcaggcgatgtccagaaagaatgcgtgcttttaaaaggccgccaggagggctggtgccgggactccacgacagacgagcagctattcaggtgtgagctgtcagtggagaagtccacagtgctgcagtctgagctggaatcctgtaaggagctgcaggagctggagcctgagaataaatggtgcctgcttaccatcatcctgctgatgcgggcactggaccccctgctgtatgagaaggagaccctgcagtacttccagaccctcaaggccgtggaccccatgcgggcaacgtatctggatgacctgcgcagcaagttcttgctggagaatagcgtgctcaagatggagtatgccgaggtgcgtgtgctgcacctggctcacaaggatctgacagtgctctgccatctggaacagctgctcttggtcacccatcttgacttgtcacacaatcgcctccgaaccctgccacctgcactggctgccctgcgctgccttgaggtaaagtacccatgtctccgtccctgtcacgggtggttcttttcctcttcctctccctcagaagtctgcccatcctacaaggagatgtgcaggaccctccaccccgaacaggtaactgcgtgccttccacctccatcacgcagcctgaccctgtgagcccctctgtgctctgtgga

SEQ ID NO: 361666 - DNA, 2350 bp, Homo sapiens
ttcgatgagccgggacgtggcgccgctctagccagcgcctgggctctgtggcgggcgccgcagctccgcgtcccccgcgcctcctcccagcgcaggtgggtccgcccgcggggggcgggggtgcccgggagccgtgggacgggcgggtagcggcaacctttggggagcagagtggtccccaacgcccaggtgccccggctcgcgctctggcccgggcgaatcgggctataggaagggccacacggatggaagtcctagtccgggtgctcacctcttgtggaacgtgcaaagcctgtcccaggacctctttacactctgggggtctctgcccaggcacgcttgctgcttccggacacagctgtgggcggagctagtaggggcggggctacgtgattgacacttctctcctcagacttcaagggctaccactggacccttcccctgtcttgaaccctgagccggcaccatgcacggacgcctgaaggtgaagacgtcagaagagcaggcggaggccaaaaggctagagcgagagcagaagctgaagctataccagtcagccacccaggccgtattccagaagcgccaggctggtgagctggatgagtccgtgctggaactgacaagccagattctgggagccaaccctgattttgccaccctctggaactgccgacgagaggtgctccagcagctggagactcagaagtctcctgaagagttggctgctctggtgaaggcagaactgggcttcctggagagctgcctgcgggtgaaccccaagtcttatggtacctggcaccaccgatgctggctgctaggccgcctgcctgagcccaactggacccgagagctggagctctgtgcccgtttcctggaggtggatgagcggaactttcactgctgggactatcggcggtttgtggccacacaggcagccgtgccccctgcagaagagctagccttcactgacagcctcatcacccgaaacttctccaactactcttcctggcattaccgctcctgtctcttgccccagctgcacccccagccggattctggaccacaggggcgcctccctgaggatgtgctgctcaaagagctggagctggtgcagaatgccttcttcactgaccccaatgaccagagtgcctggttttatcaccgttggctcctaggccgagctgacccccaggatgcactgcgctgcctgcatgtgagccgggacgaggcctgtctgactgtctccttctctcggcccctcttagtgggctccaggatggagatcttgctgctcatggttgatgattctcccctgattgtggagtggaggaccccagatggcaggaaccggcccagccatgtctggctctgtgacctgcctgctgcctccctcaacgaccagttgccccaacatacatttcgcgtcatttggacagcaggcgatgtccagaaagaatgcgtgcttttaaaaggccgccaggagggctggtgccgggactccacgacagacgagcagctattcaggtgtgagctgtcagtggagaagtccacagtgctgcagtctgagctggaatcctgtaaggagctgcaggagctggagcctgagaataaatggtgcctgcttaccatcatcctgctgatgcgggcactggaccccctgctgtatgagaaggagaccctgcagtacttccagaccctcaaggccgtggaccccatgcgggcaacgtatctggatgacctgcgcagcaagttcttgctggagaatagcgtgctcaagatggagtatgccgaggtgcgtgtgctgcacctggctcacaaggtatgggctgccatgcatgccttcccctggccctcatcccgctggcctccccacgtccctgactttgcccccagtctcaggtgcctttgtggacttccaatcaagatagagttcatccctgcctcccagcttgctcctcttccaggcctttctgtcactcagcccattcttcttcttgccactcactttcaaatcccgagtcaccaggacctccttgtgctgtttcttccccaggctggtcacagcttcatcttccttcagagtgaccgctagcccactcctcccacacattccagcacatctcaccctggagcaacctccaatacctgaaggccaaatactttccagagattcctgagaagttgtccaggctccactttcctagtccttcccaacacattagttttatcacatcaccacagcccacctccattcctgccaaactcatctctgcctcatcaggaccagtccccatgggggaccagtctttgtttacccagcaccctaccactgcccctgtacctccgaact

SEQ ID NO: 361667 - DNA, 1731 bp, Homo sapiens
ttcgatgagccgggacgtggcgccgctctagccagcgcctgggctctgtggcgggcgccgcagctccgcgtcccccgcgcctcctcccagcgcaggtgggtccgcccgcggggggcgggggtgcccgggagccgtgggacgggcgggtagcggcaacctttggggagcagagtggtccccaacgcccaggtgccccggctcgcgctctggcccgggcgaatcgggctataggaagggccacacaggcagccgtgccccctgcagaagagctagccttcactgacagcctcatcacccgaaacttctccaactactcttcctggcattaccgctcctgtctcttgccccagctgcacccccagccggattctggaccacaggggcgcctccctgaggatgtgctgctcaaagagctggagctggtgcagaatgccttcttcactgaccccaatgaccagagtgcctggttttatcaccgttggctcctaggccgagctgacccccaggatgcactgcgctgcctgcatgtgagccgggacgaggcctgtctgactgtctccttctctcggcccctcttagtgggctccaggatggagatcttgctgctcatggttgatgattctcccctgattgtggagtggaggaccccagatggcaggaaccggcccagccatgtctggctctgtgacctgcctgctgcctccctcaacgaccagttgccccaacatacatttcgcgtcatttggacagcaggcgatgtccagaaagaatgcgtgcttttaaaaggccgccaggagggctggtgccgggactccacgacagacgagcagctattcaggtggtgatagggaagcacaaaacaaggagaggggctctggactctgggcatcaggcagccagggcaggaggctggggcctcaaggagctgtttcagtctagatactgggaatgttgaccagtgcttcagggctgtgggcctcaactcctccccaccctgcccaccctcaggtgtgagctgtcagtggagaagtccacagtgctgcagtctgagctggaatcctgtaaggagctgcaggagctggagcctgagaataaatggtgcctgcttaccatcatcctgctgatgcgggcactggaccccctgctgtatgagaaggagaccctgcagtacttccagaccctcaaggccgtggaccccatgcgggcaacgtatctggatgacctgcgcagcaagttcttgctggagaatagcgtgctcaagatggagtatgccgaggtgcgtgtgctgcacctggctcacaaggatctgacagtgctctgccatctggaacagctgctcttggtcacccatcttgacttgtcacacaatcgcctccgaaccctgccacctgcactggctgccctgcgctgccttgaggtgctgcaggccagtgataatgccatagagtccctggacggcgtcaccaacctaccccggctgcaggagctgctactgtgcaacaaccgcctccagcagcctgcagtgctccagcctcttgcctcctgccccaggctggtcctcctcaacctgcagggtaacccgctgtgccaagcggtgggcatcttggagcaactggctgaactgctgccttcagttagcagcgtcctcacctaagaggccctgccccctacccttgccctttaacttattgggactgaataaagaatggagaggccctctcaggctaccaa

SEQ ID NO: 361668 - DNA, 1170 bp, Homo sapiens
ttcgatgagccgggacgtggcgccgctctagccagcgcctgggctctgtggcgggcgccgcagctccgcgtcccccgcgcctcctcccagcgcaggtgggtccgcccgcggggggcgggggtgcccgggagccgtgggacgggcgggtagcggcaacctttggggagcagagtggtccccaacgcccaggtgccccggctcgcgctctggcccgggcgaatcgggctataggaagggccacacggatggaagtcctagtccgggtgctcacctcttgtggaacgtgcaaagcctgtcccaggacctctttacactctgggggtctctgcccaggcacgcttgctgcttccggacacagctgtgggcggagctagtaggggcggggctacgtgattgacacttctctcctcagacttcaagggctaccactggacccttcccctgtcttgaaccctgagccggcaccatgcacggacgcctgaaggtgaagacgtcagaagagcaggcggaggccaaaaggctagagcgagagcagaagctgaagctataccagtcagccacccaggccgtattccagaagcgccaggctggtgagctggatgagtccgtgctggaactgacaagccagattctgggagccaaccctgattttgccaccctctggaactgccgacgagaggtgctccagcagctggagactcagaagtctcctgaagagttggctgctctggtgaaggcagaactgggcttcctggagagctgcctgcgggtgaaccccaagtcttatggtacctggcaccaccgatgctggctgctaggccgcctgcctgagcccaactggacccgagagctggagctctgtgcccgtttcctggaggtggatgagcggaactttcactgctgggactatcggcggtttgtggccacacaggcagccgtgccccctgcagaagagctagccttcactgacagcctcatcacccgaaacttctccaactactcttcctggcattaccgctcctgtctcttgccccagctgcacccccagccggattctggaccacaggggcgcctccctgaggatgtgctgctcaaaggtttattgagcacctacttcatgcgtggctccaggggtgcttaagaatcagtccctggctgaaggaagcttaa

SEQ ID NO: 361669 - DNA, 1021 bp, Homo sapiens
ttcgatgagccgggacgtggcgccgctctagccagcgcctgggctctgtggcgggcgccgcagctccgcgtcccccgcgcctcctcccagcgcaggtgggtccgcccgcggggggcgggggtgcccgggagccgtgggacgggcgggtagcggcaacctttggggagcagagtggtccccaacgcccaggtgccccggctcgcgctctggcccgggcgaatcgggctataggaagggccacacggatggaagtcctagtccgggtgctcacctcttgtggaacgtgcaaagcctgtcccaggacctctttacactctgggggtctctgcccaggcacgcttgctgcttccggacacagctgtgggcggagctagtaggggcggggctacgtgattgacacttctctcctcagacttcaagggctaccactggacccttcccctgtcttgaaccctgagccggcaccatgcacggacgcctgaaggtgaagacgtcagaagagcaggcggaggccaaaaggctagagcgagagcagaagctgaagctataccagtcagccacccaggccgtattccagaagcgccaggctggtgagctggatgagtccgtgctggaactgacaagccagattctgggagccaaccctgattttgccaccctctggaactgccgacgagaggtgctccagcagctggagactcagaagtctcctgaagagttggctgctctggtgaaggcagaactgggcttcctggagagctgcctgcgggtgaaccccaagtcttatggtacctggcctccagcagcctgcagtgctccagcctcttgcctcctgccccaggctggtcctcctcaacctgcagggtaacccgctgtgccaagcggtgggcatcttggagcaactggctgaactgctgccttcagttagcagcgtcctcacctaagaggccctgccccctacccttgccctttaacttattgggactgaataaagaatggagaggccctctcaggctaccaa

SEQ ID NO: 361670 - DNA, 570 bp, Homo sapiens
ttcgatgagccgggacgtggcgccgctctagccagcgcctgggctctgtggcgggcgccgcagctccgcgtcccccgcgcctcctcccagcgcagacttcaagggctaccactggacccttcccctgtcttgaaccctgagccggcaccatgcacggacgcctgaaggtgaagacgtcagaagagcaggcggaggccaaaaggctagagcgagagcagaagctgaagctataccagtcagccacccaggccgtattccagaagcgccaggctggtgagctggatgagtccgtgctggaactgacaagccagattctgggagccaaccctgattttgccaccctctggaactgccgacgagagtgctccagcctcttgcctcctgccccaggctggtcctcctcaacctgcagggtaacccgctgtgccaagcggtgggcatcttggagcaactggctgaactgctgccttcagttagcagcgtcctcacctaagaggccctgccccctacccttgccctttaacttattgggactgaataaagaatggagaggccctctcaggctaccaa

SEQ ID NO: 361671 - DNA, 374 bp, Homo sapiens
tcagttgctgaaccatccctggctgacagcgcctgtcctgcctccctgccctccctgcccgtgctgcaggccagtgataatgccatagagtccctggacggcgtcaccaacctaccccggctgcaggagctgctactgtgcaacaaccgcctccagcagcctgcagtgctccagcctcttgcctcctgccccaggctggtcctcctcaacctgcagggtaacccgctgtgccaagcggtgggcatcttggagcaactggctgaactgctgccttcagttagcagcgtcctcacctaagaggccctgccccctacccttgccctttaacttattgggactgaataaagaatggagaggccctctcaggctaccaa

SEQ ID NO: 361672 - DNA, 2247 bp, Homo sapiens
ttcgatgagccgggacgtggcgccgctctagccagcgcctgggctctgtggcgggcgccgcagctccgcgtcccccgcgcctcctcccagcgcaggtgggtccgcccgcggggggcgggggtgcccgggagccgtgggacgggcgggtagcggcaacctttggggagcagagtggtccccaacgcccaggtgccccggctcgcgctctggcccgggcgaatcgggctataggaagggccacacggatggaagtcctagtccgggtgctcacctcttgtggaacgtgcaaagcctgtcccaggacctctttacactctgggggtctctgcccaggcacgcttgctgcttccggacacagctgtgggcggagctagtaggggcggggctacgtgattgacacttctctcctcagacttcaagggctaccactggacccttcccctgtcttgaaccctgagccggcaccatgcacggacgcctgaaggtgaagacgtcagaagagcaggcggaggccaaaaggctagagcgagagcagaagctgaagctataccagtcagccacccaggccgtattccagaagcgccaggctggtgagctggatgagtccgtgctggaactgacaagccagattctgggagccaaccctgattttgccaccctctggaactgccgacgagaggtgctccagcagctggagactcagaagtctcctgaagagttggctgctctggtgaaggcagaactgggcttcctggagagctgcctgcgggtgaaccccaagtcttatggtacctggcaccaccgatgctggctgctaggccgcctgcctgagcccaactggacccgagagctggagctctgtgcccgtttcctggaggtggatgagcggaactttcactgctgggactatcggcggtttgtggccacacaggcagccgtgccccctgcagaagagctagccttcactgacagcctcatcacccgaaacttctccaactactcttcctggcattaccgctcctgtctcttgccccagctgcacccccagccggattctggaccacaggggcgcctccctgaggatgtgctgctcaaagagctggagctggtgcagaatgccttcttcactgaccccaatgaccagagtgcctggttttatcaccgttggctcctaggccgagctgacccccaggatgcactgcgctgcctgcatgtgagccgggacgaggcctgtctgactgtctccttctctcggcccctcttagtgggctccaggatggagatcttgctgctcatggttgatgattctcccctgattgtggagtggaggaccccagatggcaggaaccggcccagccatgtctggctctgtgacctgcctgctgcctccctcaacgaccagttgccccaacatacatttcgcgtcatttggacagcaggcgatgtccagaaagaatgcgtgcttttaaaaggccgccaggagggctggtgccgggactccacgacagacgagcagctattcaggtgtgagctgtcagtggagaagtccacagtgctgcagtctgagctggaatcctgtaaggagctgcaggagctggagcctgagaataaatggtgcctgcttaccatcatcctgctgatgcgggcactggaccccctgctgtatgagaaggagaccctgcagtacttccagaccctcaaggccgtggaccccatgcgggcaacgtatctggatgacctgcgcagcaagttcttgctggagaatagcgtgctcaagatggagtatgccgaggtgcgtgtgctgcacctggctcacaaggatctgacagtgctctgccatctggaacagctgctcttggtcacccatcttgacttgtcacacaatcgcctccgaaccctgccacctgcactggctgccctgcgctgccttgaggtgctgcaggccagtgataatgccatagagtccctggacggcgtcaccaacctaccccggctgcaggagctgctactgtgcaacaaccgcctccagcagcctgcagtgctccagcctcttgcctcctgccccaggctggtcctcctcaacctgcagggtaacccgctgtgccaagcggtgggcatcttggagcaactggctgaactgctgccttcagttagcagcgtcctcacctaagaggccctgccccctacccttgccctttaacttattgggactgaataaagaatggagaggccctctcaggctaccaa

SEQ ID NO: 361673 - DNA, 3086 bp, Homo sapiens
  misc_feature (3086)..(3086): n is a, c, g, or t
ttcgatgagccgggacgtggcgccgctctagccagcgcctgggctctgtggcgggcgccgcagctccgcgtcccccgcgcctcctcccagcgcaggtgggtccgcccgcggggggcgggggtgcccgggagccgtgggacgggcgggtagcggcaacctttggggagcagagtggtccccaacgcccaggtgccccggctcgcgctctggcccgggcgaatcgggctataggaagggccacacggatggaagtcctagtccgggtgctcacctcttgtggaacgtgcaaagcctgtcccaggacctctttacactctgggggtctctgcccaggcacgcttgctgcttccggacacagctgtgggcggagctagtaggggcggggctacgtgattgacacttctctcctcagacttcaagggctaccactggacccttcccctgtcttgaaccctgagccggcaccatgcacggacgcctgaaggtgaagacgtcagaagagcaggcggaggccaaaaggctagagcgagagcagaagctgaagctataccagtcagccacccaggccgtattccagaagcgccaggctggtgagctggatgagtccgtgctggaactgacaagccagattctgggagccaaccctgattttgccaccctctggaactgccgacgagaggtgctccagcagctggagactcagaagtctcctgaagagttggctgctctggtgaaggcagaactgggcttcctggagagctgcctgcgggtgaaccccaagtcttatggtacctggcaccaccgatgctggctgctaggccgcctgcctgagcccaactggacccgagagctggagctctgtgcccgtttcctggaggtggatgagcggaactttcactgctgggactatcggcggtttgtggccacacaggcagccgtgccccctgcagaagagctagccttcactgacagcctcatcacccgaaacttctccaactactcttcctggcattaccgctcctgtctcttgccccagctgcacccccagccggattctggaccacaggggcgcctccctgaggatgtgctgctcaaagagctggagctggtgcagaatgccttcttcactgaccccaatgaccagagtgcctggttttatcaccgttggctcctaggccgagctgacccccaggatgcactgcgctgcctgcatgtgagccgggacgaggcctgtctgactgtctccttctctcggcccctcttagtgggctccaggatggagatcttgctgctcatggttgatgattctcccctgattgtggagtggaggaccccagatggcaggaaccggcccagccatgtctggctctgtgacctgcctgctgcctccctcaacgaccagttgccccaacatacatttcgcgtcatttggacagcaggcgatgtccagaaagaatgcgtgcttttaaaaggccgccaggagggctggtgccgggactccacgacagacgagcagctattcaggtgtgagctgtcagtggagaagtccacagtgctgcagtctgagctggaatcctgtaaggagctgcaggagctggagcctgagaataaatggtgcctgcttaccatcatcctgctgatgcgggcactggaccccctgctgtatgagaaggagaccctgcagtacttccagaccctcaaggccgtggaccccatgcgggcaacgtatctggatgacctgcgcagcaagttcttgctggagaatagcgtgctcaagatggagtatgccgaggtgcgtgtgctgcacctggctcacaaggatctgacagtgctctgccatctggaacagctgctcttggtcacccatcttgacttgtcacacaatcgcctccgaaccctgccacctgcactggctgccctgcgctgccttgaggtgctgcaggccagtgataatgccatagagtccctggacggcgtcaccaacctaccccggctgcaggagctgctactgtgcaacaaccgcctccagcagcctgcagtgctccagcctcttgcctcctgccccaggctggtcctcctcaacctgcagggtaacccgctgtgccaagcggtgggcatcttggagcaactggctgaactgctgccttcagttagcagcgtcctcacctaagaggccctgccccctacccttgccctttaacttattgggactgaataaagaatggagaggccctctcaggctaccaaaaaaaaaaaaaaaaaaaaaaaaaaaaaaaaaaaaaaaaaaaaaaaaaaaaaaaaaaaaaaaaaaaaagaagaggggggcggcgcagcaaaaaatcatccaccaagagggggccacacaaaaagcccgcgaaacaacgtagtgagtaacagaaaggggacccaacagagagggagagcgccacatatatagcacgagcgacacgacagcgaggagaaaaaaacaacagagccacgagcagagggcaacccacccgcaggagaccgagggaacagccaccacttggggaggccacgaccccacgccctacagagcgggggcgaaggccaacaacaaagaggagcagaccacaaaacaccaccaccacacggaaaaaactagaagacaaccacgggagggagcaacaccaaaaaacacaagagaagaaagagaacaaaacaagtgaggcaacaaacacaagaagcagaaggaagacacaagatacagcagaaggagaaagacacaacaataccggcgacacaaaagcgggacacagtagtcccagacaagacagaagtaatatttaagcacacggggggaccagaagacatacaaaacaaacacaacaaacagaagcgaacggaccaacccccagaccaggacggagcgagcaagaaccgaaaacagacaacaggacgacgaaccaggaagaaggaacgacgacaggacagaagagaaagagacgcacggaaaaagaggagcgggaggaaagaggaagaagaggagcgacaaggagaacagagacgagcaacggcacaaccagagagcggagacaagaacgaagggagaccaccaagagagn

SEQ ID NO: 361674 - DNA, 2298 bp, Homo sapiens
ttcgatgagccgggacgtggcgccgctctagccagcgcctgggctctgtggcgggcgccgcagctccgcgtcccccgcgcctcctcccagcgcaggtgggtccgcccgcggggggcgggggtgcccgggagccgtgggacgggcgggtagcggcaacctttggggagcagagtggtccccaacgcccaggtgccccggctcgcgctctggcccgggcgaatcgggctataggaagggccacacggatggaagtcctagtccgggtgctcacctcttgtggaacgtgcaaagcctgtcccaggacctctttacactctgggggtctctgcccaggcacgcttgctgcttccggacacagctgtgggcggagctagtaggggcggggctacgtgattgacacttctctcctcagacttcaagggctaccactggacccttcccctgtcttgaaccctgagccggcaccatggtcagcttctgcaaggcaacctgcactcttccaacccgttcatccttgtagcacggacgcctgaaggtgaagacgtcagaagagcaggcggaggccaaaaggctagagcgagagcagaagctgaagctataccagtcagccacccaggccgtattccagaagcgccaggctggtgagctggatgagtccgtgctggaactgacaagccagattctgggagccaaccctgattttgccaccctctggaactgccgacgagaggtgctccagcagctggagactcagaagtctcctgaagagttggctgctctggtgaaggcagaactgggcttcctggagagctgcctgcgggtgaaccccaagtcttatggtacctggcaccaccgatgctggctgctaggccgcctgcctgagcccaactggacccgagagctggagctctgtgcccgtttcctggaggtggatgagcggaactttcactgctgggactatcggcggtttgtggccacacaggcagccgtgccccctgcagaagagctagccttcactgacagcctcatcacccgaaacttctccaactactcttcctggcattaccgctcctgtctcttgccccagctgcacccccagccggattctggaccacaggggcgcctccctgaggatgtgctgctcaaagagctggagctggtgcagaatgccttcttcactgaccccaatgaccagagtgcctggttttatcaccgttggctcctaggccgagctgacccccaggatgcactgcgctgcctgcatgtgagccgggacgaggcctgtctgactgtctccttctctcggcccctcttagtgggctccaggatggagatcttgctgctcatggttgatgattctcccctgattgtggagtggaggaccccagatggcaggaaccggcccagccatgtctggctctgtgacctgcctgctgcctccctcaacgaccagttgccccaacatacatttcgcgtcatttggacagcaggcgatgtccagaaagaatgcgtgcttttaaaaggccgccaggagggctggtgccgggactccacgacagacgagcagctattcaggtgtgagctgtcagtggagaagtccacagtgctgcagtctgagctggaatcctgtaaggagctgcaggagctggagcctgagaataaatggtgcctgcttaccatcatcctgctgatgcgggcactggaccccctgctgtatgagaaggagaccctgcagtacttccagaccctcaaggccgtggaccccatgcgggcaacgtatctggatgacctgcgcagcaagttcttgctggagaatagcgtgctcaagatggagtatgccgaggtgcgtgtgctgcacctggctcacaaggatctgacagtgctctgccatctggaacagctgctcttggtcacccatcttgacttgtcacacaatcgcctccgaaccctgccacctgcactggctgccctgcgctgccttgaggtgctgcaggccagtgataatgccatagagtccctggacggcgtcaccaacctaccccggctgcaggagctgctactgtgcaacaaccgcctccagcagcctgcagtgctccagcctcttgcctcctgccccaggctggtcctcctcaacctgcagggtaacccgctgtgccaagcggtgggcatcttggagcaactggctgaactgctgccttcagttagcagcgtcctcacctaagaggccctgccccctacccttgccctttaacttattgggactgaataaagaatggagaggccctctcaggctaccaa

SEQ ID NO: 361675 - DNA, 2308 bp, Homo sapiens
ttcgatgagccgggacgtggcgccgctctagccagcgcctgggctctgtggcgggcgccgcagctccgcgtcccccgcgcctcctcccagcgcaggtgggtccgcccgcggggggcgggggtgcccgggagccgtgggacgggcgggtagcggcaacctttggggagcagagtggtccccaacgcccaggtgccccggctcgcgctctggcccgggcgaatcgggctataggaagggccacacggatggaagtcctagtccgggtgctcacctcttgtggaacgtgcaaagcctgtcccaggacctctttacactctgggggtctctgcccaggcacgcttgctgcttccggacacagctgtgggcggagctagtaggggcggggctacgtgattgacacttctctcctcagacttcaagggctaccactggacccttcccctgtcttgaaccctgagccggcaccatgcacggacgcctgaaggtgaagacgtcagaagagcaggcggaggccaaaaggctagagcgagagcagaagctgaagctataccagtcagccacccaggccgtattccagaagcgccaggctggtgagctggatgagtccgtgctggaactgacaagccagattctgggagccaaccctgattttgccaccctctggaactgccgacgagaggtgctccagcagctggagactcagaagtctcctgaagagttggctgctctggtgaaggcagaactgggcttcctggagagctgcctgcgggtgaaccccaagtcttatggtacctggcaccaccgatgctggctgctaggccgcctgcctgagcccaactggacccgagagctggagctctgtgcccgtttcctggaggtggatgagcggaactttcactgctgggactatcggcggtttgtggccacacaggcagccgtgccccctgcagaagagctagccttcactgacagcctcatcacccgaaacttctccaactactcttcctggcattaccgctcctgtctcttgccccagctgcacccccagccggattctggaccacaggggcgcctccctgaggatgtgctgctcaaagagctggagctggtgcagaatgccttcttcactgaccccaatgaccagagtgcctggttttatcaccgttggctcctaggccgagctgacccccaggatgcactgcgctgcctgcatgtgagccgggacgaggcctgtctgactgtctccttctctcggcccctcttagtgggctccaggatggagatcttgctgctcatggttgatgattctcccctgattgtggagtggaggaccccagatggcaggaaccggcccagccatgtctggctctgtgacctgcctgctgcctccctcaacgaccagttgccccaacatacatttcgcgtcatttggacagcaggcgatgtccagaaagaatgcgtgcttttaaaaggccgccaggagggctggtgccgggactccacgacagacgagcagctattcaggtgtgagctgtcagtggagaagtccacagtgctgcagtctgagctggaatcctgtaaggagctgcaggagctggagcctgagaataaatggtgcctgcttaccatcatcctgctgatgcgggcactggaccccctgctgtatgagaaggagaccctgcagtacttccagaccctcaaggccgtggaccccatgcgggcaacgtatctggatgacctgcgcagcaagttcttgctggagaatagcgtgctcaagatggagtatgccgaggtgcgtgtgctgcacctggctcacaaggatctgacagtgctctgccatctggaacagctgctcttggtcacccatcttgacttgtcacacaatcgcctccgaaccctgccacctgcactggctgccctgcgctgccttgaggtgctgcaggccagtgataatgccatagagtccctggacggcgtcaccaacctaccccggctgcaggagctgctactgtgcaacaaccgcctccagcagcctgcagtgctccagcctcttgcctcctgccccaggctggtcctcctcaacctgcagggtaacccgctgtgccaagcggtgggcatcttggagcaactggctgaactgctgccttcagttagcagcgtcctcacctaagaggccctgccccctacccttgccctttaacttattgggactgaataaagaatggagaggccctctcaggctaccaaaaaaaaacacaacaaaacacaaaaacaaaaacaaacacaacaacacaacacacccaaaccc

SEQ ID NO: 361676 - DNA, 1208 bp, Homo sapiens
gtatctagagatccctcataatgtgtgccaagggcgctcctgaggatgtgctgctcaaagctggagctggtgcagaatgccttcttcactgaccccaatgaccagagtgcctggttttatcaccgttggctcctaggccgagctgacccccaggatgcactgcgctgcctgcatgtgagccgggacgaggcctgtctgactgtctccttctctcggcccctcttagtgggctccaggatggagatcttgctgctcatggttgatgattctcccctgattgtggagtggaggaccccagatggcaggaaccggcccagccatgtctggctctgtgacctgcctgctgcctccctcaacgaccagttgccccaacatacatttcgcgtcatttggacagcaggcgatgtccagaaagaatgcgtgcttttaaaaggccgccaggagggctggtgccgggactccacgacagacgagcagctattcaggtgtgagctgtcagtggagaagtccacagtgctgcagtctgagctggaatcctgtaaggagctgcaggagctggagcctgagaataaatggtgcctgcttaccatcatcctgctgatgcgggcactggaccccctgctgtatgagaaggagaccctgcagtacttccagaccctcaaggccgtggaccccatgcgggcaacgtatctggatgacctgcgcagcaagttcttgctggagaatagcgtgctcaagatggagtatgccgaggtgcgtgtgctgcacctggctcacaaggatctgacagtgctctgccatctggaacagctgctcttggtcacccatcttgacttgtcacacaatcgcctccgaaccctgccacctgcactggctgccctgcgctgccttgaggtgctgcaggccagtgataatgccatagagtccctggacggcgtcaccaacctaccccggctgcaggagctgctactgtgcaacaaccgcctccagcagcctgcagtgctccagcctcttgcctcctgccccaggctggtcctcctcaacctgcagggtaacccgctgtgccaagcggtgggcatcttggagcaactggctgaactgctgccttcagttagcagcgtcctcacctaagaggccctgccccctacccttgccctttaacttattgggactgaataaagaatggagaggccctctcaggctaccaa

SEQ ID NO: 361677 - DNA, 1285 bp, Homo sapiens
  misc_feature (1190)..(1190): n is a, c, g, or t
  misc_feature (1243)..(1243): n is a, c, g, or t
ttcgatgagccgggacgtggcgccgctctagccagcgcctgggctctgtggcgggcgccgcagctccgcgtcccccgcgcctcctcccagcgcaggtgggtccgcccgcggggggcgggggtgcccgggagccgtgggacgggcgggtagcggcaacctttggggagcagagtggtccccaacgcccaggtgccccggctcgcgctctggcccgggcgaatcgggctataggaagggccacacggatggaagtcctagtccgggtgctcacctcttgtggaacgtgcaaagcctgtcccaggacctctttacactctgggggtctctgcccaggcacgcttgctgcttccggacacagctgtgggcggagctagtaggggcggggctacgtgattgacacttctctcctcagacttcaagggctaccactggacccttcccctgtcttgaaccctgagccggcaccatgcacggacgcctgaaggtgaagacgtcagaagagcaggcggaggccaaaaggctagagcgagagcagaagctgaagctataccagtcagccacccaggccgtattccagaagcgccaggctggtgagctggatgagtccgtgctggaactgacaagccagattctgggagccaaccctgattttgccaccctctggaactgccgacgagaggtgctccagcagctggagactcagaagtctcctgaagagttggctgctctggtgaaggcagaactgggcttcctggagagctgcctgcgggtgaaccccaagtcttatggtacctggcaccaccgatgctggctgctaggccgcctgcctgagcccaactggacccgagagctggagctctgtgcccgtttcctggaggtggatgagcggaactttcactgctgggactatcggcggtttgtggccacacaggcagccgtgccccctgcagaagagctagccttcactgacagcctcatcacccgaaacttctccaactactcttcctggcattaccgctcctgtctcttgccccagctgcacccccagccggattctggaccacaggggcgcctccctgaggatgtgctgctcaaagagctggagctggtgcagaatgccttcttcactgaccccaatgaccagagtgcctggttttatcaccgttggctcctaggccgagtgaccccangatcactggctgctgatgtgaccggacaagctgctgctgctctttttggcctntatggctcagatgaacttgtgtatgtgtatctcctatgggag

SEQ ID NO: 361678 - DNA, 1260 bp, Homo sapiens
ttcgatgagccgggacgtggcgccgctctagccagcgcctgggctctgtggcgggcgccgcagctccgcgtcccccgcgcctcctcccagcgcaggtgggtccgcccgcggggggcgggggtgcccgggagccgtgggacgggcgggtagcggcaacctttggggagcagagtggtccccaacgcccaggtgccccggctcgcgctctggcccgggcgaatcgggctataggaagggccacacggatggaagtcctagtccgggtgctcacctcttgtggaacgtgcaaagcctgtcccaggacctctttacactctgggggtctctgcccaggcacgcttgctgcttccggacacagctgtgggcggagctagtaggggcggggctacgtgattgacacttctctcctcagacttcaagggctaccactggacccttcccctgtcttgaaccctgagccggcaccatgcacggacgcctgaaggtgaagacgtcagaagagcaggcggaggccaaaaggctagagcgagagcagaagctgaagctataccagtcagccacccaggccgtattccagaagcgccaggctggtgagctggatgagtccgtgctggaactgacaagccagattctgggagccaaccctgattttgccaccctctggaactgccgacgagaggtgctccagcagctggagactcagaagtctcctgaagagttggctgctctggtgaaggcagaactgggcttcctggagagctgcctgcgggtgaaccccaagtcttatggtacctggcaccaccgatgctggctgctaggccgcctgcctgagcccaactggacccgagagctggagctctgtgcccgtttcctggaggtggatgagcggaactttcactgctgggactatcggcggtttgtggccacacaggcagccgtgccccctgcagaagagctagccttcactgacagcctcatcacccgaaacttctccaactactcttcctggcattaccgctcctgtctcttgccccagctgcacccccagccggattctggaccacaggggcgcctccctgaggatgtgctgctcaaagggtaaccagggtcagggatgctcaggaggactctgcagtgccacccttccagcccccatgcctgaccctgttcctgaacctgtcactcaggtttattgagcacctacttcatgcgtggctccaggggtgcttaagaatcagtccctggctgaaggaagcttaa

SEQ ID NO: 361679 - DNA, 871 bp, Homo sapiens
agcggaagcgctcgcctctgggcccgccttcggggcccggatctcaaacagtcgggaagaagcaccgtggctgctattatctgctctccgcgcctgacccctcccaggactcgtgatgccaaggccgctgcgagcggctacgaagagtcggggttgagccccagctgagccgagggctcgcactcttctggtctcccaggcccaacccacctgaaggtaaacgcctcctcagctgcggccttctctcctgcggggccccctccccagactcggctgccaaaacgctctgcccctctctcccgccaccctttttattccaggaccttaacctctgcctgccttcgcggctctcagcagaacgtgtaacgcatagtttcaaatgagaaacttaaaaagcgacgtatctatgttgagttcctgaagttttctaaataattcccccataacaccaaacatgaggcagttttctcattccttcacgaattggcatgccatagagtcagtatttttccatttgtgatggttgatcttcccatctcaaatacacaccgcacgctctttttaaatcagaaatttgaatttggttgagcctgatattttcacggtaatttgctgactttgtaagataagatgtgaaaattactgattacatttgtaaactttatatacatatacacacatacctacaggtctgtctcttcgaggcaccaagcctatttatataatgtatcatttcataatttgggcaataagcaaaattagcgtttcgaaagaagtttatattgtcgatacataaagcttaaatttactccttaaatcatactaaaaggggaaaagaaaattttcctcttaacacaccactccagagaaa

SEQ ID NO: 361680 - DNA, 1171 bp, Homo sapiens
agcggaagcgctcgcctctgggcccgccttcggggcccggatctcaaacagtcgggaagaagcaccgtggctgctattatctgctctccgcgcctgacccctcccaggactcgtgatgccaaggccgctgcgagcggctacgaagagtcggggttgagccccagctgagccgagggctcgcactcttctggtctcccaggcccaacccacctgaagaaatgagtggtggattggctccaagtaagagcacagtgtatgtatccaacttgcctttttccctgacaaacaatgacttgtaccggatattttccaagtatggcaaagttgtaaaggttaccatcatgaaagataaagataccaggaagagtaaaggggttgcatttattttatttttggataaagactctgcacaaaactgtaccagggcaataaacaacaaacagttatttggtagagtgataaaagcaagcattgctattgacaatggaagagcagctgagttcatccgaaggcgaaactactttgataaatctaagtgttatgaatgtggggaaagtggacacttaagttatgcctgtccgaaaaatatgctcggagaacgtgagcctccaaagaagaaagaaaaaaagaaaaaaaagaaagctcctgaaccagaagaagaaattgaggaagtagaagaaagtgaagatgaaggggaggatcctgctcttgacagcctcagtcaggccatagcattccagcaagccaaaattgaagaagaacaaaaaaaatggaaacccagttcaggagtcccctcaacatcagatgattcaagacgcccaaggataaagaaaagcacatatttcagtgatgaggaagaacttagtgattaaaatcttgccccagcacagtaataaaaatcaagatttgttagtaacaatcttgaagagctaattttaataaaaataagaaaaattaatactatcatgttaatactattattgtcatcccaagaaaaaagatattttaaaaatttatttgaaaagttcattataagggctttattcatgcctgatttgtttacatgaggacttctgaaattaatccttaaaacaaacttcctgaagaccgaaaagttgaatgatttattgttacttatattaataaacttttcaagagaattttgtcttta

SEQ ID NO: 361681 - DNA, 1856 bp, Homo sapiens
agcggaagcgctcgcctctgggcccgccttcggggcccggatctcaaacagtcgggaagaagcaccgtggctgctattatctgctctccgcgcctgacccctcccaggactcgtgatgccaaggccgctgcgagcggctacgaagagtcggggttgagccccagctgagccgagggctcgcactcttctggtctcccaggcccaacccacctgaagaaatgagtggtggattggctccaagtaagagcacagtgtatgtatccaacttgcctttttccctgacaaacaatgacttgtaccggatattttccaagtatggcaaagttgtaaaggttaccatcatgaaagataaagataccaggaagagtaaaggggttgcatttattttatttttggataaagactctgcacaaaactgtaccagggcaataaacaacaaacagttatttggtagagtgataaaagcaagcattgctattgacaatggaagagcagctgagttcatccgaaggcgaaactactttgataaatctaagtgttatgaatgtggggaaagtggacacttaagttatgcctgtccgaaaaatatgctcggagaacgtgagcctccaaagaagaaagaaaaaaagaaaaaaaagaaagctcctgaaccagaagaagaaattgaggaagtagaagaaagtgaagatgaaggggaggatcctgctcttgacagcctcagtcaggccatagcattccagcaagccaaaattgaagaagaacaaaaaaaatggaaacccagttcaggagtcccctcaacatcagatgattcaagacgcccaaggataaagaaaagcacatatttcagtgatgaggaagaacttagtgattaaaatcttgccccagcacagtaataaaaatcaagatttgttagtaacaatcttgaagagctaattttaataaaaataagaaaaattaatactatcatgttaatactattattgtcatcccaagaaaaaagatattttaaaaatttatttgaaaagttcattataagggctttattcatgcctgatttgtttacatgaggacttctgaaattaatccttaaaacaaacttcctgaagaccgaaaagttgaatgatttattgttacttatattaataaacttttcaagagaattttgtctttaaaaaaaaatgttttgtcatcatatttcttgtagctttatcccaatctggataaattgtaaatacctataaaataaattataaatacctataaaatataaagtaacatagctctaaaaggcttaaaatcaaacacaggtgttatttgtctgccctacccatagcaccaaattccattccctagaagaaactacttacatgtgcacacatgtagctaaataaagtacatatatttcagtcacttaataaaagaataaaggagaattattcaatctcttatacttctcctaccttcctcaatattcccaatgtggctgtattaaaaatttgggggaatccatatatatcttttttaataaccaagtaaatacttttcatttctgagccaaggaatatgctatgattacgttttttcctagagttaataattgtctattttttttccatgtattgtctttgtatttatgactaaatcttcccattctgtctgcaggtgggtatatggtaatgggattagagagcctttaattttctgctttgtatatttctatattgtttaactttgtaagaatgcccattacttttttaactagtaaaagcaatagaaataagttaatactatcatagtaatattattattgtcatcccaagaaaaaatatattaaaaagatatttgaaatttcatta

SEQ ID NO: 361682 - DNA, 1085 bp, Homo sapiens
ccactcccccccgtttagcagcccgcacacgctctgcatccatctctgggaaaggtaaaaagcgctcaccgactctggccctccgggagaccccgtaaatgcagccgtccgctcgccgccgttatcccagaaatgagtggtggattggctccaagtaagagcacagtgtatgtatccaacttgcctttttccctgacaaacaatgacttgtaccggatattttccaagtatggcaaagttgtaaaggttaccatcatgaaagataaagataccaggaagagtaaaggggttgcatttattttatttttggataaagactctgcacaaaactgtaccagggcaataaacaacaaacagttatttggtagagtgataaaagcaagcattgctattgacaatggaagagcagctgagttcatccgaaggcgaaactactttgataaatctaagtgttatgaatgtggggaaagtggacacttaagttatgcctgtccgaaaaatatgctcggagaacgtgagcctccaaagaagaaagaaaaaaagaaaaaaaagaaagctcctgaaccagaagaagaaattgaggaagtagaagaaagtgaagatgaaggggaggatcctgctcttgacagcctcagtcaggccatagcattccagcaagccaaaattgaagaagaacaaaaaaaatggaaacccagttcaggagtcccctcaacatcagatgattcaagacgcccaaggataaagaaaagcacatatttcagtgatgaggaagaacttagtgattaaaatcttgccccagcacagtaataaaaatcaagatttgttagtaacaatcttgaagagctaattttaataaaaataagaaaaattaatactatcatgttaatactattattgtcatcccaagaaaaaagatattttaaaaatttatttgaaaagttcattataagggctttattcatgcctgatttgtttacatgaggacttctgaaattaatccttaaaacaaacttcctgaagaccgaaaagttgaatgatttattgttacttatattaataaacttttcaagagaattttgtcttta

SEQ ID NO: 361683 - DNA, 1085 bp, Homo sapiens
agcggaagcgctcgcctctgggcccgccttcggggcccggatctcaaacagtcgggaagaagcaccgtggctgctattatctgctctccgcgcctgacccctcccaggactcgtgatgccaaggccgctgcgagcggctacgaagagtcggggttgagccccagctgagccgagggctcgcactcttctggtctcccaggcccaacccacctgaagatattttccaagtatggcaaagttgtaaaggttaccatcatgaaagataaagataccaggaagagtaaaggggttgcatttattttatttttggataaagactctgcacaaaactgtaccagggcaataaacaacaaacagttatttggtagagtgataaaagcaagcattgctattgacaatggaagagcagctgagttcatccgaaggcgaaactactttgataaatctaagtgttatgaatgtggggaaagtggacacttaagttatgcctgtccgaaaaatatgctcggagaacgtgagcctccaaagaagaaagaaaaaaagaaaaaaaagaaagctcctgaaccagaagaagaaattgaggaagtagaagaaagtgaagatgaaggggaggatcctgctcttgacagcctcagtcaggccatagcattccagcaagccaaaattgaagaagaacaaaaaaaatggaaacccagttcaggagtcccctcaacatcagatgattcaagacgcccaaggataaagaaaagcacatatttcagtgatgaggaagaacttagtgattaaaatcttgccccagcacagtaataaaaatcaagatttgttagtaacaatcttgaagagctaattttaataaaaataagaaaaattaatactatcatgttaatactattattgtcatcccaagaaaaaagatattttaaaaatttatttgaaaagttcattataagggctttattcatgcctgatttgtttacatgaggacttctgaaattaatccttaaaacaaacttcctgaagaccgaaaagttgaatgatttattgttacttatattaataaacttttcaagagaattttgtcttta

SEQ ID NO: 361684 - DNA, 1268 bp, Homo sapiens
agcggaagcgctcgcctctgggcccgccttcggggcccggatctcaaacagtcgggaagaagcaccgtggctgctattatctgctctccgcgcctgacccctcccaggactcgtgatgccaaggccgctgcgagcggctacgaagagtcggggttgagccccagctgagccgagggctcgcactcttctggtctcccaggcccaacccacctgaagaaatgagtggtggattggctccaagtaagagcacagtgtatgtatccaacttgcctttttccctgacaaacaatgacttgtaccggatattttccaagtatggcaaagttgtaaaggttaccatcatgaaagataaagataccaggaagagtaaaggggttgcatttattttatttttggataaagactctgcacaaaactgtaccagggcaataaacaacaaacagttatttggtagagtgataaaagcaagcattgctattgacaatggaagagcagctgagttcatccgaaggcgaaactactttgataaatctaagtgttatgaatgtgggggacacttaagttatgcctgtccgaaaaatatgctcggagaacgtgagcctccaaagaagaaactactttgataaatctaagtgttatgaatgtggggaaagtggacacttaagttatgcctgtccgaaaaatatgctcggagaacgtgagcctccaaagaagaaagaaaaaaagaaaaaaaagaaagctcctgaaccagaagaagaaattgaggaagtagaagaaagtgaagatgaaggggaggatcctgctcttgacagcctcagtcaggccatagcattccagcaagccaaaattgaagaagaacaaaaaaaatggaaacccagttcaggagtcccctcaacatcagatgattcaagacgcccaaggataaagaaaagcacatatttcagtgatgaggaagaacttagtgattaaaatcttgccccagcacagtaataaaaatcaagatttgttagtaacaatcttgaagagctaattttaataaaaataagaaaaattaatactatcatgttaatactattattgtcatcccaagaaaaaagatattttaaaaatttatttgaaaagttcattataagggctttattcatgcctgatttgtttacatgaggacttctgaaattaatccttaaaacaaacttcctgaagaccgaaaagttgaatgatttattgttacttatattaataaacttttcaagagaattttgtcttta

SEQ ID NO: 361685 - DNA, 870 bp, Homo sapiens
agcagcagaaaatacattcttcctaagtgcacatggaacattcttgaggacaactcacatgttaggccacaaaacgagtcttaataaactttagaagactgaaatcataccaagtatcttttctgaccacaatggtatgaaactagaaataataaaaagaattttggaaaatttcacaaatacaaagaaattgaacaacatgctcgtgaacaatagccagacaaggacactacaagaaaagaaaattatagaccaatgggactacatcagcatagatacaaaaatcctcaataaggccaggtgcaatgtggctcacacctgtaataccagcactttaaaagactgagacaggaggattacttgagcccaggagtttaaggcctgcagtaaaccaagattatgccactgcactccagcctgggtgacaaagcaagaccagcaagccaaaattgaagaagaacaaaaaaaatggaaacccagttcaggagtcccctcaacatcagatgattcaagacgcccaaggataaagaaaagcacatatttcagtgatgaggaagaacttagtgattaaaatcttgccccagcacagtaataaaaatcaagatttgttagtaacaatcttgaagagctaattttaataaaaataagaaaaattaatactatcatgttaatactattattgtcatcccaagaaaaaagatattttaaaaatttatttgaaaagttcattataagggctttattcatgcctgatttgtttacatgaggacttctgaaattaatccttaaaacaaacttcctgaagaccgaaaagttgaatgatttattgttacttatattaataaacttttcaagagaattttgtcttta

SEQ ID NO: 361686 - DNA, 806 bp, Homo sapiens
agcggaagcgctcgcctctgggcccgccttcggggcccggatctcaaacagtcgggaagaagcaccgtggctgctattatctgctctccgcgcctgacccctcccaggactcgtgatgccaaggccgctgcgagcggctacgaagagtcggggttgagccccagctgagccgagggctcgcactcttctggtctcccaggcccaacccacctgaagaaatgagtggtggattggctccaagtaagagcacagtgtatgtatccaacttgcctttttccctgacaaacaatgacttgtaccggatattttccaagtatggcaaagttgtaaaggttaccatcatgaaagataaagataccaggaagagtaaaggggttgcatttattttatttttggataaagactctgcacaaaactgtaccagggcaataaacaacaaacagttatttggtagagtgataaaagcaagcattgctattgacaatggaagagcagctgagttcatccgaaggcgaaactactttgataaatctaagtgttatgaatgtggggaaagtggacacttaagttatgcctgtccgaaaaatatgctcggagaacgtgagcctccaaagaagaaagaaaaaaagaaaaaaacaagcaaccccatcaaaaagtaggcaaaggatatgaaaagacacttctcaaaagaaaacatttatgcagccaacagacatatgaaaaaatgctcatcatcactgatcatcaaagaaatgcaaatcaaaatcacaatgagacaccatctcatgccagttagaatggtgatc

SEQ ID NO: 361687 - DNA, 1122 bp, Homo sapiens
agcggaagcgctcgcctctgggcccgccttcggggcccggatctcaaacagtcgggaagaagcaccgtggctgctattatctgctctccgcgcctgacccctcccaggactcgtgatgccaaggccgctgcgagcggctacgaagagtcggggttgagccccagctgagccgagggctcgcactcttctggtctcccaggcccaacccacctgaagaaatgagtggtggattggctccaagtaagagcacagtatattttccaagtatggcaaagttgtaaaggttaccatcatgaaagataaagataccaggaagagtaaaggggttgcatttattttatttttggataaagactctgcacaaaactgtaccagggcaataaacaacaaacagttatttggtagagtgataaaagcaagcattgctattgacaatggaagagcagctgagttcatccgaaggcgaaactactttgataaatctaagtgttatgaatgtggggaaagtggacacttaagttatgcctgtccgaaaaatatgctcggagaacgtgagcctccaaagaagaaagaaaaaaagaaaaaaaagaaagctcctgaaccagaagaagaaattgaggaagtagaagaaagtgaagatgaaggggaggatcctgctcttgacagcctcagtcaggccatagcattccagcaagccaaaattgaagaagaacaaaaaaaatggaaacccagttcaggagtcccctcaacatcagatgattcaagacgcccaaggataaagaaaagcacatatttcagtgatgaggaagaacttagtgattaaaatcttgccccagcacagtaataaaaatcaagatttgttagtaacaatcttgaagagctaattttaataaaaataagaaaaattaatactatcatgttaatactattattgtcatcccaagaaaaaagatattttaaaaatttatttgaaaagttcattataagggctttattcatgcctgatttgtttacatgaggacttctgaaattaatccttaaaacaaacttcctgaagaccgaaaagttgaatgatttattgttacttatattaataaacttttcaagagaattttgtcttta

SEQ ID NO: 361688 - DNA, 1026 bp, Homo sapiens
gtaaccaaaaaaaactttttcctagggcctgtcttatagactgaaggctgaaattattcataaactgtaacaaagaatttggtcaatgtctgcaacctaaaaatttgatgttttatgattttaaaataaattgtaaatatttggtcttttgtttcagatattttccaagtatggcaaagttgtaaaggttaccatcatgaaagataaagataccaggaagagtaaaggggttgcatttattttatttttggataaagactctgcacaaaactgtaccagggcaataaacaacaaacagttatttggtagagtgataaaagcaagcattgctattgacaatggaagagcagctgagttcatccgaaggcgaaactactttgataaatctaagtgttatgaatgtggggaaagtggacacttaagttatgcctgtccgaaaaatatgctcggagaacgtgagcctccaaagaagaaagaaaaaaagaaaaaaaagaaagctcctgaaccagaagaagaaattgaggaagtagaagaaagtgaagatgaaggggaggatcctgctcttgacagcctcagtcaggccatagcattccagcaagccaaaattgaagaagaacaaaaaaaatggaaacccagttcaggagtcccctcaacatcagatgattcaagacgcccaaggataaagaaaagcacatatttcagtgatgaggaagaacttagtgattaaaatcttgccccagcacagtaataaaaatcaagatttgttagtaacaatcttgaagagctaattttaataaaaataagaaaaattaatactatcatgttaatactattattgtcatcccaagaaaaaagatattttaaaaatttatttgaaaagttcattataagggctttattcatgcctgatttgtttacatgaggacttctgaaattaatccttaaaacaaacttcctgaagaccgaaaagttgaatgatttattgttacttatattaataaacttttcaagagaattttgtcttta

SEQ ID NO: 361689 - DNA, 409 bp, Homo sapiens
catgattagcactgcactccagtcctttatgtaattatcttattcaatcttacaacaattttatatggctataagtgaataagtgtcttgtccatggccgcacaactccagagcccctatctacatattctttttcctatgggttgcaaaggagaggctttgcacaaaatctaagtaaggctgaagaaagaaatatataaagatggttattttattatagtaaaatcttgactgcctggtacacaggtggtgtgatttcttctttgaaatcaaaatttcacatgattgtatttactcttaatcaatgctaattcaaaagcaccctcttgacaattcatcatccagaaataacctcttactcctttcccttttcatttcaattggaaaaaaaataattataacaaattga

SEQ ID NO: 361690 - DNA, 1647 bp, Homo sapiens
ttttagaagtgagtgatgcaataaactgtgtgatcatttttacaaagtcaataggttttattgaaaatactggtttctgtcagtatgtttgcttgttattacactgtgttgtaccagtcttaataattaatttgtttgtgtttttactatttaccaacaggctaatgtatttatactacatattttcttccatagaactccactttgacaattgaagaatttcattccaaactgcaagaagctactaacttcccactgagaccttttgtcatcccatttttgaagaggtattgcacagttcactggtctgtaaagtattttaaaccatattgttgctaggtcataactgtgtgcttttttagtacatttaggggctctttgatttaatttaatggatgaaaactatctgaatcgattgtatttatgaccatttcctaagtagtctgaaaattacaaggagtgttttaaataattacctgaaaagaagtaaagtttgaagaagagtttagaagtcctctttgaataaaggttttgttcatttttttggtcatatgagatatgttattttacattttgcttgtctttagagtgaacagaagattggttgagctttgtagttgttcaggatttttttatcctcctaattttatctttgtaacaacttaacgggaagatcagaccgtcatccttttgtgccagtgaagaagttgggagtaagtgacatgtccaaggtgtgcctggctgaggactgattgaggtgtgggattcgaaatggtttttaagtctctgctgtgagctttctgtctcctccaactgctgccgcttcagtaaagcaactggaaaacaaacaaacacaaagttcacaagagaaagaaggaacatttttattcagcatagcgggtagttaattcactgatggatactaaaataactggtagttttggtagaaaagcagattactaagatcccttttacttgggtaagcatattgcttgggcatagtggattctcaataagtttatactaacagtgggcttagcagattgataaatgtgaaagtttcatttgcactcccctttgaaggtcactttcaaaatgagcactcaaggaagcctctgatttaattatttgccaaggaggatttacctttctgtctggttcctagaactttgtttgggagacaccagaaatataactgatcagatcctgtgtgaaatttcatctatttttaaaactgtatcagacacataaggttcaagtaagtatccagaagcctagaaaggtttgtctgaaatgagccccaattctgaactttctggatattagtctttcctgttgttattattaaggtgaaatgaaatattctgctttgtgagtacctacaaaccagaaattagatctgtttgtgtggaaacccagattacaattatattcttttcgttcttttctaagttgtacatttaaggttaaaggtataatgtgttagtgttttctcccaaaatggcttatactataatactatattcttatttaaaagcaaattgtttgttgaacaatttgaacaagtttgttgagactagaatctttgcctttctcagaaagcgttgttttctgtaaagatttcatcatatgaatgccatttcctgt

SEQ ID NO: 361691 - DNA, 4272 bp, Homo sapiens
catagagccagcgggcgcgggcgggacgggcgccccgcggccggacccagccagggcaccacgctgcccggccctgcgccgccaggcacttctttccggggctcctagggacgccagaaggaagtcaacctctgctgcttctccttggcctgcgttggaccttcctttttttgttgtttttttttgtttttcccctttcttccttttgaattaactggcttcttggctggatgttttcaacttctttcctggctgcgaacttttccccaattgttttccttttacaacagggggagaaagtgctctgtggtccgaggcgagccgtgaagttgcgtgtgcgtggcagtgtgcgtggcaggatgtgcgtgcgtgtgtaacccgagccgcccgatctgtttcgatctgcgccgcggagccctccctcaaggcccgctccacctgctgcggttacgcggcgctcgtgggtgttcgtgcctcggagcagctaaccggcgggtgctgggcgacggtggaggagtatcgtctcgctgctgcccgagtcagggctgagtcacccagctgatgtagacagtggctgccttccgaagagtgcgtgtttgcatgtgtgtgactctgcggctgctcaactcccaacaaaccagaggaccagccacaaacttaaccaacatccccaaacccgagttcacagatgtgggagagctgtagaaccctgagtgtcatcgactgggccttcttatgattgttgttttaagattagctgaagatctctgaaacgctgaattttctgcactgagcgttttgacagaattcattgagagaacagagaacatgacaagtacttctagctcagcactgctccaactactgaagctgattttcaaggctacttaaaaaaatctgcagcgtacattaatggatttctgttgtgtttaaattctccacagattgtattgtaaatattttatgaagtagagcatatgtatatatttatatatacgtgcacatacattagtagcactacctttggaagtctcagctcttgcttttcgggactgaagccagttttgcatgataaaagtggccttgttacgggagataattgtgttctgttgggactttagacaaaactcacctgcaaaaaactgacaggcattaactactggaacttccaaataatgtgtttgctgatcgttttactcttcgcataaatattttaggaagtgtatgagaattttgccttcaggaacttttctaacagccaaagacagaacttaacctctgcaagcaagattcgtggaagatagtctccactttttaatgcactaagcaatcggttgctaggagcccatcctgggtcagaggccgatccgcagaaccagaacgttttcccctcctggactgttagtaacttagtctccctcctcccctaaccacccccgcccccccccaccccccgcagtaataaaggcccctgaacgtgtatgttggtctcccgggagctgcttgctgaagatccgcgcccctgtcgccgtctggtaggagctgtttgcagggtcctaactcaatcggcttgttgtgatgcgtatccccgtagatgccagcacgagccgccgcttcacgccgccttccaccgcgctgagcccaggcaagatgagcgaggcgttgccgctgggcgccccggacgccggcgctgccctggccggcaagctgaggagcggcgaccgcagcatggtggaggtgctggccgaccacccgggcgagctggtgcgcaccgacagccccaacttcctctgctccgtgctgcctacgcactggcgctgcaacaagaccctgcccatcgctttcaaggtggtggccctaggggatgttccagatggcactctggtcactgtgatggctggcaatgatgaaaactactcggctgagctgagaaatgctaccgcagccatgaagaaccaggttgcaagatttaatgacctcaggtttgtcggtcgaagtggaagagggaaaagcttcactctgaccatcactgtcttcacaaacccaccgcaagtcgccacctaccacagagccatcaaaatcacagtggatgggccccgagaacctcgaaatcgtactgagaagcactccacaatgccagactcacctgtggatgtgaagacgcaatctaggctgactcctccaacaatgccacctcccccaactactcaaggagctccaagaaccagttcatttacaccgacaacgttaactaatggcacgagccattctcctacagccttgaatggcgccccctcaccacccaatggcttcagcaatgggccttcctcttcttcctcctcctctctggctaatcaacagctgcccccagcctgtggtgccaggcaactcagcaagctgaaaaggttccttactaccctgcagcagtttggcaatgacatttcacccgagataggagaaagagttcgcaccctcgttctgggactagtgaactccactttgacaattgaagaatttcattccaaactgcaagaagctactaacttcccactgagaccttttgtcatcccatttttgaaggccaacttgcccctgctgcagcgtgagctcctccactgcgcaagactggccaaacagaaccctgcccagtacctcgcccagcatgaacagctgcttctggatgccagcaccacctcacctgttgactcctcagagctgcttctcgatgtgaacgaaaacgggaagaggcgaactccagacagaaccaaagaaaatggctttgacagagagcctttgcactcagaacatccaagcaagcgaccatgcactattagcccaggccagcggtacagtccaaataacggcttatcctaccagcccaatggcctgcctcaccctaccccacctccacctcagcattaccgtttggatgatatggccattgcccaccactacagggactcctatcgacaccccagccacagggacctcagggacagaaacagacctatggggttgcatggcacacgtcaagaagaaatgattgatcacagactaacagacagagaatgggcagaagagtggaaacatcttgaccatctgttaaactgcataatggacatggtagaaaaaacaaggcgatctctcaccgtactaaggcggtgtcaagaagcagaccgggaagaattgaattactggatccggcggtacagtgacgccgaggacttaaaaaaaggtggcggcagtagcagcagccactctaggcagcagagtcccgtcaacccagacccagttgcactagacgcgcatcgggaattccttcacaggcctgcgtctggatacgtgccagaggagatctggaagaaagctgaggaggccgtcaatgaggtgaagcgccaggcgatgacggagctgcagaaggccgtgtctgaggcggagcggaaagcccacgacatgatcacaacagagagggccaagatggagcgcacggtcgccgaggccaaacggcaggcggcggaggacgcactggcagttatcaatcagcaggaggattcaagcgagagttgctggaattgtggccgtaaagcgagtgaaacctgcagtggctgtaacacagcccgatactgtggctcattttgccagcacaaagactgggagaagcaccatcacatctgtggacagaccctgcaggcccagcagcagggagacacacctgcagtcagctcctctgtcacgcccaacagcggggctgggagcccgatggacacaccaccagcagccactccgaggtcaaccaccccgggaaccccttccaccatagagacaacccctcgctagacgtgaactcagaactgtcggaggaaagacaacacaaccaacgcgaaaccaattcctcatcctcagatgctcaaagttgttttttttgtttgtttgtttattagatgaattatcctatttcagtacttcagcaagagagaacctaactgtatcttgaggtggtagtaaaacacagagggccagtaacgggtcgtaatgacttattgtggataacaaagatatcttttctttagagaactgaaaagagagcagagaatataacatgaaatgatagatttgacctcctccctgttattttcaagtagctgggattttaaactagatgacctcattaaccgatgctttaccaaacagcaaaccaagagattgctaattgctgttgaaagcaaaaatgctaatattaaaagtcacaatgttctttatatacaataatgg

SEQ ID NO: 361692 - DNA, 2369 bp, Homo sapiens
tggcgaattcggcacgaggcaggagaagtgaagatgtaacatgttatctgtcgctcctcttagctggcggagagaatttacatttaaagattagcagagtgagaaagagaaatctgccttttgttgtgtggggtgaggaggaggcatctacccctggccttgacgctatctcccatcacctctgctatccagacaggactcaccgagatcgtactgagaagcactccacaatgccagactcacctgtggatgtgaagacgcaatctaggctgactcctccaacaatgccacctcccccaactactcaaggagctccaagaaccagttcatttacaccgacaacgttaactaatggcacgagccattctcctacagccttgaatggcgccccctcaccacccaatggcttcagcaatgggccttcctcttcttcctcctcctctctggctaatcaacagctgcccccagcctgtggtgccaggcaactcagcaagctgaaaaggttccttactaccctgcagcagtttggcaatgacatttcacccgagataggagaaagagttcgcaccctcgttctgggactagtgaactccactttgacaattgaagaatttcattccaaactgcaagaagctactaacttcccactgagaccttttgtcatcccatttttgaaggccaacttgcccctgctgcagcgtgagctcctccactgcgcaagactggccaaacagaaccctgcccagtacctcgcccagcatgaacagctgcttctggatgccagcaccacctcacctgttgactcctcagagctgcttctcgatgtgaacgaaaacgggaagaggcgaactccagacagaaccaaagaaaatggctttgacagagagcctttgcactcagaacatccaagcaagcgaccatgcactattagcccaggccagcggtacagtccaaataacggcttatcctaccagcccaatggcctgcctcaccctaccccacctccacctcagcattaccgtttggatgatatggccattgcccaccactacagggactcctatcgacaccccagccacagggacctcagggacagaaacagacctatggggttgcatggcacacgtcaagaagaaatgattgatcacagactaacagacagagaatgggcagaagagtggaaacatcttgaccatctgttaaactgcataatggacatggtagaaaaaacaaggcgatctctcaccgtactaaggcggtgtcaagaagcagaccgggaagaattgaattactggatccggcggtacagtgacgccgaggacttaaaaaaaggtggcggcagtagcagcagccactctaggcagcagagtcccgtcaacccagacccagttgcactagacgcgcatcgggaattccttcacaggcctgcgtctggatacgtgccagaggagatctggaagaaagctgaggaggccgtcaatgaggtgaagcgccaggcgatgacggagctgcagaaggccgtgtctgaggcggagcggaaagcccacgacatgatcacaacagagagggccaagatggagcgcacggtcgccgaggccaaacggcaggcggcggaggacgcactggcagttatcaatcagcaggaggattcaagcgagagttgctggaattgtggccgtaaagcgagtgaaacctgcagtggctgtaacacagcccgatactgtggctcattttgccagcacaaagactgggagaagcaccatcacatctgtggacagaccctgcaggcccagcagcagggagacacacctgcagtcagctcctctgtcacgcccaacagcggggctgggagcccgatggacacaccaccagcagccactccgaggtcaaccaccccgggaaccccttccaccatagagacaacccctcgctagacgtgaactcagaactgtcggaggaaagacaacacaaccaacgcgaaaccaattcctcatcctcagatgctcaaagttgttttttttgtttgtttgtttattagatgaattatcctatttcagtacttcagcaagagagaacctaactgtatcttgaggtggtagtaaaacacagagggccagtaacgggtcgtaatgacttattgtggataacaaagatatcttttctttagagaactgaaaagagagcagagaatataacatgaaatgatagatttgacctcctccctgttattttcaagtagctgggattttaaactagatgacctcattaaccgatgctttaccaaacagcaaaccaagagattgctaattgctgttgaaagcaaaaatgctaatattaaaagtcacaatgttctttatatacaataatgg

SEQ ID NO: 361693 - DNA, 2334 bp, Homo sapiens
aaagattgatctctgggctggtgaacataatctctgtcccagtcagaaaaggagagaggaaattagcagagcgattggtggagaatgatatctgtcaaaagaaacacttggagagcactgagtttagtaataggtgactgccggaaaaaagggaactttgaatattgtcaagatcgtactgagaagcactccacaatgccagactcacctgtggatgtgaagacgcaatctaggctgactcctccaacaatgccacctcccccaactactcaaggagctccaagaaccagttcatttacaccgacaacgttaactaatggcacgagccattctcctacagccttgaatggcgccccctcaccacccaatggcttcagcaatgggccttcctcttcttcctcctcctctctggctaatcaacagctgcccccagcctgtggtgccaggcaactcagcaagctgaaaaggttccttactaccctgcagcagtttggcaatgacatttcacccgagataggagaaagagttcgcaccctcgttctgggactagtgaactccactttgacaattgaagaatttcattccaaactgcaagaagctactaacttcccactgagaccttttgtcatcccatttttgaaggccaacttgcccctgctgcagcgtgagctcctccactgcgcaagactggccaaacagaaccctgcccagtacctcgcccagcatgaacagctgcttctggatgccagcaccacctcacctgttgactcctcagagctgcttctcgatgtgaacgaaaacgggaagaggcgaactccagacagaaccaaagaaaatggctttgacagagagcctttgcactcagaacatccaagcaagcgaccatgcactattagcccaggccagcggtacagtccaaataacggcttatcctaccagcccaatggcctgcctcaccctaccccacctccacctcagcattaccgtttggatgatatggccattgcccaccactacagggactcctatcgacaccccagccacagggacctcagggacagaaacagacctatggggttgcatggcacacgtcaagaagaaatgattgatcacagactaacagacagagaatgggcagaagagtggaaacatcttgaccatctgttaaactgcataatggacatggtagaaaaaacaaggcgatctctcaccgtactaaggcggtgtcaagaagcagaccgggaagaattgaattactggatccggcggtacagtgacgccgaggacttaaaaaaaggtggcggcagtagcagcagccactctaggcagcagagtcccgtcaacccagacccagttgcactagacgcgcatcgggaattccttcacaggcctgcgtctggatacgtgccagaggagatctggaagaaagctgaggaggccgtcaatgaggtgaagcgccaggcgatgacggagctgcagaaggccgtgtctgaggcggagcggaaagcccacgacatgatcacaacagagagggccaagatggagcgcacggtcgccgaggccaaacggcaggcggcggaggacgcactggcagttatcaatcagcaggaggattcaagcgagagttgctggaattgtggccgtaaagcgagtgaaacctgcagtggctgtaacacagcccgatactgtggctcattttgccagcacaaagactgggagaagcaccatcacatctgtggacagaccctgcaggcccagcagcagggagacacacctgcagtcagctcctctgtcacgcccaacagcggggctgggagcccgatggacacaccaccagcagccactccgaggtcaaccaccccgggaaccccttccaccatagagacaacccctcgctagacgtgaactcagaactgtcggaggaaagacaacacaaccaacgcgaaaccaattcctcatcctcagatgctcaaagttgttttttttgtttgtttgtttattagatgaattatcctatttcagtacttcagcaagagagaacctaactgtatcttgaggtggtagtaaaacacagagggccagtaacgggtcgtaatgacttattgtggataacaaagatatcttttctttagagaactgaaaagagagcagagaatataacatgaaatgatagatttgacctcctccctgttattttcaagtagctgggattttaaactagatgacctcattaaccgatgctttaccaaacagcaaaccaagagattgctaattgctgttgaaagcaaaaatgctaatattaaaagtcacaatgttctttatatacaataatgg

SEQ ID NO: 361694 - DNA, 3942 bp, Homo sapiens
catagagccagcgggcgcgggcgggacgggcgccccgcggccggacccagccagggcaccacgctgcccggccctgcgccgccaggcacttctttccggggctcctagggacgccagaaggaagtcaacctctgctgcttctccttggcctgcgttggaccttcctttttttgttgtttttttttgtttttcccctttcttccttttgaattaactggcttcttggctggatgttttcaacttctttcctggctgcgaacttttccccaattgttttccttttacaacagggggagaaagtgctctgtggtccgaggcgagccgtgaagttgcgtgtgcgtggcagtgtgcgtggcaggatgtgcgtgcgtgtgtaacccgagccgcccgatctgtttcgatctgcgccgcggagccctccctcaaggcccgctccacctgctgcggttacgcggcgctcgtgggtgttcgtgcctcggagcagctaaccggcgggtgctgggcgacggtggaggagtatcgtctcgctgctgcccgagtcagggctgagtcacccagctgatgtagacagtggctgccttccgaagagtgcgtgtttgcatgtgtgtgactctgcggctgctcaactcccaacaaaccagaggaccagccacaaacttaaccaacatccccaaacccgagttcacagatgtgggagagctgtagaaccctgagtgtcatcgactgggccttcttatgattgttgttttaagattagctgaagatctctgaaacgctgaattttctgcactgagcgttttgacagaattcattgagagaacagagaacatgacaagtacttctagctcagcactgctccaactactgaagctgattttcaaggctacttaaaaaaatctgcagcgtacattaatggatttctgttgtgtttaaattctccacagattgtattgtaaatattttatgaagtagagcatatgtatatatttatatatacgtgcacatacattagtagcactacctttggaagtctcagctcttgcttttcgggactgaagccagttttgcatgataaaagtggccttgttacgggagataattgtgttctgttgggactttagacaaaactcacctgcaaaaaactgacaggcattaactactggaacttccaaataatgtgtttgctgatcgttttactcttcgcataaatattttaggaagtgtatgagaattttgccttcaggaacttttctaacagccaaagacagaacttaacctctgcaagcaagattcgtggaagatagtctccactttttaatgcactaagcaatcggttgctaggagcccatcctgggtcagaggccgatccgcagaaccagaacgttttcccctcctggactgttagtaacttagtctccctcctcccctaaccacccccgcccccccccaccccccgcagtaataaaggcccctgaacgtgtatgttggtctcccgggagctgcttgctgaagatccgcgcccctgtcgccgtctggtaggagctgtttgcagggtcctaactcaatcggcttgttgtgatgcgtatccccgtagatgccagcacgagccgccgcttcacgccgccttccaccgcgctgagcccaggcaagatgagcgaggcgttgccgctgggcgccccggacgccggcgctgccctggccggcaagctgaggagcggcgaccgcagcatggtggaggtgctggccgaccacccgggcgagctggtgcgcaccgacagccccaacttcctctgctccgtgctgcctacgcactggcgctgcaacaagaccctgcccatcgctttcaaggtggtggccctaggggatgttccagatggcactctggtcactgtgatggctggcaatgatgaaaactactcggctgagctgagaaatgctaccgcagccatgaagaaccaggttgcaagatttaatgacctcaggtttgtcggtcgaagtggaagagggaaaagcttcactctgaccatcactgtcttcacaaacccaccgcaagtcgccacctaccacagagccatcaaaatcacagtggatgggccccgagaacctcgaaatcgtactgagaagcactccacaatgccagactcacctgtggatgtgaagacgcaatctaggctgactcctccaacaatgccacctcccccaactactcaaggagctccaagaaccagttcatttacaccgacaacgttaactaatggcacgagccattctcctacagccttgaatggcgccccctcaccacccaatggcttcagcaatgggccttcctcttcttcctcctcctctctggctaatcaacagctgcccccagcctgtggtgccaggcaactcagcaagctgaaaaggttccttactaccctgcagcagtttggcaatgacatttcacccgagataggagaaagagttcgcaccctcgttctgggactagtgaactccactttgacaattgaagaatttcattccaaactgcaagaagctactaacttcccactgagaccttttgtcatcccatttttgaagaggtattgcacagttcactggtctgtaaagtattttaaaccatattgttgctaggtcataactgtgtgcttttttagtacatttaggggctctttgatttaatttaatggatgaaaactatctgaatcgattgtatttatgaccatttcctaagtagtctgaaaattacaaggagtgttttaaataattacctgaaaagaagtaaagtttgaagaagagtttagaagtcctctttgaataaaggttttgttcatttttttggtcatatgagatatgttattttacattttgcttgtctttagagtgaacagaagattggttgagctttgtagttgttcaggatttttttatcctcctaattttatctttgtaacaacttaacgggaagatcagaccgtcatccttttgtgccagtgaagaagttgggagtaagtgacatgtccaaggtgtgcctggctgaggactgattgaggtgtgggattcgaaatggtttttaagtctctgctgtgagctttctgtctcctccaactgctgccgcttcagtaaagcaactggaaaacaaacaaacacaaagttcacaagagaaagaaggaacatttttattcagcatagcgggtagttaattcactgatggatactaaaataactggtagttttggtagaaaagcagattactaagatcccttttacttgggtaagcatattgcttgggcatagtggattctcaataagtttatactaacagtgggcttagcagattgataaatgtgaaagtttcatttgcactcccctttgaaggtcactttcaaaatgagcactcaaggaagcctctgatttaattatttgccaaggaggatttacctttctgtctggttcctagaactttgtttgggagacaccagaaatataactgatcagatcctgtgtgaaatttcatctatttttaaaactgtatcagacacataaggttcaagtaagtatccagaagcctagaaaggtttgtctgaaatgagccccaattctgaactttctggatattagtctttcctgttgttattattaaggtgaaatgaaatattctgctttgtgagtacctacaaaccagaaattagatctgtttgtgtggaaacccagattacaattatattcttttcgttcttttctaagttgtacatttaaggttaaaggtataatgtgttagtgttttctcccaaaatggcttatactataatactatattcttatttaaaagcaaattgtttgttgaacaatttgaacaagtttgttgagactagaatctttgcctttctcagaaagcgttgttttctgtaaagatttcatcatatgaatgccatttcctgt

SEQ ID NO: 361695 - DNA, 3304 bp, Homo sapiens
tggcgaattcggcacgaggcaggagaagtgaagatgtaacatgttatctgtcgctcctcttagctggcggagagaatttacatttaaagattagcagagtgagaaagagaaatctgccttttgttgtgtggggtgaggaggaggcatctacccctggccttgacgctatctcccatcacctctgctatccagacaggactcaccgagatcgtactgagaagcactccacaatgccagactcacctgtggatgtgaagacgcaatctaggctgactcctccaacaatgccacctcccccaactactcaaggagctccaagaaccagttcatttacaccgacaacgttaactaatggcacgagccattctcctacagccttgaatggcgccccctcaccacccaatggcttcagcaatgggccttcctcttcttcctcctcctctctggctaatcaacagctgcccccagcctgtggtgccaggcaactcagcaagctgaaaaggttccttactaccctgcagcagtttggcaatgacatttcacccgagataggagaaagagttcgcaccctcgttctgggactagtgaactccactttgacaattgaagaatttcattccaaactgcaagaagctactaacttcccactgagaccttttgtcatcccatttttgaaggccaacttgcccctgctgcagcgtgagctcctccactgcgcaagactggccaaacagaaccctgcccagtacctcgcccagcatgaacagctgcttctggatgccagcaccacctcacctgttgactcctcagagctgcttctcgatgtgaacgaaaacgggaagaggcgaactccagacagaaccaaagaaaatggctttgacagagagcctttgcactcagaacatccaagcaagcgaccatgcactattagcccaggccagcggtacagtccaaataacggcttatcctaccagcccaatggcctgcctcaccctaccccacctccacctcagcattaccgtttggatgatatggccattgcccaccactacagggactcctatcgacaccccagccacagggacctcagggacagaaacagacctatggggttgcatggcacacgtcaagaagaaatgattgatcacagactaacagacagagaatgggcagaagagtggaaacatcttgaccatctgttaaactgcataatggacatggtagaaaaaacaaggcgatctctcaccgtactaaggcggtgtcaagaagcagaccgggaagaattgaattactggatccggcggtacagtgacgccgaggacttaaaaaaaggtggcggcagtagcagcagccactctaggcagcagagtcccgtcaacccagacccagttgcactagacgcgcatcgggaattccttcacaggcctgcgtctggatacgtgccagaggagatctggaagaaagctgaggaggccgtcaatgaggtgaagcgccaggcgatgacggagctgcagaaggccgtgtctgaggcggagcggaaagcccacgacatgatcacaacagagagggccaagatggagcgcacggtcgccgaggccaaacggcaggcggcggaggacgcactggcagttatcaatcagcaggaggattcaagcgagagttgctggaattgtggccgtaaagcgagtgaaacctgcagtggctgtaacacagcccgatactgtggctcattttgccagcacaaagactgggagaagcaccatcacatctgtggacagaccctgcaggcccagcagcagggagacacacctgcagtcagctcctctgtcacgcccaacagcggggctgggagcccgatggacacaccaccagcagccactccgaggtcaaccaccccgggaaccccttccaccatagagacaacccctcgctagacgtgaactcagaactgtcggaggaaagacaacacaaccaacgcgaaaccaattcctcatcctcagatgctcaaagttgttttttttgtttgtttgtttattagatgaattatcctatttcagtacttcagcaagagagaacctaactgtatcttgaggtggtagtaaaacacagagggccagtaacgggtcgtaatgacttattgtggataacaaagatatcttttctttagagaactgaaaagagagcagagaatataacatgaaatgatagatttgacctcctccctgttattttcaagtagctgggattttaaactagatgacctcattaaccgatgctttaccaaacagcaaaccaagagattgctaattgctgttgaaagcaaaaatgctaatattaaaagtcacaatgttctttatatacaataatggaaaaaaaaaaaagaggaaaaccctcaagggcatgagcattggatacagcagtagacattttaacaagaagatgaatggcgtccgtgggttgctaactgaactttgaagacccgctacaaaacgcgcagatgtgcagcagattggaaggagacacagatgttcggtttttttcctgtttctgaaaagaaataataatatccaggtcaacagaatgaaaaatgaaagatgatttgcaatgggatgtatgaatacagcagcaagaaaaaaaaatgccataatacaaaaggctccatatatatatatatatatatatatatacacacacacacacacgcacatatatacacacacacacacacacacacacacacacacacacacacacacacagaagtaagagactcagcctgcagttaattagcattctggcagttttgacatcagccagctgccctaaataacccttcaacgtttcttcacttttgcaaggttccacagagtaagacattgggtctattccagctcattcattttatattgaaaaaaataattttaaaaatggtggcttcagctccagcccctttccaaaatttttcaaccccaccctgtttggatttttaattaaaaactagtagttctcttggtgttaaaacacttctgtcctgtgaggtttcccaatggtgtttttcttgtaaatgtgttggacaaatgtgaagatgcattgtagtttaaccatatgcccacatttagtctctttattcctagttggtgagaaacctgtatctttctatgctgcttttatatctgtatgtattagtgatatttctctagtagttaaaaaaaaaaaaaggaaaaaaagactctttttggttgtcctcaagaaaagaaaagaagaaaagctatctttcggagctgctatttcactctcttatagg

SEQ ID NO: 361696 - DNA, 5275 bp, Homo sapiens
catagagccagcgggcgcgggcgggacgggcgccccgcggccggacccagccagggcaccacgctgcccggccctgcgccgccaggcacttctttccggggctcctagggacgccagaaggaagtcaacctctgctgcttctccttggcctgcgttggaccttcctttttttgttgtttttttttgtttttcccctttcttccttttgaattaactggcttcttggctggatgttttcaacttctttcctggctgcgaacttttccccaattgttttccttttacaacagggggagaaagtgctctgtggtccgaggcgagccgtgaagttgcgtgtgcgtggcagtgtgcgtggcaggatgtgcgtgcgtgtgtaacccgagccgcccgatctgtttcgatctgcgccgcggagccctccctcaaggcccgctccacctgctgcggttacgcggcgctcgtgggtgttcgtgcctcggagcagctaaccggcgggtgctgggcgacggtggaggagtatcgtctcgctgctgcccgagtcagggctgagtcacccagctgatgtagacagtggctgccttccgaagagtgcgtgtttgcatgtgtgtgactctgcggctgctcaactcccaacaaaccagaggaccagccacaaacttaaccaacatccccaaacccgagttcacagatgtgggagagctgtagaaccctgagtgtcatcgactgggccttcttatgattgttgttttaagattagctgaagatctctgaaacgctgaattttctgcactgagcgttttgacagaattcattgagagaacagagaacatgacaagtacttctagctcagcactgctccaactactgaagctgattttcaaggctacttaaaaaaatctgcagcgtacattaatggatttctgttgtgtttaaattctccacagattgtattgtaaatattttatgaagtagagcatatgtatatatttatatatacgtgcacatacattagtagcactacctttggaagtctcagctcttgcttttcgggactgaagccagttttgcatgataaaagtggccttgttacgggagataattgtgttctgttgggactttagacaaaactcacctgcaaaaaactgacaggcattaactactggaacttccaaataatgtgtttgctgatcgttttactcttcgcataaatattttaggaagtgtatgagaattttgccttcaggaacttttctaacagccaaagacagaacttaacctctgcaagcaagattcgtggaagatagtctccactttttaatgcactaagcaatcggttgctaggagcccatcctgggtcagaggccgatccgcagaaccagaacgttttcccctcctggactgttagtaacttagtctccctcctcccctaaccacccccgcccccccccaccccccgcagtaataaaggcccctgaacgtgtatgttggtctcccgggagctgcttgctgaagatccgcgcccctgtcgccgtctggtaggagctgtttgcagggtcctaactcaatcggcttgttgtgatgcgtatccccgtagatgccagcacgagccgccgcttcacgccgccttccaccgcgctgagcccaggcaagatgagcgaggcgttgccgctgggcgccccggacgccggcgctgccctggccggcaagctgaggagcggcgaccgcagcatggtggaggtgctggccgaccacccgggcgagctggtgcgcaccgacagccccaacttcctctgctccgtgctgcctacgcactggcgctgcaacaagaccctgcccatcgctttcaaggtggtggccctaggggatgttccagatggcactctggtcactgtgatggctggcaatgatgaaaactactcggctgagctgagaaatgctaccgcagccatgaagaaccaggttgcaagatttaatgacctcaggtttgtcggtcgaagtggaagagggaaaagcttcactctgaccatcactgtcttcacaaacccaccgcaagtcgccacctaccacagagccatcaaaatcacagtggatgggccccgagaacctcgaaataaaccccacttgaaaaactgaggtgcttaaggagtaaaataatatgttcctggtggcatcctccagatcgtactgagaagcactccacaatgccagactcacctgtggatgtgaagacgcaatctaggctgactcctccaacaatgccacctcccccaactactcaaggagctccaagaaccagttcatttacaccgacaacgttaactaatggcacgagccattctcctacagccttgaatggcgccccctcaccacccaatggcttcagcaatgggccttcctcttcttcctcctcctctctggctaatcaacagctgcccccagcctgtggtgccaggcaactcagcaagctgaaaaggttccttactaccctgcagcagtttggcaatgacatttcacccgagataggagaaagagttcgcaccctcgttctgggactagtgaactccactttgacaattgaagaatttcattccaaactgcaagaagctactaacttcccactgagaccttttgtcatcccatttttgaaggccaacttgcccctgctgcagcgtgagctcctccactgcgcaagactggccaaacagaaccctgcccagtacctcgcccagcatgaacagctgcttctggatgccagcaccacctcacctgttgactcctcagagctgcttctcgatgtgaacgaaaacgggaagaggcgaactccagacagaaccaaagaaaatggctttgacagagagcctttgcactcagaacatccaagcaagcgaccatgcactattagcccaggccagcggtacagtccaaataacggcttatcctaccagcccaatggcctgcctcaccctaccccacctccacctcagcattaccgtttggatgatatggccattgcccaccactacagggactcctatcgacaccccagccacagggacctcagggacagaaacagacctatggggttgcatggcacacgtcaagaagaaatgattgatcacagactaacagacagagaatgggcagaagagtggaaacatcttgaccatctgttaaactgcataatggacatggtagaaaaaacaaggcgatctctcaccgtactaaggcggtgtcaagaagcagaccgggaagaattgaattactggatccggcggtacagtgacgccgaggacttaaaaaaaggtggcggcagtagcagcagccactctaggcagcagagtcccgtcaacccagacccagttgcactagacgcgcatcgggaattccttcacaggcctgcgtctggatacgtgccagaggagatctggaagaaagctgaggaggccgtcaatgaggtgaagcgccaggcgatgacggagctgcagaaggccgtgtctgaggcggagcggaaagcccacgacatgatcacaacagagagggccaagatggagcgcacggtcgccgaggccaaacggcaggcggcggaggacgcactggcagttatcaatcagcaggaggattcaagcgagagttgctggaattgtggccgtaaagcgagtgaaacctgcagtggctgtaacacagcccgatactgtggctcattttgccagcacaaagactgggagaagcaccatcacatctgtggacagaccctgcaggcccagcagcagggagacacacctgcagtcagctcctctgtcacgcccaacagcggggctgggagcccgatggacacaccaccagcagccactccgaggtcaaccaccccgggaaccccttccaccatagagacaacccctcgctagacgtgaactcagaactgtcggaggaaagacaacacaaccaacgcgaaaccaattcctcatcctcagatgctcaaagttgttttttttgtttgtttgtttattagatgaattatcctatttcagtacttcagcaagagagaacctaactgtatcttgaggtggtagtaaaacacagagggccagtaacgggtcgtaatgacttattgtggataacaaagatatcttttctttagagaactgaaaagagagcagagaatataacatgaaatgatagatttgacctcctccctgttattttcaagtagctgggattttaaactagatgacctcattaaccgatgctttaccaaacagcaaaccaagagattgctaattgctgttgaaagcaaaaatgctaatattaaaagtcacaatgttctttatatacaataatggaaaaaaaaaaaagaggaaaaccctcaagggcatgagcattggatacagcagtagacattttaacaagaagatgaatggcgtccgtgggttgctaactgaactttgaagacccgctacaaaacgcgcagatgtgcagcagattggaaggagacacagatgttcggtttttttcctgtttctgaaaagaaataataatatccaggtcaacagaatgaaaaatgaaagatgatttgcaatgggatgtatgaatacagcagcaagaaaaaaaaatgccataatacaaaaggctccatatatatatatatatatatatatatacacacacacacacacgcacatatatacacacacacacacacacacacacacacacacacacacacacacacagaagtaagagactcagcctgcagttaattagcattctggcagttttgacatcagccagctgccctaaataacccttcaacgtttcttcacttttgcaaggttccacagagtaagacattgggtctattccagctcattcattttatattgaaaaaaataattttaaaaatggtggcttcagctccagcccctttccaaaatttttcaaccccaccctgtttggatttttaattaaaaactagtagttctcttggtgttaaaacacttctgtcctgtgaggtttcccaatggtgtttttcttgtaaatgtgttggacaaatgtgaagatgcattgtagtttaaccatatgcccacatttagtctctttattcctagttggtgagaaacctgtatctttctatgctgcttttatatctgtatgtattagtgatatttctctagtagttaaaaaaaaaaaaaggaaaaaaagactctttttggttgtcctcaagaaaagaaaagaagaaaagctatctttcggagctgctatttcactctcttatagg

SEQ ID NO: 361697 - DNA, 3163 bp, Homo sapiens
gggaagttttattgtgctagctcggagcctgtggcggatggtgggactctccgtgccctgtggagtatcgtactgagaagcactccacaatgccagactcacctgtggatgtgaagacgcaatctaggctgactcctccaacaatgccacctcccccaactactcaaggagctccaagaaccagttcatttacaccgacaacgttaactaatggcacgagccattctcctacagccttgaatggcgccccctcaccacccaatggcttcagcaatgggccttcctcttcttcctcctcctctctggctaatcaacagctgcccccagcctgtggtgccaggcaactcagcaagctgaaaaggttccttactaccctgcagcagtttggcaatgacatttcacccgagataggagaaagagttcgcaccctcgttctgggactagtgaactccactttgacaattgaagaatttcattccaaactgcaagaagctactaacttcccactgagaccttttgtcatcccatttttgaaggccaacttgcccctgctgcagcgtgagctcctccactgcgcaagactggccaaacagaaccctgcccagtacctcgcccagcatgaacagctgcttctggatgccagcaccacctcacctgttgactcctcagagctgcttctcgatgtgaacgaaaacgggaagaggcgaactccagacagaaccaaagaaaatggctttgacagagagcctttgcactcagaacatccaagcaagcgaccatgcactattagcccaggccagcggtacagtccaaataacggcttatcctaccagcccaatggcctgcctcaccctaccccacctccacctcagcattaccgtttggatgatatggccattgcccaccactacagggactcctatcgacaccccagccacagggacctcagggacagaaacagacctatggggttgcatggcacacgtcaagaagaaatgattgatcacagactaacagacagagaatgggcagaagagtggaaacatcttgaccatctgttaaactgcataatggacatggtagaaaaaacaaggcgatctctcaccgtactaaggcggtgtcaagaagcagaccgggaagaattgaattactggatccggcggtacagtgacgccgaggacttaaaaaaaggtggcggcagtagcagcagccactctaggcagcagagtcccgtcaacccagacccagttgcactagacgcgcatcgggaattccttcacaggcctgcgtctggatacgtgccagaggagatctggaagaaagctgaggaggccgtcaatgaggtgaagcgccaggcgatgacggagctgcagaaggccgtgtctgaggcggagcggaaagcccacgacatgatcacaacagagagggccaagatggagcgcacggtcgccgaggccaaacggcaggcggcggaggacgcactggcagttatcaatcagcaggaggattcaagcgagagttgctggaattgtggccgtaaagcgagtgaaacctgcagtggctgtaacacagcccgatactgtggctcattttgccagcacaaagactgggagaagcaccatcacatctgtggacagaccctgcaggcccagcagcagggagacacacctgcagtcagctcctctgtcacgcccaacagcggggctgggagcccgatggacacaccaccagcagccactccgaggtcaaccaccccgggaaccccttccaccatagagacaacccctcgctagacgtgaactcagaactgtcggaggaaagacaacacaaccaacgcgaaaccaattcctcatcctcagatgctcaaagttgttttttttgtttgtttgtttattagatgaattatcctatttcagtacttcagcaagagagaacctaactgtatcttgaggtggtagtaaaacacagagggccagtaacgggtcgtaatgacttattgtggataacaaagatatcttttctttagagaactgaaaagagagcagagaatataacatgaaatgatagatttgacctcctccctgttattttcaagtagctgggattttaaactagatgacctcattaaccgatgctttaccaaacagcaaaccaagagattgctaattgctgttgaaagcaaaaatgctaatattaaaagtcacaatgttctttatatacaataatggaaaaaaaaaaaagaggaaaaccctcaagggcatgagcattggatacagcagtagacattttaacaagaagatgaatggcgtccgtgggttgctaactgaactttgaagacccgctacaaaacgcgcagatgtgcagcagattggaaggagacacagatgttcggtttttttcctgtttctgaaaagaaataataatatccaggtcaacagaatgaaaaatgaaagatgatttgcaatgggatgtatgaatacagcagcaagaaaaaaaaatgccataatacaaaaggctccatatatatatatatatatatatatatacacacacacacacacgcacatatatacacacacacacacacacacacacacacacacacacacacacacacagaagtaagagactcagcctgcagttaattagcattctggcagttttgacatcagccagctgccctaaataacccttcaacgtttcttcacttttgcaaggttccacagagtaagacattgggtctattccagctcattcattttatattgaaaaaaataattttaaaaatggtggcttcagctccagcccctttccaaaatttttcaaccccaccctgtttggatttttaattaaaaactagtagttctcttggtgttaaaacacttctgtcctgtgaggtttcccaatggtgtttttcttgtaaatgtgttggacaaatgtgaagatgcattgtagtttaaccatatgcccacatttagtctctttattcctagttggtgagaaacctgtatctttctatgctgcttttatatctgtatgtattagtgatatttctctagtagttaaaaaaaaaaaaaggaaaaaaagactctttttggttgtcctcaagaaaagaaaagaagaaaagctatctttcggagctgctatttcactctcttatagg

SEQ ID NO: 361698 - DNA, 3269 bp, Homo sapiens
aaagattgatctctgggctggtgaacataatctctgtcccagtcagaaaaggagagaggaaattagcagagcgattggtggagaatgatatctgtcaaaagaaacacttggagagcactgagtttagtaataggtgactgccggaaaaaagggaactttgaatattgtcaagatcgtactgagaagcactccacaatgccagactcacctgtggatgtgaagacgcaatctaggctgactcctccaacaatgccacctcccccaactactcaaggagctccaagaaccagttcatttacaccgacaacgttaactaatggcacgagccattctcctacagccttgaatggcgccccctcaccacccaatggcttcagcaatgggccttcctcttcttcctcctcctctctggctaatcaacagctgcccccagcctgtggtgccaggcaactcagcaagctgaaaaggttccttactaccctgcagcagtttggcaatgacatttcacccgagataggagaaagagttcgcaccctcgttctgggactagtgaactccactttgacaattgaagaatttcattccaaactgcaagaagctactaacttcccactgagaccttttgtcatcccatttttgaaggccaacttgcccctgctgcagcgtgagctcctccactgcgcaagactggccaaacagaaccctgcccagtacctcgcccagcatgaacagctgcttctggatgccagcaccacctcacctgttgactcctcagagctgcttctcgatgtgaacgaaaacgggaagaggcgaactccagacagaaccaaagaaaatggctttgacagagagcctttgcactcagaacatccaagcaagcgaccatgcactattagcccaggccagcggtacagtccaaataacggcttatcctaccagcccaatggcctgcctcaccctaccccacctccacctcagcattaccgtttggatgatatggccattgcccaccactacagggactcctatcgacaccccagccacagggacctcagggacagaaacagacctatggggttgcatggcacacgtcaagaagaaatgattgatcacagactaacagacagagaatgggcagaagagtggaaacatcttgaccatctgttaaactgcataatggacatggtagaaaaaacaaggcgatctctcaccgtactaaggcggtgtcaagaagcagaccgggaagaattgaattactggatccggcggtacagtgacgccgaggacttaaaaaaaggtggcggcagtagcagcagccactctaggcagcagagtcccgtcaacccagacccagttgcactagacgcgcatcgggaattccttcacaggcctgcgtctggatacgtgccagaggagatctggaagaaagctgaggaggccgtcaatgaggtgaagcgccaggcgatgacggagctgcagaaggccgtgtctgaggcggagcggaaagcccacgacatgatcacaacagagagggccaagatggagcgcacggtcgccgaggccaaacggcaggcggcggaggacgcactggcagttatcaatcagcaggaggattcaagcgagagttgctggaattgtggccgtaaagcgagtgaaacctgcagtggctgtaacacagcccgatactgtggctcattttgccagcacaaagactgggagaagcaccatcacatctgtggacagaccctgcaggcccagcagcagggagacacacctgcagtcagctcctctgtcacgcccaacagcggggctgggagcccgatggacacaccaccagcagccactccgaggtcaaccaccccgggaaccccttccaccatagagacaacccctcgctagacgtgaactcagaactgtcggaggaaagacaacacaaccaacgcgaaaccaattcctcatcctcagatgctcaaagttgttttttttgtttgtttgtttattagatgaattatcctatttcagtacttcagcaagagagaacctaactgtatcttgaggtggtagtaaaacacagagggccagtaacgggtcgtaatgacttattgtggataacaaagatatcttttctttagagaactgaaaagagagcagagaatataacatgaaatgatagatttgacctcctccctgttattttcaagtagctgggattttaaactagatgacctcattaaccgatgctttaccaaacagcaaaccaagagattgctaattgctgttgaaagcaaaaatgctaatattaaaagtcacaatgttctttatatacaataatggaaaaaaaaaaaagaggaaaaccctcaagggcatgagcattggatacagcagtagacattttaacaagaagatgaatggcgtccgtgggttgctaactgaactttgaagacccgctacaaaacgcgcagatgtgcagcagattggaaggagacacagatgttcggtttttttcctgtttctgaaaagaaataataatatccaggtcaacagaatgaaaaatgaaagatgatttgcaatgggatgtatgaatacagcagcaagaaaaaaaaatgccataatacaaaaggctccatatatatatatatatatatatatatacacacacacacacacgcacatatatacacacacacacacacacacacacacacacacacacacacacacacagaagtaagagactcagcctgcagttaattagcattctggcagttttgacatcagccagctgccctaaataacccttcaacgtttcttcacttttgcaaggttccacagagtaagacattgggtctattccagctcattcattttatattgaaaaaaataattttaaaaatggtggcttcagctccagcccctttccaaaatttttcaaccccaccctgtttggatttttaattaaaaactagtagttctcttggtgttaaaacacttctgtcctgtgaggtttcccaatggtgtttttcttgtaaatgtgttggacaaatgtgaagatgcattgtagtttaaccatatgcccacatttagtctctttattcctagttggtgagaaacctgtatctttctatgctgcttttatatctgtatgtattagtgatatttctctagtagttaaaaaaaaaaaaaggaaaaaaagactctttttggttgtcctcaagaaaagaaaagaagaaaagctatctttcggagctgctatttcactctcttatagg

SEQ ID NO: 361699 - DNA, 3538 bp, Homo sapiens
tggcgaattcggcacgaggcaggagaagtgaagatgtaacatgttatctgtcgctcctcttagctggcggagagaatttacatttaaagattagcagagtgagaaagagaaatctgccttttgttgtgtggggtgaggaggaggcatctacccctggccttgacgctatctcccatcacctctgctatccagacaggactcaccgagatcgtactgagaagcactccacaatgccagactcacctgtggatgtgaagacgcaatctaggctgactcctccaacaatgccacctcccccaactactcaaggagctccaagaaccagttcatttacaccgacaacgttaactaatggcacgagccattctcctacagccttgaatggcgccccctcaccacccaatggcttcagcaatgggccttcctcttcttcctcctcctctctggctaatcaacagctgcccccagcctgtggtgccaggcaactcagcaagctgaaaaggttccttactaccctgcagcagtttggcaatgacatttcacccgagataggagaaagagttcgcaccctcgttctgggactagtgaactccactttgacaattgaagaatttcattccaaactgcaagaagctactaacttcccactgagaccttttgtcatcccatttttgaaggccaacttgcccctgctgcagcgtgagctcctccactgcgcaagactggccaaacagaaccctgcccagtacctcgcccagcatgaacagctgcttctggatgccagcaccacctcacctgttgactcctcagagctgcttctcgatgtgaacgaaaacgggaagaggcgaactccagacagctattttcccaccagctctttcccagtatttcatatttgaatgtattgtgacttttgactatccttgcacagtcttaagaaccaaagaaaatggctttgacagagagcctttgcactcagaacatccaagcaagcgaccatgcactattagcccaggccagcggtacagtccaaataacggcttatcctaccagcccaatggcctgcctcaccctaccccacctccacctcagcattaccgtttggatgatatggccattgcccaccactacagggactcctatcgacaccccagccacagggacctcagggacagaaacagacctatggggttgcatggcacacgtcaagaagaaatgattgatcacagactaacagacagagaatgggcagaagagtggaaacatcttgaccatctgttaaactgcataatggacatggtagaaaaaacaaggcgatctctcaccgtactaaggcggtgtcaagaagcagaccgggaagaattgaattactggatccggcggtacagtgacgccgaggacttaaaaaaaggtggcggcagtagcagcagccactctaggcagcagagtcccgtcaacccagacccagttgcactaggatgaaggccatacctaggtgctgcccagctttgagcattgctgtcctgggtcatatgaggtcacattgcttctccaaaggctatcagctcatcccttcatgtatattgatggcggcccttgcagtatctagtatccaatggtctccatcctgtcacgcgcatcgggaattccttcacaggcctgcgtctggatacgtgccagaggagatctggaagaaagctgaggaggccgtcaatgaggtgaagcgccaggcgatgacggagctgcagaaggccgtgtctgaggcggagcggaaagcccacgacatgatcacaacagagagggccaagatggagcgcacggtcgccgaggccaaacggcaggcggcggaggacgcactggcagttatcaatcagcaggaggattcaagcgagagttgctggaattgtggccgtaaagcgagtgaaacctgcagtggctgtaacacagcccgatactgtggctcattttgccagcacaaagactgggagaagcaccatcacatctgtggacagaccctgcaggcccagcagcagggagacacacctgcagtcagctcctctgtcacgcccaacagcggggctgggagcccgatggacacaccaccagcagccactccgaggtcaaccaccccgggaaccccttccaccatagagacaacccctcgctagacgtgaactcagaactgtcggaggaaagacaacacaaccaacgcgaaaccaattcctcatcctcagatgctcaaagttgttttttttgtttgtttgtttattagatgaattatcctatttcagtacttcagcaagagagaacctaactgtatcttgaggtggtagtaaaacacagagggccagtaacgggtcgtaatgacttattgtggataacaaagatatcttttctttagagaactgaaaagagagcagagaatataacatgaaatgatagatttgacctcctccctgttattttcaagtagctgggattttaaactagatgacctcattaaccgatgctttaccaaacagcaaaccaagagattgctaattgctgttgaaagcaaaaatgctaatattaaaagtcacaatgttctttatatacaataatggaaaaaaaaaaaagaggaaaaccctcaagggcatgagcattggatacagcagtagacattttaacaagaagatgaatggcgtccgtgggttgctaactgaactttgaagacccgctacaaaacgcgcagatgtgcagcagattggaaggagacacagatgttcggtttttttcctgtttctgaaaagaaataataatatccaggtcaacagaatgaaaaatgaaagatgatttgcaatgggatgtatgaatacagcagcaagaaaaaaaaatgccataatacaaaaggctccatatatatatatatatatatatatatacacacacacacacacgcacatatatacacacacacacacacacacacacacacacacacacacacacacacagaagtaagagactcagcctgcagttaattagcattctggcagttttgacatcagccagctgccctaaataacccttcaacgtttcttcacttttgcaaggttccacagagtaagacattgggtctattccagctcattcattttatattgaaaaaaataattttaaaaatggtggcttcagctccagcccctttccaaaatttttcaaccccaccctgtttggatttttaattaaaaactagtagttctcttggtgttaaaacacttctgtcctgtgaggtttcccaatggtgtttttcttgtaaatgtgttggacaaatgtgaagatgcattgtagtttaaccatatgcccacatttagtctctttattcctagttggtgagaaacctgtatctttctatgctgcttttatatctgtatgtattagtgatatttctctagtagttaaaaaaaaaaaaaggaaaaaaagactctttttggttgtcctcaagaaaagaaaagaagaaaagctatctttcggagctgctatttcactctcttatagg

SEQ ID NO: 361700 - DNA, 5555 bp, Homo sapiens
catagagccagcgggcgcgggcgggacgggcgccccgcggccggacccagccagggcaccacgctgcccggccctgcgccgccaggcacttctttccggggctcctagggacgccagaaggaagtcaacctctgctgcttctccttggcctgcgttggaccttcctttttttgttgtttttttttgtttttcccctttcttccttttgaattaactggcttcttggctggatgttttcaacttctttcctggctgcgaacttttccccaattgttttccttttacaacagggggagaaagtgctctgtggtccgaggcgagccgtgaagttgcgtgtgcgtggcagtgtgcgtggcaggatgtgcgtgcgtgtgtaacccgagccgcccgatctgtttcgatctgcgccgcggagccctccctcaaggcccgctccacctgctgcggttacgcggcgctcgtgggtgttcgtgcctcggagcagctaaccggcgggtgctgggcgacggtggaggagtatcgtctcgctgctgcccgagtcagggctgagtcacccagctgatgtagacagtggctgccttccgaagagtgcgtgtttgcatgtgtgtgactctgcggctgctcaactcccaacaaaccagaggaccagccacaaacttaaccaacatccccaaacccgagttcacagatgtgggagagctgtagaaccctgagtgtcatcgactgggccttcttatgattgttgttttaagattagctgaagatctctgaaacgctgaattttctgcactgagcgttttgacagaattcattgagagaacagagaacatgacaagtacttctagctcagcactgctccaactactgaagctgattttcaaggctacttaaaaaaatctgcagcgtacattaatggatttctgttgtgtttaaattctccacagattgtattgtaaatattttatgaagtagagcatatgtatatatttatatatacgtgcacatacattagtagcactacctttggaagtctcagctcttgcttttcgggactgaagccagttttgcatgataaaagtggccttgttacgggagataattgtgttctgttgggactttagacaaaactcacctgcaaaaaactgacaggcattaactactggaacttccaaataatgtgtttgctgatcgttttactcttcgcataaatattttaggaagtgtatgagaattttgccttcaggaacttttctaacagccaaagacagaacttaacctctgcaagcaagattcgtggaagatagtctccactttttaatgcactaagcaatcggttgctaggagcccatcctgggtcagaggccgatccgcagaaccagaacgttttcccctcctggactgttagtaacttagtctccctcctcccctaaccacccccgcccccccccaccccccgcagtaataaaggcccctgaacgtgtatgttggtctcccgggagctgcttgctgaagatccgcgcccctgtcgccgtctggtaggagctgtttgcagggtcctaactcaatcggcttgttgtgatgcgtatccccgtagatgccagcacgagccgccgcttcacgccgccttccaccgcgctgagcccaggcaagatgagcgaggcgttgccgctgggcgccccggacgccggcgctgccctggccggcaagctgaggagcggcgaccgcagcatggtggaggtgctggccgaccacccgggcgagctggtgcgcaccgacagccccaacttcctctgctccgtgctgcctacgcactggcgctgcaacaagaccctgcccatcgctttcaaggtggtggccctaggggatgttccagatggcactctggtcactgtgatggctggcaatgatgaaaactactcggctgagctgagaaatgctaccgcagccatgaagaaccaggttgcaagatttaatgacctcaggtttgtcggtcgaagtggaagagggaaaagcttcactctgaccatcactgtcttcacaaacccaccgcaagtcgccacctaccacagagccatcaaaatcacagtggatgggccccgagaacctcgaagcgcacgcgcccagcaccctgcctccggcgatgccgccccagcccctctgatggccctcctctctgctgccactcattccagaacaggaggcatgagcccggaacgcgcttgcttttaggagacagccactttctgtgtggtacgctggattcaaggatgcctgatcgtactgagaagcactccacaatgccagactcacctgtggatgtgaagacgcaatctaggctgactcctccaacaatgccacctcccccaactactcaaggagctccaagaaccagttcatttacaccgacaacgttaactaatggcacgagccattctcctacagccttgaatggcgccccctcaccacccaatggcttcagcaatgggccttcctcttcttcctcctcctctctggctaatcaacagctgcccccagcctgtggtgccaggcaactcagcaagctgaaaaggttccttactaccctgcagcagtttggcaatgacatttcacccgagataggagaaagagttcgcaccctcgttctgggactagtgaactccactttgacaattgaagaatttcattccaaactgcaagaagctactaacttcccactgagaccttttgtcatcccatttttgaagcaaacagaaccctgcccagtacctcgcccagcatgaacagctgcttctggatgccagcaccacctcacctgttgactcctcagagctgcttctcgatgtgaacgaaaacgggaagaggcgaactccagacagctattttcccaccagctctttcccagtatttcatatttgaatgtattgtgacttttgactatccttgcacagtcttaagaaccaaagaaaatggctttgacagagagcctttgcactcagaacatccaagcaagcgaccatgcactattagcccaggccagcggtacagtccaaataacggcttatcctaccagcccaatggcctgcctcaccctaccccacctccacctcagcattaccgtttggatgatatggccattgcccaccactacagggactcctatcgacaccccagccacagggacctcagggacagaaacagacctatggggttgcatggcacacgtcaagaagaaatgattgatcacagactaacagacagagaatgggcagaagagtggaaacatcttgaccatctgttaaactgcataatggacatggtagaaaaaacaaggcgatctctcaccgtactaaggcggtgtcaagaagcagaccgggaagaattgaattactggatccggcggtacagtgacgccgaggacttaaaaaaaggtggcggcagtagcagcagccactctaggcagcagagtcccgtcaacccagacccagttgcactaggatgaaggccatacctaggtgctgcccagctttgagcattgctgtcctgggtcatatgaggtcacattgcttctccaaaggctatcagctcatcccttcatgtatattgatggcggcccttgcagtatctagtatccaatggtctccatcctgtcacgcgcatcgggaattccttcacaggcctgcgtctggatacgtgccagaggagatctggaagaaagctgaggaggccgtcaatgaggtgaagcgccaggcgatgacggagctgcagaaggccgtgtctgaggcggagcggaaagcccacgacatgatcacaacagagagggccaagatggagcgcacggtcgccgaggccaaacggcaggcggcggaggacgcactggcagttatcaatcagcaggaggattcaagcgagagttgctggaattgtggccgtaaagcgagtgaaacctgcagtggctgtaacacagcccgatactgtggctcattttgccagcacaaagactgggagaagcaccatcacatctgtggacagaccctgcaggcccagcagcagggagacacacctgcagtcagctcctctgtcacgcccaacagcggggctgggagcccgatggacacaccaccagcagccactccgaggtcaaccaccccgggaaccccttccaccatagagacaacccctcgctagacgtgaactcagaactgtcggaggaaagacaacacaaccaacgcgaaaccaattcctcatcctcagatgctcaaagttgttttttttgtttgtttgtttattagatgaattatcctatttcagtacttcagcaagagagaacctaactgtatcttgaggtggtagtaaaacacagagggccagtaacgggtcgtaatgacttattgtggataacaaagatatcttttctttagagaactgaaaagagagcagagaatataacatgaaatgatagatttgacctcctccctgttattttcaagtagctgggattttaaactagatgacctcattaaccgatgctttaccaaacagcaaaccaagagattgctaattgctgttgaaagcaaaaatgctaatattaaaagtcacaatgttctttatatacaataatggaaaaaaaaaaaagaggaaaaccctcaagggcatgagcattggatacagcagtagacattttaacaagaagatgaatggcgtccgtgggttgctaactgaactttgaagacccgctacaaaacgcgcagatgtgcagcagattggaaggagacacagatgttcggtttttttcctgtttctgaaaagaaataataatatccaggtcaacagaatgaaaaatgaaagatgatttgcaatgggatgtatgaatacagcagcaagaaaaaaaaatgccataatacaaaaggctccatatatatatatatatatatatatatacacacacacacacacgcacatatatacacacacacacacacacacacacacacacacacacacacacacacagaagtaagagactcagcctgcagttaattagcattctggcagttttgacatcagccagctgccctaaataacccttcaacgtttcttcacttttgcaaggttccacagagtaagacattgggtctattccagctcattcattttatattgaaaaaaataattttaaaaatggtggcttcagctccagcccctttccaaaatttttcaaccccaccctgtttggatttttaattaaaaactagtagttctcttggtgttaaaacacttctgtcctgtgaggtttcccaatggtgtttttcttgtaaatgtgttggacaaatgtgaagatgcattgtagtttaaccatatgcccacatttagtctctttattcctagttggtgagaaacctgtatctttctatgctgcttttatatctgtatgtattagtgatatttctctagtagttaaaaaaaaaaaaaggaaaaaaagactctttttggttgtcctcaagaaaagaaaagaagaaaagctatctttcggagctgctatttcactctcttatagg

SEQ ID NO: 361701 - DNA, 3146 bp, Homo sapiens
ttttagaagtgagtgatgcaataaactgtgtgatcatttttacaaagtcaataggttttattgaaaatactggtttctgtcagtatgtttgcttgttattacactgtgttgtaccagtcttaataattaatttgtttgtgtttttactatttaccaacaggctaatgtatttatactacatattttcttccatagaactccactttgacaattgaagaatttcattccaaactgcaagaagctactaacttcccactgagaccttttgtcatcccatttttgaaggccaacttgcccctgctgcagcgtgagctcctccactgcgcaagactggccaaacagaaccctgcccagtacctcgcccagcatgaacagctgcttctggatgccagcaccacctcacctgttgactcctcagagctgcttctcgatgtgaacgaaaacgggaagaggcgaactccagacagctattttcccaccagctctttcccagtatttcatatttgaatgtattgtgacttttgactatccttgcacagtcttaagaaccaaagaaaatggctttgacagagagcctttgcactcagaacatccaagcaagcgaccatgcactattagcccaggccagcggtacagtccaaataacggcttatcctaccagcccaatggcctgcctcaccctaccccacctccacctcagcattaccgtttggatgatatggccattgcccaccactacagggactcctatcgacaccccagccacagggacctcagggacagaaacagacctatggggttgcatggcacacgtcaagaagaaatgattgatcacagactaacagacagagaatgggcagaagagtggaaacatcttgaccatctgttaaactgcataatggacatggtagaaaaaacaaggcgatctctcaccgtactaaggcggtgtcaagaagcagaccgggaagaattgaattactggatccggcggtacagtgacgccgaggacttaaaaaaaggtggcggcagtagcagcagccactctaggcagcagagtcccgtcaacccagacccagttgcactaggatgaaggccatacctaggtgctgcccagctttgagcattgctgtcctgggtcatatgaggtcacattgcttctccaaaggctatcagctcatcccttcatgtatattgatggcggcccttgcagtatctagtatccaatggtctccatcctgtcacgcgcatcgggaattccttcacaggcctgcgtctggatacgtgccagaggagatctggaagaaagctgaggaggccgtcaatgaggtgaagcgccaggcgatgacggagctgcagaaggccgtgtctgaggcggagcggaaagcccacgacatgatcacaacagagagggccaagatggagcgcacggtcgccgaggccaaacggcaggcggcggaggacgcactggcagttatcaatcagcaggaggattcaagcgagagttgctggaattgtggccgtaaagcgagtgaaacctgcagtggctgtaacacagcccgatactgtggctcattttgccagcacaaagactgggagaagcaccatcacatctgtggacagaccctgcaggcccagcagcagggagacacacctgcagtcagctcctctgtcacgcccaacagcggggctgggagcccgatggacacaccaccagcagccactccgaggtcaaccaccccgggaaccccttccaccatagagacaacccctcgctagacgtgaactcagaactgtcggaggaaagacaacacaaccaacgcgaaaccaattcctcatcctcagatgctcaaagttgttttttttgtttgtttgtttattagatgaattatcctatttcagtacttcagcaagagagaacctaactgtatcttgaggtggtagtaaaacacagagggccagtaacgggtcgtaatgacttattgtggataacaaagatatcttttctttagagaactgaaaagagagcagagaatataacatgaaatgatagatttgacctcctccctgttattttcaagtagctgggattttaaactagatgacctcattaaccgatgctttaccaaacagcaaaccaagagattgctaattgctgttgaaagcaaaaatgctaatattaaaagtcacaatgttctttatatacaataatggaaaaaaaaaaaagaggaaaaccctcaagggcatgagcattggatacagcagtagacattttaacaagaagatgaatggcgtccgtgggttgctaactgaactttgaagacccgctacaaaacgcgcagatgtgcagcagattggaaggagacacagatgttcggtttttttcctgtttctgaaaagaaataataatatccaggtcaacagaatgaaaaatgaaagatgatttgcaatgggatgtatgaatacagcagcaagaaaaaaaaatgccataatacaaaaggctccatatatatatatatatatatatatatacacacacacacacacgcacatatatacacacacacacacacacacacacacacacacacacacacacacacagaagtaagagactcagcctgcagttaattagcattctggcagttttgacatcagccagctgccctaaataacccttcaacgtttcttcacttttgcaaggttccacagagtaagacattgggtctattccagctcattcattttatattgaaaaaaataattttaaaaatggtggcttcagctccagcccctttccaaaatttttcaaccccaccctgtttggatttttaattaaaaactagtagttctcttggtgttaaaacacttctgtcctgtgaggtttcccaatggtgtttttcttgtaaatgtgttggacaaatgtgaagatgcattgtagtttaaccatatgcccacatttagtctctttattcctagttggtgagaaacctgtatctttctatgctgcttttatatctgtatgtattagtgatatttctctagtagttaaaaaaaaaaaaaggaaaaaaagactctttttggttgtcctcaagaaaagaaaagaagaaaagctatctttcggagctgctatttcactctcttatagg

SEQ ID NO: 361702 - DNA, 2901 bp, Homo sapiens
catagagccagcgggcgcgggcgggacgggcgccccgcggccggacccagccagggcaccacgctgcccggccctgcgccgccaggcacttctttccggggctcctagggacgccagaaggaagtcaacctctgctgcttctccttggcctgcgttggaccttcctttttttgttgtttttttttgtttttcccctttcttccttttgaattaactggcttcttggctggatgttttcaacttctttcctggctgcgaacttttccccaattgttttccttttacaacagggggagaaagtgctctgtggtccgaggcgagccgtgaagttgcgtgtgcgtggcagtgtgcgtggcaggatgtgcgtgcgtgtgtaacccgagccgcccgatctgtttcgatctgcgccgcggagccctccctcaaggcccgctccacctgctgcggttacgcggcgctcgtgggtgttcgtgcctcggagcagctaaccggcgggtgctgggcgacggtggaggagtatcgtctcgctgctgcccgagtcagggctgagtcacccagctgatgtagacagtggctgccttccgaagagtgcgtgtttgcatgtgtgtgactctgcggctgctcaactcccaacaaaccagaggaccagccacaaacttaaccaacatccccaaacccgagttcacagatgtgggagagctgtagaaccctgagtgtcatcgactgggccttcttatgattgttgttttaagattagctgaagatctctgaaacgctgaattttctgcactgagcgttttgacagaattcattgagagaacagagaacatgacaagtacttctagctcagcactgctccaactactgaagctgattttcaaggctacttaaaaaaatctgcagcgtacattaatggatttctgttgtgtttaaattctccacagattgtattgtaaatattttatgaagtagagcatatgtatatatttatatatacgtgcacatacattagtagcactacctttggaagtctcagctcttgcttttcgggactgaagccagttttgcatgataaaagtggccttgttacgggagataattgtgttctgttgggactttagacaaaactcacctgcaaaaaactgacaggcattaactactggaacttccaaataatgtgtttgctgatcgttttactcttcgcataaatattttaggaagtgtatgagaattttgccttcaggaacttttctaacagccaaagacagaacttaacctctgcaagcaagattcgtggaagatagtctccactttttaatgcactaagcaatcggttgctaggagcccatcctgggtcagaggccgatccgcagaaccagaacgttttcccctcctggactgttagtaacttagtctccctcctcccctaaccacccccgcccccccccaccccccgcagtaataaaggcccctgaacgtgtatgttggtctcccgggagctgcttgctgaagatccgcgcccctgtcgccgtctggtaggagctgtttgcagggtcctaactcaatcggcttgttgtgatgcgtatccccgtagatgccagcacgagccgccgcttcacgccgccttccaccgcgctgagcccaggcaagatgagcgaggcgttgccgctgggcgccccggacgccggcgctgccctggccggcaagctgaggagcggcgaccgcagcatggtggaggtgctggccgaccacccgggcgagctggtgcgcaccgacagccccaacttcctctgctccgtgctgcctacgcactggcgctgcaacaagaccctgcccatcgctttcaaggtggtggccctaggggatgttccagatggcactctggtcactgtgatggctggcaatgatgaaaactactcggctgagctgagaaatgctaccgcagccatgaagaaccaggttgcaagatttaatgacctcaggtttgtcggtcgaagtggaagagggaaaagcttcactctgaccatcactgtcttcacaaacccaccgcaagtcgccacctaccacagagccatcaaaatcacagtggatgggccccgagaacctcgaaataaaccccacttgaaaaactgaggtgcttaaggagtaaaataatatgttcctggtggcatcctccagatcgtactgagaagcactccacaatgccagactcacctgtggatgtgaagacgcaatctaggctgactcctccaacaatgccacctcccccaactactcaaggagctccaagaaccagttcatttacaccgacaacgtgtaagtagtcatttcaggcttttgagtttcagttttaaagtttaaattaaatttttttctgcaaatgaaaaatcaagggaaaataaaattcagcatcaatgtattatgcagaaatgaaccaaaaaaaatcatttgtttgccagtaagtaggtactgagcacagaagtatcatagcttaggtctaatttgtgtgactgccaatatttgccttccttttcattattgcttcgaagttgcagtctgctatgattttagcaaatgaagcagcatttggtctgtaattccagttgttaccactgtaacttctaattcatcttaatgtggagctctttattttagtttgttcagcatgacttggaacatggaaatgtgctattattatttctaggttacttcttctaacaccattttcatctatttcaagtggttacaaataatgttaaaatataatatccttgtgttaaaaagggtattgatatgcaacaatatcatacagaaaactttctgaagtgagaagtgcctttcttgcccttttttttgggtggagggggaggacagaatctcgctctgtcacccaggctggag

SEQ ID NO: 361703 - DNA, 3515 bp, Homo sapiens
tgaataaattattcggcatttagcttatcattctgaatttcactttttgctttttggtgctctgaaacttgcagagagaggtggagtgctaaggggagggtaggggttgtgatactttgcacacacatccctgtcattgttctgcctaaagagacagggctgggttcaaggccacatgtgctcctgtcatcctccacatttctgctccaagtgcaatccggagtgtcagctctccatctgtctctgcctggcaggcgcacgcgcccagcaccctgcctccggcgatgccgccccagcccctctgatggccctcctctctgctgccactcattccagaacaggaggcatgagcccggaacgcgcttgcttttaggagacagccactttctgtgtggtacgctggattcaaggatgcctgatcgtactgagaagcactccacaatgccagactcacctgtggatgtgaagacgcaatctaggctgactcctccaacaatgccacctcccccaactactcaaggagctccaagaaccagttcatttacaccgacaacgttaactaatggcacgagccattctcctacagccttgaatggcgccccctcaccacccaatggcttcagcaatgggccttcctcttcttcctcctcctctctggctaatcaacagctgcccccagcctgtggtgccaggcaactcagcaagctgaaaaggttccttactaccctgcagcagtttggcaatgacatttcacccgagataggagaaagagttcgcaccctcgttctgggactagtgaactccactttgacaattgaagaatttcattccaaactgcaagaagctactaacttcccactgagaccttttgtcatcccatttttgaaggccaacttgcccctgctgcagcgtgagctcctccactgcgcaagactggccaaacagaaccctgcccagtacctcgcccagcatgaacagctgcttctggatgccagcaccacctcacctgttgactcctcagagctgcttctcgatgtgaacgaaaacgggaagaggcgaactccagacagaaccaaagaaaatggctttgacagagagcctttgcactcagaacatccaagcaagcgaccatgcactattagcccaggccagcggtacagtccaaataacggcttatcctaccagcccaatggcctgcctcaccctaccccacctccacctcagcattaccgtttggatgatatggccattgcccaccactacagggactcctatcgacaccccagccacagggacctcagggacagaaacagacctatggggttgcatggcacacgtcaagaagaaatgattgatcacagactaacagacagagaatgggcagaagagtggaaacatcttgaccatctgttaaactgcataatggacatggtagaaaaaacaaggcgatctctcaccgtactaaggcggtgtcaagaagcagaccgggaagaattgaattactggatccggcggtacagtgacgccgaggacttaaaaaaaggtggcggcagtagcagcagccactctaggcagcagagtcccgtcaacccagacccagttgcactagacgcgcatcgggaattccttcacaggcctgcgtctggatacgtgccagaggagatctggaagaaagctgaggaggccgtcaatgaggtgaagcgccaggcgatgacggagctgcagaaggccgtgtctgaggcggagcggaaagcccacgacatgatcacaacagagagggccaagatggagcgcacggtcgccgaggccaaacggcaggcggcggaggacgcactggcagttatcaatcagcaggaggattcaagcgagagttgctggaattgtggccgtaaagcgagtgaaacctgcagtggctgtaacacagcccgatactgtggctcattttgccagcacaaagactgggagaagcaccatcacatctgtggacagaccctgcaggcccagcagcagggagacacacctgcagtcagctcctctgtcacgcccaacagcggggctgggagcccgatggacacaccaccagcagccactccgaggtcaaccaccccgggaaccccttccaccatagagacaacccctcgctagacgtgaactcagaactgtcggaggaaagacaacacaaccaacgcgaaaccaattcctcatcctcagatgctcaaagttgttttttttgtttgtttgtttattagatgaattatcctatttcagtacttcagcaagagagaacctaactgtatcttgaggtggtagtaaaacacagagggccagtaacgggtcgtaatgacttattgtggataacaaagatatcttttctttagagaactgaaaagagagcagagaatataacatgaaatgatagatttgacctcctccctgttattttcaagtagctgggattttaaactagatgacctcattaaccgatgctttaccaaacagcaaaccaagagattgctaattgctgttgaaagcaaaaatgctaatattaaaagtcacaatgttctttatatacaataatggaaaaaaaaaaaagaggaaaaccctcaagggcatgagcattggatacagcagtagacattttaacaagaagatgaatggcgtccgtgggttgctaactgaactttgaagacccgctacaaaacgcgcagatgtgcagcagattggaaggagacacagatgttcggtttttttcctgtttctgaaaagaaataataatatccaggtcaacagaatgaaaaatgaaagatgatttgcaatgggatgtatgaatacagcagcaagaaaaaaaaatgccataatacaaaaggctccatatatatatatatatatatatatatacacacacacacacacgcacatatatacacacacacacacacacacacacacacacacacacacacacacacagaagtaagagactcagcctgcagttaattagcattctggcagttttgacatcagccagctgccctaaataacccttcaacgtttcttcacttttgcaaggttccacagagtaagacattgggtctattccagctcattcattttatattgaaaaaaataattttaaaaatggtggcttcagctccagcccctttccaaaatttttcaaccccaccctgtttggatttttaattaaaaactagtagttctcttggtgttaaaacacttctgtcctgtgaggtttcccaatggtgtttttcttgtaaatgtgttggacaaatgtgaagatgcattgtagtttaaccatatgcccacatttagtctctttattcctagttggtgagaaacctgtatctttctatgctgcttttatatctgtatgtattagtgatatttctctagtagttaaaaaaaaaaaaaggaaaaaaagactctttttggttgtcctcaagaaaagaaaagaagaaaagctatctttcggagctgctatttcactctcttatagg

SEQ ID NO: 361704 - DNA, 2495 bp, Homo sapiens
attttctacgctcgactgctaacattggcttcagcttccagtgcagttgtgctgctgcatataacactaccaaggtagcatctgcctaagccagaaataacaataggatataatataacctagttacaaatgaggtcctgccatctgtgctataccttcttaagtggggtttggatgataaaatcctgatttaaacgtcagtagataagtgtattttattgatagaagatgttgaatttcttctgttcacttgcttttaaaaaagataaaccccacttgaaaaactgaggtgcttaaggagtaaaataatatgttcctggtggcatcctccagatcgtactgagaagcactccacaatgccagactcacctgtggatgtgaagacgcaatctaggctgactcctccaacaatgccacctcccccaactactcaaggagctccaagaaccagttcatttacaccgacaacgttaactaatggcacgagccattctcctacagccttgaatggcgccccctcaccacccaatggcttcagcaatgggccttcctcttcttcctcctcctctctggctaatcaacagctgcccccagcctgtggtgccaggcaactcagcaagctgaaaaggttccttactaccctgcagcagtttggcaatgacatttcacccgagataggagaaagagttcgcaccctcgttctgggactagtgaactccactttgacaattgaagaatttcattccaaactgcaagaagctactaacttcccactgagaccttttgtcatcccatttttgaaggccaacttgcccctgctgcagcgtgagctcctccactgcgcaagactggccaaacagaaccctgcccagtacctcgcccagcatgaacagctgcttctggatgccagcaccacctcacctgttgactcctcagagctgcttctcgatgtgaacgaaaacgggaagaggcgaactccagacagaaccaaagaaaatggctttgacagagagcctttgcactcagaacatccaagcaagcgaccatgcactattagcccaggccagcggtacagtccaaataacggcttatcctaccagcccaatggcctgcctcaccctaccccacctccacctcagcattaccgtttggatgatatggccattgcccaccactacagggactcctatcgacaccccagccacagggacctcagggacagaaacagacctatggggttgcatggcacacgtcaagaagaaatgattgatcacagactaacagacagagaatgggcagaagagtggaaacatcttgaccatctgttaaactgcataatggacatggtagaaaaaacaaggcgatctctcaccgtactaaggcggtgtcaagaagcagaccgggaagaattgaattactggatccggcggtacagtgacgccgaggacttaaaaaaaggtggcggcagtagcagcagccactctaggcagcagagtcccgtcaacccagacccagttgcactagacgcgcatcgggaattccttcacaggcctgcgtctggatacgtgccagaggagatctggaagaaagctgaggaggccgtcaatgaggtgaagcgccaggcgatgacggagctgcagaaggccgtgtctgaggcggagcggaaagcccacgacatgatcacaacagagagggccaagatggagcgcacggtcgccgaggccaaacggcaggcggcggaggacgcactggcagttatcaatcagcaggaggattcaagcgagagttgctggaattgtggccgtaaagcgagtgaaacctgcagtggctgtaacacagcccgatactgtggctcattttgccagcacaaagactgggagaagcaccatcacatctgtggacagaccctgcaggcccagcagcagggagacacacctgcagtcagctcctctgtcacgcccaacagcggggctgggagcccgatggacacaccaccagcagccactccgaggtcaaccaccccgggaaccccttccaccatagagacaacccctcgctagacgtgaactcagaactgtcggaggaaagacaacacaaccaacgcgaaaccaattcctcatcctcagatgctcaaagttgttttttttgtttgtttgtttattagatgaattatcctatttcagtacttcagcaagagagaacctaactgtatcttgaggtggtagtaaaacacagagggccagtaacgggtcgtaatgacttattgtggataacaaagatatcttttctttagagaactgaaaagagagcagagaatataacatgaaatgatagatttgacctcctccctgttattttcaagtagctgggattttaaactagatgacctcattaaccgatgctttaccaaacagcaaaccaagagattgctaattgctgttgaaagcaaaaatgctaatattaaaagtcacaatgttctttatatacaataatgg

SEQ ID NO: 361705 - DNA, 3455 bp, Homo sapiens
catagagccagcgggcgcgggcgggacgggcgccccgcggccggacccagccagggcaccacgctgcccggccctgcgccgccaggcacttctttccggggctcctagggacgccagaaggaagtcaacctctgctgcttctccttggcctgcgttggaccttcctttttttgttgtttttttttgtttttcccctttcttccttttgaattaactggcttcttggctggatgttttcaacttctttcctggctgcgaacttttccccaattgttttccttttacaacagggggagaaagtgctctgtggtccgaggcgagccgtgaagttgcgtgtgcgtggcagtgtgcgtggcaggatgtgcgtgcgtgtgtaacccgagccgcccgatctgtttcgatctgcgccgcggagccctccctcaaggcccgctccacctgctgcggttacgcggcgctcgtgggtgttcgtgcctcggagcagctaaccggcgggtgctgggcgacggtggaggagtatcgtctcgctgctgcccgagtcagggctgagtcacccagctgatgtagacagtggctgccttccgaagagtgcgtgtttgcatgtgtgtgactctgcggctgctcaactcccaacaaaccagaggaccagccacaaacttaaccaacatccccaaacccgagttcacagatgtgggagagctgtagaaccctgagtgtcatcgactgggccttcttatgattgttgttttaagattagctgaagatctctgaaacgctgaattttctgcactgagcgttttgacagaattcattgagagaacagagaacatgacaagtacttctagctcagcactgctccaactactgaagctgattttcaaggctacttaaaaaaatctgcagcgtacattaatggatttctgttgtgtttaaattctccacagattgtattgtaaatattttatgaagtagagcatatgtatatatttatatatacgtgcacatacattagtagcactacctttggaagtctcagctcttgcttttcgggactgaagccagttttgcatgataaaagtggccttgttacgggagataattgtgttctgttgggactttagacaaaactcacctgcaaaaaactgacaggcattaactactggaacttccaaataatgtgtttgctgatcgttttactcttcgcataaatattttaggaagtgtatgagaattttgccttcaggaacttttctaacagccaaagacagaacttaacctctgcaagcaagattcgtggaagatagtctccactttttaatgcactaagcaatcggttgctaggagcccatcctgggtcagaggccgatccgcagaaccagaacgttttcccctcctggactgttagtaacttagtctccctcctcccctaaccacccccgcccccccccaccccccgcagtaataaaggcccctgaacgtgtatgttggtctcccgggagctgcttgctgaagatccgcgcccctgtcgccgtctggtaggagctgtttgcagggtcctaactcaatcggcttgttgtgatgcgtatccccgtagatgccagcacgagccgccgcttcacgccgccttccaccgcgctgagcccaggcaagatgagcgaggcgttgccgctgggcgccccggacgccggcgctgccctggccggcaagctgaggagcggcgaccgcagcatggtggaggtgctggccgaccacccgggcgagctggtgcgcaccgacagccccaacttcctctgctccgtgctgcctacgcactggcgctgcaacaagaccctgcccatcgctttcaaggtggtggccctaggggatgttccagatggcactctggtcactgtgatggctggcaatgatgaaaactactcggctgagctgagaaatgctaccgcagccatgaagaaccaggttgcaagatttaatgacctcaggtttgtcggtcgaagtggaagagggaaaagcttcactctgaccatcactgtcttcacaaacccaccgcaagtcgccacctaccacagagccatcaaaatcacagtggatgggccccgagaacctcgaaatcgtactgagaagcactccacaatgccagactcacctgtggatgtgaagacgcaatctaggctgactcctccaacaatgccacctcccccaactactcaaggagctccaagaaccagttcatttacaccgacaacgttaactaatggcacgagccattctcctacagccttgaatggcgccccctcaccacccaatggcttcagcaatgggccttcctcttcttcctcctcctctctggctaatcaacagctgcccccagcctgtggtgccaggcaactcagcaagctgaaaaggttccttactaccctgcagcagtttggcaatgacatttcacccgagataggagaaagagttcgcaccctcgttctgggactagtgaactccactttgacaattgaagaatttcattccaaactgcaagaagctactaacttcccactgagaccttttgtcatcccatttttgaaggccaacttgcccctgctgcagcgtgagctcctccactgcgcaagactggccaaacagaaccctgcccagtacctcgcccagcatgaacagctgcttctggatgccagcaccacctcacctgttgactcctcagagctgcttctcgatgtgaacgaaaacgggaagaggcgaactccagacaggtgagagggaggaggagcctggatgaaccatgacctttttcccatacctgtggcatgaggaaacatttcatgtcacaattaaaccgctggcctatgtcattcttgcacaatagcaataagccattgtggccatcttgagaatctggctctggcctgggattttacagagttttgaatctctggcctgggacagtttggcttttgtgtaggttaatcttttctgcttgtagtattaaagcgaaatggtgaagacgaatgatttttctgatttgccaagtaccactgatggctcttagatgcacatcaatattaaaattctcattcattatgtaatttaacccaaccacatattttacttcaatattctgaaattggctgttcctagtttccttaaaatgtgatggtttggaagcttgtctgtatgtatttcttaacacagtacagtagttatttgttttggttgtatatgaactaagagaaaacttctgggacactagatgaactgagtgaagataagagttatacagtagagacaatagatggtatttttgctgaaaattttacttgttagatactgttctatcagatactgtgctctcataactaagaattctaagaaatgtaaaataaaaccacttctccattaaaccctacagagtaattgttgaataaagcatacacatgaaatttccc

SEQ ID NO: 361706 - DNA, 2039 bp, Homo sapiens
tggcgaattcggcacgaggcaggagaagtgaagatgtaacatgttatctgtcgctcctcttagctggcggagagaatttacatttaaagattagcagagtgagaaagagaaatctgccttttgttgtgtggggtgaggaggaggcatctacccctggccttgacgctatctcccatcacctctgctatccagacaggactcaccgagatcgtactgagaagcactccacaatgccagactcacctgtggatgtgaagacgcaatctaggctgactcctccaacaatgccacctcccccaactactcaaggagctccaagaaccagttcatttacaccgacaacgttaactaatggcacgagccattctcctacagccttgaatggcgccccctcaccacccaatggcttcagcaatgggccttcctcttcttcctcctcctctctggctaatcaacagctgcccccagcctgtggtgccaggcaactcagcaagctgaaaaggttccttactaccctgcagcagtttggcaatgacatttcacccgagataggagaaagagttcgcaccctcgttctgggactagtgaactccactttgacaattgaagaatttcattccaaactgcaagaagctactaacttcccactgagaccttttgtcatcccatttttgaagaggtattgcacagttcactggtctgtaaagtattttaaaccatattgttgctaggtcataactgtgtgcttttttagtacatttaggggctctttgatttaatttaatggatgaaaactatctgaatcgattgtatttatgaccatttcctaagtagtctgaaaattacaaggagtgttttaaataattacctgaaaagaagtaaagtttgaagaagagtttagaagtcctctttgaataaaggttttgttcatttttttggtcatatgagatatgttattttacattttgcttgtctttagagtgaacagaagattggttgagctttgtagttgttcaggatttttttatcctcctaattttatctttgtaacaacttaacgggaagatcagaccgtcatccttttgtgccagtgaagaagttgggagtaagtgacatgtccaaggtgtgcctggctgaggactgattgaggtgtgggattcgaaatggtttttaagtctctgctgtgagctttctgtctcctccaactgctgccgcttcagtaaagcaactggaaaacaaacaaacacaaagttcacaagagaaagaaggaacatttttattcagcatagcgggtagttaattcactgatggatactaaaataactggtagttttggtagaaaagcagattactaagatcccttttacttgggtaagcatattgcttgggcatagtggattctcaataagtttatactaacagtgggcttagcagattgataaatgtgaaagtttcatttgcactcccctttgaaggtcactttcaaaatgagcactcaaggaagcctctgatttaattatttgccaaggaggatttacctttctgtctggttcctagaactttgtttgggagacaccagaaatataactgatcagatcctgtgtgaaatttcatctatttttaaaactgtatcagacacataaggttcaagtaagtatccagaagcctagaaaggtttgtctgaaatgagccccaattctgaactttctggatattagtctttcctgttgttattattaaggtgaaatgaaatattctgctttgtgagtacctacaaaccagaaattagatctgtttgtgtggaaacccagattacaattatattcttttcgttcttttctaagttgtacatttaaggttaaaggtataatgtgttagtgttttctcccaaaatggcttatactataatactatattcttatttaaaagcaaattgtttgttgaacaatttgaacaagtttgttgagactagaatctttgcctttctcagaaagcgttgttttctgtaaagatttcatcatatgaatgccatttcctgt

SEQ ID NO: 361707 - DNA, 5439 bp, Homo sapiens
catagagccagcgggcgcgggcgggacgggcgccccgcggccggacccagccagggcaccacgctgcccggccctgcgccgccaggcacttctttccggggctcctagggacgccagaaggaagtcaacctctgctgcttctccttggcctgcgttggaccttcctttttttgttgtttttttttgtttttcccctttcttccttttgaattaactggcttcttggctggatgttttcaacttctttcctggctgcgaacttttccccaattgttttccttttacaacagggggagaaagtgctctgtggtccgaggcgagccgtgaagttgcgtgtgcgtggcagtgtgcgtggcaggatgtgcgtgcgtgtgtaacccgagccgcccgatctgtttcgatctgcgccgcggagccctccctcaaggcccgctccacctgctgcggttacgcggcgctcgtgggtgttcgtgcctcggagcagctaaccggcgggtgctgggcgacggtggaggagtatcgtctcgctgctgcccgagtcagggctgagtcacccagctgatgtagacagtggctgccttccgaagagtgcgtgtttgcatgtgtgtgactctgcggctgctcaactcccaacaaaccagaggaccagccacaaacttaaccaacatccccaaacccgagttcacagatgtgggagagctgtagaaccctgagtgtcatcgactgggccttcttatgattgttgttttaagattagctgaagatctctgaaacgctgaattttctgcactgagcgttttgacagaattcattgagagaacagagaacatgacaagtacttctagctcagcactgctccaactactgaagctgattttcaaggctacttaaaaaaatctgcagcgtacattaatggatttctgttgtgtttaaattctccacagattgtattgtaaatattttatgaagtagagcatatgtatatatttatatatacgtgcacatacattagtagcactacctttggaagtctcagctcttgcttttcgggactgaagccagttttgcatgataaaagtggccttgttacgggagataattgtgttctgttgggactttagacaaaactcacctgcaaaaaactgacaggcattaactactggaacttccaaataatgtgtttgctgatcgttttactcttcgcataaatattttaggaagtgtatgagaattttgccttcaggaacttttctaacagccaaagacagaacttaacctctgcaagcaagattcgtggaagatagtctccactttttaatgcactaagcaatcggttgctaggagcccatcctgggtcagaggccgatccgcagaaccagaacgttttcccctcctggactgttagtaacttagtctccctcctcccctaaccacccccgcccccccccaccccccgcagtaataaaggcccctgaacgtgtatgttggtctcccgggagctgcttgctgaagatccgcgcccctgtcgccgtctggtaggagctgtttgcagggtcctaactcaatcggcttgttgtgatgcgtatccccgtagatgccagcacgagccgccgcttcacgccgccttccaccgcgctgagcccaggcaagatgagcgaggcgttgccgctgggcgccccggacgccggcgctgccctggccggcaagctgaggagcggcgaccgcagcatggtggaggtgctggccgaccacccgggcgagctggtgcgcaccgacagccccaacttcctctgctccgtgctgcctacgcactggcgctgcaacaagaccctgcccatcgctttcaaggtggtggccctaggggatgttccagatggcactctggtcactgtgatggctggcaatgatgaaaactactcggctgagctgagaaatgctaccgcagccatgaagaaccaggttgcaagatttaatgacctcaggtttgtcggtcgaagtggaagagggaaaagcttcactctgaccatcactgtcttcacaaacccaccgcaagtcgccacctaccacagagccatcaaaatcacagtggatgggccccgagaacctcgaagcgcacgcgcccagcaccctgcctccggcgatgccgccccagcccctctgatggccctcctctctgctgccactcattccagaacaggaggcatgagcccggaacgcgcttgcttttaggagacagccactttctgtgtggtacgctggattcaaggatgcctgataaaccccacttgaaaaactgaggtgcttaaggagtaaaataatatgttcctggtggcatcctccagatcgtactgagaagcactccacaatgccagactcacctgtggatgtgaagacgcaatctaggctgactcctccaacaatgccacctcccccaactactcaaggagctccaagaaccagttcatttacaccgacaacgttaactaatggcacgagccattctcctacagccttgaatggcgccccctcaccacccaatggcttcagcaatgggccttcctcttcttcctcctcctctctggctaatcaacagctgcccccagcctgtggtgccaggcaactcagcaagctgaaaaggttccttactaccctgcagcagtttggcaatgacatttcacccgagataggagaaagagttcgcaccctcgttctgggactagtgaactccactttgacaattgaagaatttcattccaaactgcaagaagctactaacttcccactgagaccttttgtcatcccatttttgaaggccaacttgcccctgctgcagcgtgagctcctccactgcgcaagactggccaaacagaaccctgcccagtacctcgcccagcatgaacagctgcttctggatgccagcaccacctcacctgttgactcctcagagctgcttctcgatgtgaacgaaaacgggaagaggcgaactccagacagaaccaaagaaaatggctttgacagagagcctttgcactcagaacatccaagcaagcgaccatgcactattagcccaggccagcggtacagtccaaataacggcttatcctaccagcccaatggcctgcctcaccctaccccacctccacctcagcattaccgtttggatgatatggccattgcccaccactacagggactcctatcgacaccccagccacagggacctcagggacagaaacagacctatggggttgcatggcacacgtcaagaagaaatgattgatcacagactaacagacagagaatgggcagaagagtggaaacatcttgaccatctgttaaactgcataatggacatggtagaaaaaacaaggcgatctctcaccgtactaaggcggtgtcaagaagcagaccgggaagaattgaattactggatccggcggtacagtgacgccgaggacttaaaaaaaggtggcggcagtagcagcagccactctaggcagcagagtcccgtcaacccagacccagttgcactagacgcgcatcgggaattccttcacaggcctgcgtctggatacgtgccagaggagatctggaagaaagctgaggaggccgtcaatgaggtgaagcgccaggcgatgacggagctgcagaaggccgtgtctgaggcggagcggaaagcccacgacatgatcacaacagagagggccaagatggagcgcacggtcgccgaggccaaacggcaggcggcggaggacgcactggcagttatcaatcagcaggaggattcaagcgagagttgctggaattgtggccgtaaagcgagtgaaacctgcagtggctgtaacacagcccgatactgtggctcattttgccagcacaaagactgggagaagcaccatcacatctgtggacagaccctgcaggcccagcagcagggagacacacctgcagtcagctcctctgtcacgcccaacagcggggctgggagcccgatggacacaccaccagcagccactccgaggtcaaccaccccgggaaccccttccaccatagagacaacccctcgctagacgtgaactcagaactgtcggaggaaagacaacacaaccaacgcgaaaccaattcctcatcctcagatgctcaaagttgttttttttgtttgtttgtttattagatgaattatcctatttcagtacttcagcaagagagaacctaactgtatcttgaggtggtagtaaaacacagagggccagtaacgggtcgtaatgacttattgtggataacaaagatatcttttctttagagaactgaaaagagagcagagaatataacatgaaatgatagatttgacctcctccctgttattttcaagtagctgggattttaaactagatgacctcattaaccgatgctttaccaaacagcaaaccaagagattgctaattgctgttgaaagcaaaaatgctaatattaaaagtcacaatgttctttatatacaataatggaaaaaaaaaaaagaggaaaaccctcaagggcatgagcattggatacagcagtagacattttaacaagaagatgaatggcgtccgtgggttgctaactgaactttgaagacccgctacaaaacgcgcagatgtgcagcagattggaaggagacacagatgttcggtttttttcctgtttctgaaaagaaataataatatccaggtcaacagaatgaaaaatgaaagatgatttgcaatgggatgtatgaatacagcagcaagaaaaaaaaatgccataatacaaaaggctccatatatatatatatatatatatatatacacacacacacacacgcacatatatacacacacacacacacacacacacacacacacacacacacacacacagaagtaagagactcagcctgcagttaattagcattctggcagttttgacatcagccagctgccctaaataacccttcaacgtttcttcacttttgcaaggttccacagagtaagacattgggtctattccagctcattcattttatattgaaaaaaataattttaaaaatggtggcttcagctccagcccctttccaaaatttttcaaccccaccctgtttggatttttaattaaaaactagtagttctcttggtgttaaaacacttctgtcctgtgaggtttcccaatggtgtttttcttgtaaatgtgttggacaaatgtgaagatgcattgtagtttaaccatatgcccacatttagtctctttattcctagttggtgagaaacctgtatctttctatgctgcttttatatctgtatgtattagtgatatttctctagtagttaaaaaaaaaaaaaggaaaaaaagactctttttggttgtcctcaagaaaagaaaagaagaaaagctatctttcggagctgctatttcactctcttatagg

SEQ ID NO: 361708 - DNA, 3430 bp, Homo sapiens
attttctacgctcgactgctaacattggcttcagcttccagtgcagttgtgctgctgcatataacactaccaaggtagcatctgcctaagccagaaataacaataggatataatataacctagttacaaatgaggtcctgccatctgtgctataccttcttaagtggggtttggatgataaaatcctgatttaaacgtcagtagataagtgtattttattgatagaagatgttgaatttcttctgttcacttgcttttaaaaaagataaaccccacttgaaaaactgaggtgcttaaggagtaaaataatatgttcctggtggcatcctccagatcgtactgagaagcactccacaatgccagactcacctgtggatgtgaagacgcaatctaggctgactcctccaacaatgccacctcccccaactactcaaggagctccaagaaccagttcatttacaccgacaacgttaactaatggcacgagccattctcctacagccttgaatggcgccccctcaccacccaatggcttcagcaatgggccttcctcttcttcctcctcctctctggctaatcaacagctgcccccagcctgtggtgccaggcaactcagcaagctgaaaaggttccttactaccctgcagcagtttggcaatgacatttcacccgagataggagaaagagttcgcaccctcgttctgggactagtgaactccactttgacaattgaagaatttcattccaaactgcaagaagctactaacttcccactgagaccttttgtcatcccatttttgaaggccaacttgcccctgctgcagcgtgagctcctccactgcgcaagactggccaaacagaaccctgcccagtacctcgcccagcatgaacagctgcttctggatgccagcaccacctcacctgttgactcctcagagctgcttctcgatgtgaacgaaaacgggaagaggcgaactccagacagaaccaaagaaaatggctttgacagagagcctttgcactcagaacatccaagcaagcgaccatgcactattagcccaggccagcggtacagtccaaataacggcttatcctaccagcccaatggcctgcctcaccctaccccacctccacctcagcattaccgtttggatgatatggccattgcccaccactacagggactcctatcgacaccccagccacagggacctcagggacagaaacagacctatggggttgcatggcacacgtcaagaagaaatgattgatcacagactaacagacagagaatgggcagaagagtggaaacatcttgaccatctgttaaactgcataatggacatggtagaaaaaacaaggcgatctctcaccgtactaaggcggtgtcaagaagcagaccgggaagaattgaattactggatccggcggtacagtgacgccgaggacttaaaaaaaggtggcggcagtagcagcagccactctaggcagcagagtcccgtcaacccagacccagttgcactagacgcgcatcgggaattccttcacaggcctgcgtctggatacgtgccagaggagatctggaagaaagctgaggaggccgtcaatgaggtgaagcgccaggcgatgacggagctgcagaaggccgtgtctgaggcggagcggaaagcccacgacatgatcacaacagagagggccaagatggagcgcacggtcgccgaggccaaacggcaggcggcggaggacgcactggcagttatcaatcagcaggaggattcaagcgagagttgctggaattgtggccgtaaagcgagtgaaacctgcagtggctgtaacacagcccgatactgtggctcattttgccagcacaaagactgggagaagcaccatcacatctgtggacagaccctgcaggcccagcagcagggagacacacctgcagtcagctcctctgtcacgcccaacagcggggctgggagcccgatggacacaccaccagcagccactccgaggtcaaccaccccgggaaccccttccaccatagagacaacccctcgctagacgtgaactcagaactgtcggaggaaagacaacacaaccaacgcgaaaccaattcctcatcctcagatgctcaaagttgttttttttgtttgtttgtttattagatgaattatcctatttcagtacttcagcaagagagaacctaactgtatcttgaggtggtagtaaaacacagagggccagtaacgggtcgtaatgacttattgtggataacaaagatatcttttctttagagaactgaaaagagagcagagaatataacatgaaatgatagatttgacctcctccctgttattttcaagtagctgggattttaaactagatgacctcattaaccgatgctttaccaaacagcaaaccaagagattgctaattgctgttgaaagcaaaaatgctaatattaaaagtcacaatgttctttatatacaataatggaaaaaaaaaaaagaggaaaaccctcaagggcatgagcattggatacagcagtagacattttaacaagaagatgaatggcgtccgtgggttgctaactgaactttgaagacccgctacaaaacgcgcagatgtgcagcagattggaaggagacacagatgttcggtttttttcctgtttctgaaaagaaataataatatccaggtcaacagaatgaaaaatgaaagatgatttgcaatgggatgtatgaatacagcagcaagaaaaaaaaatgccataatacaaaaggctccatatatatatatatatatatatatatacacacacacacacacgcacatatatacacacacacacacacacacacacacacacacacacacacacacacagaagtaagagactcagcctgcagttaattagcattctggcagttttgacatcagccagctgccctaaataacccttcaacgtttcttcacttttgcaaggttccacagagtaagacattgggtctattccagctcattcattttatattgaaaaaaataattttaaaaatggtggcttcagctccagcccctttccaaaatttttcaaccccaccctgtttggatttttaattaaaaactagtagttctcttggtgttaaaacacttctgtcctgtgaggtttcccaatggtgtttttcttgtaaatgtgttggacaaatgtgaagatgcattgtagtttaaccatatgcccacatttagtctctttattcctagttggtgagaaacctgtatctttctatgctgcttttatatctgtatgtattagtgatatttctctagtagttaaaaaaaaaaaaaggaaaaaaagactctttttggttgtcctcaagaaaagaaaagaagaaaagctatctttcggagctgctatttcactctcttatagg

SEQ ID NO: 361709 - DNA, 3459 bp, Homo sapiens
tggcgaattcggcacgaggcaggagaagtgaagatgtaacatgttatctgtcgctcctcttagctggcggagagaatttacatttaaagattagcagagtgagaaagagaaatctgccttttgttgtgtggggtgaggaggaggcatctacccctggccttgacgctatctcccatcacctctgctatccagacaggactcaccgagatcgtactgagaagcactccacaatgccagactcacctgtggatgtgaagacgcaatctaggctgactcctccaacaatgccacctcccccaactactcaaggagctccaagaaccagttcatttacaccgacaacgttaactaatggcacgagccattctcctacagccttgaatggcgccccctcaccacccaatggcttcagcaatgggccttcctcttcttcctcctcctctctggctaatcaacagctgcccccagcctgtggtgccaggcaactcagcaagctgaaaaggttccttactaccctgcagcagtttggcaatgacatttcacccgagataggagaaagagttcgcaccctcgttctgggactagtgaactccactttgacaattgaagaatttcattccaaactgcaagaagctactaacttcccactgagaccttttgtcatcccatttttgaaggccaacttgcccctgctgcagcgtgagctcctccactgcgcaagactggccaaacagaaccctgcccagtacctcgcccagcatgaacagctgcttctggatgccagcaccacctcacctgttgactcctcagagctgcttctcgatgtgaacgaaaacgggaagaggcgaactccagacagaaccaaagaaaatggctttgacagagagcctttgcactcagaacatccaagcaagcgaccatgcactattagcccaggccagcggtacagtccaaataacggcttatcctaccagcccaatggcctgcctcaccctaccccacctccacctcagcattaccgtttggatgatatggccattgcccaccactacagggactcctatcgacaccccagccacagggacctcagggacagaaacagacctatggggttgcatggcacacgtcaagaagaaatgattgatcacagactaacagacagagaatgggcagaagagtggaaacatcttgaccatctgttaaactgcataatggacatggtagaaaaaacaaggcgatctctcaccgtactaaggcggtgtcaagaagcagaccgggaagaattgaattactggatccggcggtacagtgacgccgaggacttaaaaaaaggtggcggcagtagcagcagccactctaggcagcagagtcccgtcaacccagacccagttgcactaggatgaaggccatacctaggtgctgcccagctttgagcattgctgtcctgggtcatatgaggtcacattgcttctccaaaggctatcagctcatcccttcatgtatattgatggcggcccttgcagtatctagtatccaatggtctccatcctgtcacgcgcatcgggaattccttcacaggcctgcgtctggatacgtgccagaggagatctggaagaaagctgaggaggccgtcaatgaggtgaagcgccaggcgatgacggagctgcagaaggccgtgtctgaggcggagcggaaagcccacgacatgatcacaacagagagggccaagatggagcgcacggtcgccgaggccaaacggcaggcggcggaggacgcactggcagttatcaatcagcaggaggattcaagcgagagttgctggaattgtggccgtaaagcgagtgaaacctgcagtggctgtaacacagcccgatactgtggctcattttgccagcacaaagactgggagaagcaccatcacatctgtggacagaccctgcaggcccagcagcagggagacacacctgcagtcagctcctctgtcacgcccaacagcggggctgggagcccgatggacacaccaccagcagccactccgaggtcaaccaccccgggaaccccttccaccatagagacaacccctcgctagacgtgaactcagaactgtcggaggaaagacaacacaaccaacgcgaaaccaattcctcatcctcagatgctcaaagttgttttttttgtttgtttgtttattagatgaattatcctatttcagtacttcagcaagagagaacctaactgtatcttgaggtggtagtaaaacacagagggccagtaacgggtcgtaatgacttattgtggataacaaagatatcttttctttagagaactgaaaagagagcagagaatataacatgaaatgatagatttgacctcctccctgttattttcaagtagctgggattttaaactagatgacctcattaaccgatgctttaccaaacagcaaaccaagagattgctaattgctgttgaaagcaaaaatgctaatattaaaagtcacaatgttctttatatacaataatggaaaaaaaaaaaagaggaaaaccctcaagggcatgagcattggatacagcagtagacattttaacaagaagatgaatggcgtccgtgggttgctaactgaactttgaagacccgctacaaaacgcgcagatgtgcagcagattggaaggagacacagatgttcggtttttttcctgtttctgaaaagaaataataatatccaggtcaacagaatgaaaaatgaaagatgatttgcaatgggatgtatgaatacagcagcaagaaaaaaaaatgccataatacaaaaggctccatatatatatatatatatatatatatacacacacacacacacgcacatatatacacacacacacacacacacacacacacacacacacacacacacacagaagtaagagactcagcctgcagttaattagcattctggcagttttgacatcagccagctgccctaaataacccttcaacgtttcttcacttttgcaaggttccacagagtaagacattgggtctattccagctcattcattttatattgaaaaaaataattttaaaaatggtggcttcagctccagcccctttccaaaatttttcaaccccaccctgtttggatttttaattaaaaactagtagttctcttggtgttaaaacacttctgtcctgtgaggtttcccaatggtgtttttcttgtaaatgtgttggacaaatgtgaagatgcattgtagtttaaccatatgcccacatttagtctctttattcctagttggtgagaaacctgtatctttctatgctgcttttatatctgtatgtattagtgatatttctctagtagttaaaaaaaaaaaaaggaaaaaaagactctttttggttgtcctcaagaaaagaaaagaagaaaagctatctttcggagctgctatttcactctcttatagg

SEQ ID NO: 361710 - DNA, 3460 bp, Homo sapiens
tgcgacaaaaagctgacatccgaagctgtctgttctatttttgaaacatttcaggtggttggcatatgtgcacatgggaggcagggctggccctgggttgcagcagactccatttattgtcagcctctgtgcaggataccatcactcagtatgaggagtagacccatttagttatagagtacctgagaatgtagtaaccctgtgaagtccaagcatttttaaaaagtcccaacatttaaaaacttataaaactagtagatgtaaaaggtaggaaacttggtggcaatttcctcatgcatgttctctgtaagtttatgacttccttctgattttgtgctcttgacagtaactaatggcacgagccattctcctacagccttgaatggcgccccctcaccacccaatggcttcagcaatgggccttcctcttcttcctcctcctctctggctaatcaacagctgcccccagcctgtggtgccaggcaactcagcaagctgaaaaggttccttactaccctgcagcagtttggcaatgacatttcacccgagataggagaaagagttcgcaccctcgttctgggactagtgaactccactttgacaattgaagaatttcattccaaactgcaagaagctactaacttcccactgagaccttttgtcatcccatttttgaaggccaacttgcccctgctgcagcgtgagctcctccactgcgcaagactggccaaacagaaccctgcccagtacctcgcccagcatgaacagctgcttctggatgccagcaccacctcacctgttgactcctcagagctgcttctcgatgtgaacgaaaacgggaagaggcgaactccagacagaaccaaagaaaatggctttgacagagagcctttgcactcagaacatccaagcaagcgaccatgcactattagcccaggccagcggtacagtccaaataacggcttatcctaccagcccaatggcctgcctcaccctaccccacctccacctcagcattaccgtttggatgatatggccattgcccaccactacagggactcctatcgacaccccagccacagggacctcagggacagaaacagacctatggggttgcatggcacacgtcaagaagaaatgattgatcacagactaacagacagagaatgggcagaagagtggaaacatcttgaccatctgttaaactgcataatggacatggtagaaaaaacaaggcgatctctcaccgtactaaggcggtgtcaagaagcagaccgggaagaattgaattactggatccggcggtacagtgacgccgaggacttaaaaaaaggtggcggcagtagcagcagccactctaggcagcagagtcccgtcaacccagacccagttgcactaggatgaaggccatacctaggtgctgcccagctttgagcattgctgtcctgggtcatatgaggtcacattgcttctccaaaggctatcagctcatcccttcatgtatattgatggcggcccttgcagtatctagtatccaatggtctccatcctgtcacgcgcatcgggaattccttcacaggcctgcgtctggatacgtgccagaggagatctggaagaaagctgaggaggccgtcaatgaggtgaagcgccaggcgatgacggagctgcagaaggccgtgtctgaggcggagcggaaagcccacgacatgatcacaacagagagggccaagatggagcgcacggtcgccgaggccaaacggcaggcggcggaggacgcactggcagttatcaatcagcaggaggattcaagcgagagttgctggaattgtggccgtaaagcgagtgaaacctgcagtggctgtaacacagcccgatactgtggctcattttgccagcacaaagactgggagaagcaccatcacatctgtggacagaccctgcaggcccagcagcagggagacacacctgcagtcagctcctctgtcacgcccaacagcggggctgggagcccgatggacacaccaccagcagccactccgaggtcaaccaccccgggaaccccttccaccatagagacaacccctcgctagacgtgaactcagaactgtcggaggaaagacaacacaaccaacgcgaaaccaattcctcatcctcagatgctcaaagttgttttttttgtttgtttgtttattagatgaattatcctatttcagtacttcagcaagagagaacctaactgtatcttgaggtggtagtaaaacacagagggccagtaacgggtcgtaatgacttattgtggataacaaagatatcttttctttagagaactgaaaagagagcagagaatataacatgaaatgatagatttgacctcctccctgttattttcaagtagctgggattttaaactagatgacctcattaaccgatgctttaccaaacagcaaaccaagagattgctaattgctgttgaaagcaaaaatgctaatattaaaagtcacaatgttctttatatacaataatggaaaaaaaaaaaagaggaaaaccctcaagggcatgagcattggatacagcagtagacattttaacaagaagatgaatggcgtccgtgggttgctaactgaactttgaagacccgctacaaaacgcgcagatgtgcagcagattggaaggagacacagatgttcggtttttttcctgtttctgaaaagaaataataatatccaggtcaacagaatgaaaaatgaaagatgatttgcaatgggatgtatgaatacagcagcaagaaaaaaaaatgccataatacaaaaggctccatatatatatatatatatatatatatacacacacacacacacgcacatatatacacacacacacacacacacacacacacacacacacacacacacacagaagtaagagactcagcctgcagttaattagcattctggcagttttgacatcagccagctgccctaaataacccttcaacgtttcttcacttttgcaaggttccacagagtaagacattgggtctattccagctcattcattttatattgaaaaaaataattttaaaaatggtggcttcagctccagcccctttccaaaatttttcaaccccaccctgtttggatttttaattaaaaactagtagttctcttggtgttaaaacacttctgtcctgtgaggtttcccaatggtgtttttcttgtaaatgtgttggacaaatgtgaagatgcattgtagtttaaccatatgcccacatttagtctctttattcctagttggtgagaaacctgtatctttctatgctgcttttatatctgtatgtattagtgatatttctctagtagttaaaaaaaaaaaaaggaaaaaaagactctttttggttgtcctcaagaaaagaaaagaagaaaagctatctttcggagctgctatttcactctcttatagg

SEQ ID NO: 361711 - DNA, 3441 bp, Homo sapiens
tggcgaattcggcacgaggcaggagaagtgaagatgtaacatgttatctgtcgctcctcttagctggcggagagaatttacatttaaagattagcagagtgagaaagagaaatctgccttttgttgtgtggggtgaggaggaggcatctacccctggccttgacgctatctcccatcacctctgctatccagacaggactcaccgagatcgtactgagaagcactccacaatgccagactcacctgtggatgtgaagacgcaatctaggctgactcctccaacaatgccacctcccccaactactcaaggagctccaagaaccagttcatttacaccgacaacgttaactaatggcacgagccattctcctacagccttgaatggcgccccctcaccacccaatggcttcagcaatgggccttcctcttcttcctcctcctctctggctaatcaacagctgcccccagcctgtggtgccaggcaactcagcaagctgaaaaggttccttactaccctgcagcagtttggcaatgacatttcacccgagataggagaaagagttcgcaccctcgttctgggactagtgaactccactttgacaattgaagaatttcattccaaactgcaagaagctactaacttcccactgagaccttttgtcatcccatttttgaaggccaacttgcccctgctgcagcgtgagctcctccactgcgcaagactggccaaacagaaccctgcccagtacctcgcccagcatgaacagctgcttctggatgccagcaccacctcacctgttgactcctcagagctgcttctcgatgtgaacgaaaacgggaagaggcgaactccagacagatgaataaactgaggtccagagaggttaagtgacttgaccaaggtcacacagctagtcatggaagagccaggactagatctcaggtctcttgattcccagtccagtgctctttccactacaccacaatgccagtaagaaccaaagaaaatggctttgacagagagcctttgcactcagaacatccaagcaagcgaccatgcactattagcccaggccagcggtacagtccaaataacggcttatcctaccagcccaatggcctgcctcaccctaccccacctccacctcagcattaccgtttggatgatatggccattgcccaccactacagggactcctatcgacaccccagccacagggacctcagggacagaaacagacctatggggttgcatggcacacgtcaagaagaaatgattgatcacagactaacagacagagaatgggcagaagagtggaaacatcttgaccatctgttaaactgcataatggacatggtagaaaaaacaaggcgatctctcaccgtactaaggcggtgtcaagaagcagaccgggaagaattgaattactggatccggcggtacagtgacgccgaggacttaaaaaaaggtggcggcagtagcagcagccactctaggcagcagagtcccgtcaacccagacccagttgcactagacgcgcatcgggaattccttcacaggcctgcgtctggatacgtgccagaggagatctggaagaaagctgaggaggccgtcaatgaggtgaagcgccaggcgatgacggagctgcagaaggccgtgtctgaggcggagcggaaagcccacgacatgatcacaacagagagggccaagatggagcgcacggtcgccgaggccaaacggcaggcggcggaggacgcactggcagttatcaatcagcaggaggattcaagcgagagttgctggaattgtggccgtaaagcgagtgaaacctgcagtggctgtaacacagcccgatactgtggctcattttgccagcacaaagactgggagaagcaccatcacatctgtggacagaccctgcaggcccagcagcagggagacacacctgcagtcagctcctctgtcacgcccaacagcggggctgggagcccgatggacacaccaccagcagccactccgaggtcaaccaccccgggaaccccttccaccatagagacaacccctcgctagacgtgaactcagaactgtcggaggaaagacaacacaaccaacgcgaaaccaattcctcatcctcagatgctcaaagttgttttttttgtttgtttgtttattagatgaattatcctatttcagtacttcagcaagagagaacctaactgtatcttgaggtggtagtaaaacacagagggccagtaacgggtcgtaatgacttattgtggataacaaagatatcttttctttagagaactgaaaagagagcagagaatataacatgaaatgatagatttgacctcctccctgttattttcaagtagctgggattttaaactagatgacctcattaaccgatgctttaccaaacagcaaaccaagagattgctaattgctgttgaaagcaaaaatgctaatattaaaagtcacaatgttctttatatacaataatggaaaaaaaaaaaagaggaaaaccctcaagggcatgagcattggatacagcagtagacattttaacaagaagatgaatggcgtccgtgggttgctaactgaactttgaagacccgctacaaaacgcgcagatgtgcagcagattggaaggagacacagatgttcggtttttttcctgtttctgaaaagaaataataatatccaggtcaacagaatgaaaaatgaaagatgatttgcaatgggatgtatgaatacagcagcaagaaaaaaaaatgccataatacaaaaggctccatatatatatatatatatatatatatacacacacacacacacgcacatatatacacacacacacacacacacacacacacacacacacacacacacacagaagtaagagactcagcctgcagttaattagcattctggcagttttgacatcagccagctgccctaaataacccttcaacgtttcttcacttttgcaaggttccacagagtaagacattgggtctattccagctcattcattttatattgaaaaaaataattttaaaaatggtggcttcagctccagcccctttccaaaatttttcaaccccaccctgtttggatttttaattaaaaactagtagttctcttggtgttaaaacacttctgtcctgtgaggtttcccaatggtgtttttcttgtaaatgtgttggacaaatgtgaagatgcattgtagtttaaccatatgcccacatttagtctctttattcctagttggtgagaaacctgtatctttctatgctgcttttatatctgtatgtattagtgatatttctctagtagttaaaaaaaaaaaaaggaaaaaaagactctttttggttgtcctcaagaaaagaaaagaagaaaagctatctttcggagctgctatttcactctcttatagg

SEQ ID NO: 361712 - DNA, 465 bp, Homo sapiens
aagctcaaatatgagtgactgaactgtgctggtttctgaatagatgatgaaacaaactcttgttttttccccctttagaaccaaagaaaatggctttgacagagagcctttgcactcagaacatccaagcaagcgaccatgcactattagcccaggccagcggtacagtccaaataacggcttatcctaccagcccaatggcctgcctcaccctaccccacctccacctcagcattaccgtttggatgatatggccattgcccaccactacagggactcctatcgacaccccagccacagggacctcagggacagaaacagacctatgggtaagactgaaggacctgttcacttcttacgggattgggtgcttgaagacttgcaccattatttctgaacttaacttgaggcttgaaatctgtgatagggatgaagattctcatatcttgctttatattgtctcct

SEQ ID NO: 361713 - DNA, 503 bp, Homo sapiens
ggagttctaggagtcgggagtccagagagtggagaggtccggtaccagtagctgctggttcctgaatagtagtgttctccaacttttccgtatctttttcttacccaatgttcctgagtaattgttcaatacaaaaaattttgcaagattttccttctaaatttaccaaaacttgactcttttcctgcttagtcattaaagaacattttccttacttagtcattaaagaacatttttgagtcatgtgcctgttaccactagaaatctctcttaggatacagacttgttacttatgaatgaattgttgtaaaaatccatttgcagcttagttgtttcagaactcaaaatttattttacaatggagagatgacacatggtgactaggttctcattaaacccataaaagcccatttaacacatataaatatacttgaggtacagtctctcttaataatactgtaaaacctaaccaccataaataatatggtttccatgaaaaaaaa

SEQ ID NO: 361714 - DNA, 698 bp, Homo sapiens
agagtggcttctttttggataatttatgataaaaagggagatctggttgggatctagatacggctgttaaagctgcagtgttccatacctcagagggaccactttggaaatgaattgtccattgctgagtatgaagagatgtccagtccaggcaaagccttcactgaagttccatcatcgccacttctccctttttagggtcattcaaagaagataacaccaaacctaaataattctgaaagcattttgcagatcagtgctactcattcaaagggctttgcaactcaaacagattgttagtgtgctagtgataagtttatttggtagaaatgggtatactacagctttaactagccttagtgagaaaagaaattttttgttgttacaaaacaccttttttaacaaaaaggtattttgagcctacaaaaagtttctttaaactgtcagattctagcattgttaaccaaattagactagtgattgcaatatttaagtgtaaatcttgttctacaagaaaggaaacttgcttacagtttaaaacaatgactgtttctacacatgatcttgtatactactacacaaggaaaagggggttttgtaaacactgtagaacagtctcatattcatttttttatagaaatgttattccaatggtgcattttttgtttaataaataaagttttgatacaaagttcttt

SEQ ID NO: 361715 - DNA, 527 bp, Homo sapiens
gagaactgcggctacaagttctgcgggcgcacgcacatgtacaagcacgcgcagcaccacgaccgcgtggacaacctggtgctggacgacttcaagcgcttcaaggcctcactcagctgccacttcgccgactgccccttctcgggcaccagcacgcacttccactgcctgcgctgccgcttccgctgcaccgacagcaccaaggtcacggcgcatcgcaagcaccacggcaaacaggacgtgatcagcgccgcgggcttctgccagttcagctccagcgccgactgcgccgtgcccgactgcaagtacaagctcaagtgctcgcacttccactgcaccttcccgggctgccgccacacggtggtgggcatgtcgcagatggactcgcacaagcgcaagcacgagaagcaggagcgcggcgagcccgcggcagagggccccgcgcccgggcctcccatcagtctggacggctccctgtcgctgggcgccgagccgggctcgctgctcttcctgcagtcggcggccgc

SEQ ID NO: 361716 - DNA, 632 bp, Homo sapiens
tatcagtacagaaataccacttctcaggggaacaaaatttctgttggcataaaatatgaaagaaagtcttcactgggagctttataggagtactggacgatagaaaaggaaaaaaagcagtcatagatttcatgtggctgtttcttatactgacctcagtcaaaattaaaagcagaaccttatcaatcccagccctatagaggcggttctgcaaggaaataaacaaatgctgtccaaatatagacttctcatggtaaaacatgatctaaggagagaatttagaggttttagactggcatctgcttctaaattctgtttttatttatgagtgtttctcccctttggggacattgtctttgtaaaaccaaacttagaacacccccacacaacaaattgtgctggatttaataacctctacttgctttatcataagtctgtgtggttcaatgtagtgttttattatactggcatatataatttctacttacattgtttcttgttagaggtaatgcatgaatttatccctctcgaggagagaacatgaattaaaaaaaatagtgcctgtaatataatgtgatgattatgatatcacaagcaataaatttttttttacaaaacttgaattgaagtta

SEQ ID NO: 361717 - DNA, 645 bp, Homo sapiens
attttaaagtctcttttttttttttatttttcacaaaggatttgctgtaagtcttcaagtcattttgtccaatccaaaagctgtatttaagcgtcgtggatcccagccagggatgcaagaatctgactttctcaaacagataacaacagtcgaagaactggaaccgaaagcaaataactgcactaaggtattcattacacttgtgctgcccgacctcgagtgtcaccatgaagagtgcgctacccaagctatttccttccccttcaggttctcgtgtggcacactcggacagagaaggttaatctagccaacgagccaaagtaccacctggacacagtgaaaattgaggtataaattgaagcagcaactggtgcagtttgtccagccagtggatccatatggaagaggatgtttggagtttaggctacagagcattcaggtattgtttgttttacttcagtacagcagcctttcttgtcatctgatggacatctgtttaaatggagcttgtcagttaacataagctaattggatggttggtacaaaatgtatgttttgtcttcatttgttctgcatgttttctctacaacaactaaattggaagatttttttgtacagtgccgatactgcaagataccactcttg

SEQ ID NO: 361718 - DNA, 863 bp, Homo sapiens
aacgcgggcctcgcctggctgcgccagaggcaccagcaccagcgcgcgcagcccggcgtgctcttcttcgctgacgacgacaacacctatagtctggagctcttccaggagatgcgaaccacccgcaaggtctccgtctggcctgtgggcctggttggtgggcggcgctacgaacgtccgctggtggaaaacggcaaagttgttggctggtacaccggctggagagcagacaggccttttgccatcgacatggcaggatttgctgtaagtcttcaagtcattttgtccaatccaaaagctgtatttaagcgtcgtggatcccagccagggatgcaagaatctgactttctcaaacagataacaacagtcgaagaactggaaccgaaagcaaataactgcactaaggtattcattacacttgtgctgcccgacctcgagtgtcaccatgaagagtgcgctacccaagctatttccttccccttcaggttctcgtgtggcacactcggacagagaaggttaatctagccaacgagccaaagtaccacctggacacagtgaaaattgaggtataaattgaagcagcaactggtgcagtttgtccagccagtggatccatatggaagaggatgtttggagtttaggctacagagcattcaggtattgtttgttttacttcagtacagcagcctttcttgtcatctgatggacatctgtttaaatggagcttgtcagttaacataagctaattggatggttggtacaaaatgtatgttttgtcttcatttgttctgcatgttttctctacaacaactaaattggaagatttttttgtacagtgccgatactgcaagataccactcttg

SEQ ID NO: 361719 - DNA, 853 bp, Homo sapiens
ggggcagcccctgcccgcccgcctgcaccccttgtcgctctagcttgcgcgaacctgccgctcctccacgcccaggtagtgagccccgcggctccaggtctctgcagcgccctcggccccatggacagcgcacccatcaccactccctaagtgctggcgccgccgctgtccaagctgcgcactggggtccctcggctcgcccctctctggggtgtccgagaggccagggagcgtgcaccatgaagtccgcgcttttcacccgcttctttatcctcctgccctggatcctaattgtcatcatcatgctcgacgtggacacgcgcaggccagtgcccccgctcaccccgcgcccctacttctctccctacgcggtgggccgcgggggcgcccgactcccgctccgcaggggcggcccggctcacgggacccaaaagcgcaaccagtctcggccgcagccacagccggagccgcagctgcccaccatctatgccatcacgcccacctacagccgcccggtgcagaaagcggagctgacccgcctggccaacacgttccgccaggtggcgcagctgcactggatcctggtggaggacgcggcggcgcgcagcgagctggtgagccgcttcctggcgcgggccgggctgcccagcactcacctgcacgtgcccacgccgcggcgctacaagcggcccgggctgccgcgcgccactgagcagcgcaacgcgggcctcgcctggctgcgccagaggcaccagcaccagcgcgcgcagcccggcgtgctcttcttcgctgacgacgacaacacctatagtctggagctcttccaggaggtaaaggccagcctgccccgctg

SEQ ID NO: 361720 - DNA, 783 bp, Homo sapiens
aacgcgggcctcgcctggctgcgccagaggcaccagcaccagcgcgcgcagcccggcgtgctcttcttcgctgacgacgacaacacctatagtctggagctcttccaggagatgcgaaccacccgcaaggtctccgtctggcctgtgggcctggttggtgggcggcgctacgaacgtccgctggtggaaaacggcaaagttgttggctggtacaccggctggagagcagacaggccttttgccatcgacatggcaggatttgctgtaagtcttcaagtcattttgtccaatccaaaagctgtatttaagcgtcgtggatcccagccagggatgcaagaatctgactttctcaaacagataacaacagtcgaagaactggaaccgaaagcaaataactgcactaaggttctcgtgtggcacactcggacagagaaggttaatctagccaacgagccaaagtaccacctggacacagtgaaaattgaggtataaattgaagcagcaactggtgcagtttgtccagccagtggatccatatggaagaggatgtttggagtttaggctacagagcattcaggtattgtttgttttacttcagtacagcagcctttcttgtcatctgatggacatctgtttaaatggagcttgtcagttaacataagctaattggatggttggtacaaaatgtatgttttgtcttcatttgttctgcatgttttctctacaacaactaaattggaagatttttttgtacagtgccgatactgcaagataccactcttg

SEQ ID NO: 361721 - DNA, 686 bp, Homo sapiens
acaaaggatttgctgtaagtcttcaagtcattttgtccaatccaaaagctgtatttaagcgtcgtggatcccagccagggatgcaagaatctgactttctcaaacagataacaacagtcgaagaactggaaccgaaagcaaataactgcactaaggtattcattacacttgtgctgcccgacctcgagtgtcaccatgaagagtgcgctacccaagctatttccttccccttcaggttctcgtgtggcacactcggacagagaaggttaatctagccaacgagccaaagtaccacctggacacagtgaaaattgaggtataaattgaagcagcaactggtgcagtttgtccagccagtggatccatatggaagaggatgtttggagtttaggctacagagcattcaggtattgtttgttttacttcagtacagcagcctttcttgtcatctgatggacatctgtttaaatggagcttgtcagttaacataagctaattggatggttggtacaaaatgtatgttttgtcttcatttgttctgcatgttttctctacaacaactaaattggaagatttttttgtacagtgccgatactgcaagataccactcttgagtatatattttttctttttctccaatttgcccttataattggtagacttgaacaggttggtagacttgaaca

SEQ ID NO: 361722 - DNA, 3102 bp, Homo sapiens
ccccaggcccacactgaaagcatgtcgatccaggagaacatatcatccctgcagcttcggtcatgggtctctaagtcccaaagagacttagcaaagtccatcctgattggggctccaggagggccagcggggtatctgcggcgggccagtgtggcccaactgacccaggagctgggcactgccttcttccagcagcagcagctgccagctgctatggcagacaccttcctggaacacctctgcctactggacattgactccgagcccgtggctgctcgcagtaccagcatcattgccaccatcgggccagcatctcgctccgtggagcgcctcaaggagatgatcaaggccgggatgaacattgcgcgactcaacttctcccacggctcccacgagtaccatgctgagtccatcgccaacgtccgggaggcggtggagagctttgcaggttccccactcagctaccggcccgtggccatcgccctggacaccaagggaccggagatccgcactgggatcctgcaggggggtccagagtcggaagtggagctggtgaagggctcccaggtgctggtgactgtggaccccgcgttccggacgcgggggaacgcgaacaccgtgtgggtggactaccccaatattgtccgggtcgtgccggtggggggccgcatctacattgacgacgggctcatctccctagtggtccagaaaatcggcccagagggactggtgacccaagtggagaacggcggcgtcctgggcagccggaagggcgtgaacttgccaggggcccaggtggacttgcccgggctgtccgagcaggacgtccgagacctgcgcttcggggtggagcatggggtggacatcgtctttgcctcctttgtgcggaaagccagcgacgtggctgccgtcagggctgctctgggtccggaaggacacggcatcaagatcatcagcaaaattgagaaccacgaaggcgtgaagaggtttgatgaaatcctggaggtgagcgacggcatcatggtggcacggggggacctaggcatcgagatcccagcagagaaggttttcctggctcagaagatgatgattgggcgctgcaacttggcgggcaagcctgttgtctgtgccacacagatgctggagagcatgattaccaagccccggccaacgagggcagagacaagcgatgtcgccaatgctgtgctggatggggctgactgcatcatgctgtcaggggagactgccaagggcaacttccctgtggaagcggtgaagatgcagcatgcgattgcccgggaggcagaggccgcagtgtaccaccggcagctgtttgaggagctacgtcgggcagcgccactaagccgtgatcccactgaggtcaccgccattggtgctgtggaggctgccttcaagtgctgtgctgctgccatcattgtgctgaccacaactggccgctcagcccagcttctgtctcggtaccgacctcgggcagcagtcattgctgtcacccgctctgcccaggctgcccgccaggtccacttatgccgaggagtcttccccttgctttaccgtgaacctccagaagccatctgggcagatgatgtagatcgccgggtgcaatttggcattgaaagtggaaagctccgtggcttcctccgtgttggagacctggtgattgtggtgacaggctggcgacctggctccggctacaccaacatcatgcgggtgctaagcatatcctgagacgcccctccctcctctggcccagcctacccttgtaccccatcccttcctccccagtctacgttctccagcccacacccctccaaagccccacctttaagtcctctcttctctattcctgaccctccctacctgaggcctatctgagactataactgtcatctagccccttcgaggttgccccttccccatctccatttcacacaggtcctgaaagtctgtgtccaattatgcactggccacccaacagcaccaattgtacattccctgcatccaatctgctcagcaggccctaagatgccttgagtctttaatcccagtttggctggttaattccataaccccaggcatcccatcccttggggtgggggagaggggagacagggcaatcttgtccacagtctcccattctcatatgtagccctcatgataatctgggcatctcgtgccagggcaggctaccccttcatggtgactaacagttacatgaaagtccacgcttttgggaaaactgggtgggatggatgctggggagaagtgagggctgggcagctgattttgtcactgtcttcacaacctccgtgctgggcttgtagaccactgtcctggctgctctcatgcctgcctgataccctgcttggtcaaatccccggctgcttccttctgcacccagaaattccttcccactcatgttgttcccacacacaaaccaagagccaaaaatgagtgtgtctattttatatttaaacccagctgtttggaagcaattataaaacttctcccacacaccaagaaccccagaactccccacccagaaggaaaggagacttagggtcctggtcccacagtctttaatgctgtagagtaggagaggggacaggcagagtgagggtggtaaaggactactcttgtccctgagaaggcagaggtgctggctggcctgcccttccccaggcttggataccttgggcctttcccttattcctgcaccaacagcaaactcagaaggaaaaaacaaaacaaaactctaaaggtaaacgcggtccttctccctctctcatgtggctcctcctgcccctacctgggagaaggttcaagtattgcgctgatgggtttgggcaaggaccacagaggctggcatggagaggccctgcctcctcctactcctcctgtctccttacctgaaaaggaggggagggatggataaaggaatgggtaaacaaaattaattggtaacacataaagttagtaaatgaataaatacaattaaataaatgaataaataaacaagcgaagaaaaaaatatcacacaaggattcagccatttgcccctccaccgggggggatctaggctgg

SEQ ID NO: 361723 - DNA, 2853 bp, Homo sapiens
ccccaggcccacactgaaagcatgtcgatccaggagaacatatcatccctgcagcttcggtcatgggtctctaagtcccaaagagacttagcaaagtccatcctgattggggctccaggagggccagcggggtatctgcggcgggccagtgtggcccaactgacccaggagctgggcactgccttcttccagcagcagcagctgccagctgctatggcagacaccttcctggaacacctctgcctactggacattgactccgagcccgtggctgctcgcagtaccagcatcattgccaccatcgggccagcatctcgctccgtggagcgcctcaaggagatgatcaaggccgggatgaacattgcgcgactcaacttctcccacggctcccacgagtaccatgctgagtccatcgccaacgtccgggaggcggtggagagctttgcaggttccccactcagctaccggcccgtggccatcgccctggacaccaagggaccggagatccgcactgggatcctgcaggggggtccagagtcggaagtggagctggtgaagggctcccaggtgctggtgactgtggaccccgcgttccggacgcgggggaacgcgaacaccgtgtgggtggactaccccaatattgtccgggtcgtgccggtggggggccgcatctacattgacgacgggctcatctccctagtggtccagaaaatcggcccagagggactggtgacccaagtggagaacggcggcgtcctgggcagccggaagggcgtgaacttgccaggggcccaggtggacttgcccgggctgtccgagcaggacgtccgagacctgcgcttcggggtggagcatggggtggacatcgtctttgcctcctttgtgcggaaagccagcgacgtggctgccgtcagggctgctctgggtccggaaggacacggcatcaagatcatcagcaaaattgagaaccacgaaggcgtgaagaggtttgatgaaatcctggaggtgagcgacggcatcatggtggcacggggggacctaggcatcgagatcccagcagagaaggttttcctggctcagaagatgatgattgggcgctgcaacttggcgggcaagcctgttgtctgtgccacacagatgctggagagcatgattaccaagccccggccaacgagggcagagacaagcgatgtcgccaatgctgtgctggatggggctgactgcatcatgctgtcaggggagactgccaagggcaacttccctgtggaagcggtgaagatgcagcatgcgattgcccgggaggcagaggccgcagtgtaccaccggcagctgtttgaggagctacgtcgggcagcgccactaagccgtgatcccactgaggtcaccgccattggtgctgtggaggctgccttcaagtgctgtgctgctgccatcattgtgctgaccacaactggccgctcagcccagcttctgtctcggtaccgacctcgggcagcagtcattgctgtcacccgctctgcccaggctgcccgccaggtccacttatgccgaggagtcttccccttgctttaccgtgaacctccagaagccatctgggcagatgatgtagatcgccgggtgcaatttggcattgaaagtggaaagctccgtggcttcctccgtgttggagacctggtgattgtggtgacaggctggcgacctggctccggctacaccaacatcatgcgggtgctaagcatatcctgagacgcccctccctcctctggcccagcctacccttgtaccccatcccttcctccccagtctacgttctccagcccacacccctccaaagccccacctttaagtcctctcttctctattcctgaccctccctacctgaggcctatctgagactataactgtcatctagccccttcgaggttgccccttccccatctccatttcacacaggtcctgaaagtctgtgtccaattatgcactggccacccaacagcaccaattgtacattccctgcatccaatctgctcagcaggcccctcatgataatctgggcatctcgtgccagggcaggctaccccttcatggtgactaacagttacatgaaagtccacgcttttgggaaaactgggtgggatggatgctggggagaagtgagggctgggcagctgattttgtcactgtcttcacaacctccgtgctgggcttgtagaccactgtcctggctgctctcatgcctgcctgataccctgcttggtcaaatccccggctgcttccttctgcacccagaaattccttcccactcatgttgttcccacacacaaaccaagagccaaaaatgagtgtgtctattttatatttaaacccagctgtttggaagcaattataaaacttctcccacacaccaagaaccccagaactccccacccagaaggaaaggagacttagggtcctggtcccacagtctttaatgctgtagagtaggagaggggacaggcagagtgagggtggtaaaggactactcttgtccctgagaaggcagaggtgctggctggcctgcccttcctcctgcccctacctgggagaaggttcaagtattgcgctgatgggtttgggcaaggaccacagaggctggcatggagaggccctgcctcctcctactcctcctgtctccttacctgaaaaggaggggagggatggataaaggaatgggtaaacaaaattaattggtaacacataaagttagtaaatgaataaatacaattaaataaatgaataaataaacaagcgaagaaaaaaatatcacacaaggattcagccatttgcccctccaccgggggggatctaggctgg

SEQ ID NO: 361724 - DNA, 3056 bp, Homo sapiens
tgcctctgacaacccaacagtgtggagcagacccacagagagggagacccagagaggtgtgcagtggcatggaagggccagcggggtatctgcggcgggccagtgtggcccaactgacccaggagctgggcactgccttcttccagcagcagcagctgccagctgctatggcagacaccttcctggaacacctctgcctactggacattgactccgagcccgtggctgctcgcagtaccagcatcattgccaccatcgggccagcatctcgctccgtggagcgcctcaaggagatgatcaaggccgggatgaacattgcgcgactcaacttctcccacggctcccacgagtaccatgctgagtccatcgccaacgtccgggaggcggtggagagctttgcaggttccccactcagctaccggcccgtggccatcgccctggacaccaagggaccggagatccgcactgggatcctgcaggggggtccagagtcggaagtggagctggtgaagggctcccaggtgctggtgactgtggaccccgcgttccggacgcgggggaacgcgaacaccgtgtgggtggactaccccaatattgtccgggtcgtgccggtggggggccgcatctacattgacgacgggctcatctccctagtggtccagaaaatcggcccagagggactggtgacccaagtggagaacggcggcgtcctgggcagccggaagggcgtgaacttgccaggggcccaggtggacttgcccgggctgtccgagcaggacgtccgagacctgcgcttcggggtggagcatggggtggacatcgtctttgcctcctttgtgcggaaagccagcgacgtggctgccgtcagggctgctctgggtccggaaggacacggcatcaagatcatcagcaaaattgagaaccacgaaggcgtgaagaggtttgatgaaatcctggaggtgagcgacggcatcatggtggcacggggggacctaggcatcgagatcccagcagagaaggttttcctggctcagaagatgatgattgggcgctgcaacttggcgggcaagcctgttgtctgtgccacacagatgctggagagcatgattaccaagccccggccaacgagggcagagacaagcgatgtcgccaatgctgtgctggatggggctgactgcatcatgctgtcaggggagactgccaagggcaacttccctgtggaagcggtgaagatgcagcatgcgattgcccgggaggcagaggccgcagtgtaccaccggcagctgtttgaggagctacgtcgggcagcgccactaagccgtgatcccactgaggtcaccgccattggtgctgtggaggctgccttcaagtgctgtgctgctgccatcattgtgctgaccacaactggccgctcagcccagcttctgtctcggtaccgacctcgggcagcagtcattgctgtcacccgctctgcccaggctgcccgccaggtccacttatgccgaggagtcttccccttgctttaccgtgaacctccagaagccatctgggcagatgatgtagatcgccgggtgcaatttggcattgaaagtggaaagctccgtggcttcctccgtgttggagacctggtgattgtggtgacaggctggcgacctggctccggctacaccaacatcatgcgggtgctaagcatatcctgagacgcccctccctcctctggcccagcctacccttgtaccccatcccttcctccccagtctacgttctccagcccacacccctccaaagccccacctttaagtcctctcttctctattcctgaccctccctacctgaggcctatctgagactataactgtcatctagccccttcgaggttgccccttccccatctccatttcacacaggtcctgaaagtctgtgtccaattatgcactggccacccaacagcaccaattgtacattccctgcatccaatctgctcagcaggccctaagatgccttgagtctttaatcccagtttggctggttaattccataaccccaggcatcccatcccttggggtgggggagaggggagacagggcaatcttgtccacagtctcccattctcatatgtagccctcatgataatctgggcatctcgtgccagggcaggctaccccttcatggtgactaacagttacatgaaagtccacgcttttgggaaaactgggtgggatggatgctggggagaagtgagggctgggcagctgattttgtcactgtcttcacaacctccgtgctgggcttgtagaccactgtcctggctgctctcatgcctgcctgataccctgcttggtcaaatccccggctgcttccttctgcacccagaaattccttcccactcatgttgttcccacacacaaaccaagagccaaaaatgagtgtgtctattttatatttaaacccagctgtttggaagcaattataaaacttctcccacacaccaagaaccccagaactccccacccagaaggaaaggagacttagggtcctggtcccacagtctttaatgctgtagagtaggagaggggacaggcagagtgagggtggtaaaggactactcttgtccctgagaaggcagaggtgctggctggcctgcccttccccaggcttggataccttgggcctttcccttattcctgcaccaacagcaaactcagaaggaaaaaacaaaacaaaactctaaaggtaaacgcggtccttctccctctctcatgtggctcctcctgcccctacctgggagaaggttcaagtattgcgctgatgggtttgggcaaggaccacagaggctggcatggagaggccctgcctcctcctactcctcctgtctccttacctgaaaaggaggggagggatggataaaggaatgggtaaacaaaattaattggtaacacataaagttagtaaatgaataaatacaattaaataaatgaataaataaacaagcgaagaaaaaaatatcacacaaggattcagccatttgcccctccaccgggggggatctaggctgg

SEQ ID NO: 361725 - DNA, 1281 bp, Homo sapiens
tgcctctgacaacccaacagtgtggagcagacccacagagagggagaccctccctacctgaggcctatctgagactataactgtcatctagccccttcgaggttgccccttccccatctccatttcacacaggtcctgaaagtctgtgtccaattatgcactggccacccaacagcaccaattgtacattccctgcatccaatctgctcagcaggccctaagatgccttgagtctttaatcccagtttggctggttaattccataaccccaggcatcccatcccttggggtgggggagaggggagacagggcaatcttgtccacagtctcccattctcatatgtagccctcatgataatctgggcatctcgtgccagggcaggctaccccttcatggtgactaacagttacatgaaagtccacgcttttgggaaaactgggtgggatggatgctggggagaagtgagggctgggcagctgattttgtcactgtcttcacaacctccgtgctgggcttgtagaccactgtcctggctgctctcatgcctgcctgataccctgcttggtcaaatccccggctgcttccttctgcacccagaaattccttcccactcatgttgttcccacacacaaaccaagagccaaaaatgagtgtgtctattttatatttaaacccagctgtttggaagcaattataaaacttctcccacacaccaagaaccccagaactccccacccagaaggaaaggagacttagggtcctggtcccacagtctttaatgctgtagagtaggagaggggacaggcagagtgagggtggtaaaggactactcttgtccctgagaaggcagaggtgctggctggcctgcccttccccaggcttggataccttgggcctttcccttattcctgcaccaacagcaaactcagaaggaaaaaacaaaacaaaactctaaaggtaaacgcggtccttctccctctctcatgtggctcctcctgcccctacctgggagaaggttcaagtattgcgctgatgggtttgggcaaggaccacagaggctggcatggagaggccctgcctcctcctactcctcctgtctccttacctgaaaaggaggggagggatggataaaggaatgggtaaacaaaattaattggtaacacataaagttagtaaatgaataaatacaattaaataaatgaataaataaacaagcgaagaaaaaaatatcacacaaggattcagccatttgcccctccaccgggggggatctaggctgg

SEQ ID NO: 361726 - DNA, 2972 bp, Homo sapiens
ccccaggcccacactgaaagcatgtcgatccaggagaacatatcatccctgcagcttcggtcatgggtctctaagtcccaaagagacttagcaaagtccatcctgattggggctccaggagggccagcggggtatctgcggcgggccagtgtggcccaactgacccaggagctgggcactgccttcttccagcagcagcagctgccagctgctatggcagacaccttcctggaacacctctgcctactggacattgactccgagcccgtggctgctcgcagtaccagcatcattgccaccatcgggccagcatctcgctccgtggagcgcctcaaggagatgatcaaggccgggatgaacattgcgcgactcaacttctcccacggctcccacgagtaccatgctgagtccatcgccaacgtccgggaggcggtggagagctttgcaggttccccactcagctaccggcccgtggccatcgccctggacaccaagggaccggagatccgcactgggatcctgcaggggggtccagagtcggaagtggagctggtgaagggctcccaggtgctggtgactgtggaccccgcgttccggacgcgggggaacgcgaacaccgtgtgggtggactaccccaatattgtccgggtcgtgccggtggggggccgcatctacattgacgacgggctcatctccctagtggtccagaaaatcggcccagagggactggtgacccaagtggagaacggcggcgtcctgggcagccggaagggcgtgaacttgccaggggcccaggtggacttgcccgggctgtccgagcaggacgtccgagacctgcgcttcggggtggagcatggggtggacatcgtctttgcctcctttgtgcggaaagccagcgacgtggctgccgtcagggctgctctgggtccggaaggacacggcatcaagatcatcagcaaaattgagaaccacgaaggcgtgaagaggtttgatgaaatcctggaggtgagcgacggcatcatggtggcacggggggacctaggcatcgagatcccagcagagaaggttttcctggctcagaagatgatgattgggcgctgcaacttggcgggcaagcctgttgtctgtgccacacagatgctggagagcatgattaccaagccccggccaacgagggcagagacaagcgatgtcgccaatgctgtgctggatggggctgactgcatcatgctgtcaggggagactgccaagggcaacttccctgtggaagcggtgaagatgcagcatgcgattgcccgggaggcagaggccgcagtgtaccaccggcagctgtttgaggagctacgtcgggcagcgccactaagccgtgatcccactgaggtcaccgccattggtgctgtggaggctgccttcaagtgctgtgctgctgccatcattgtgctgaccacaactggccgctcagcccagcttctgtctcggtaccgacctcgggcagcagtcattgctgtcacccgctctgcccaggctgcccgccaggtccacttatgccgaggagtcttccccttgctttaccgtgaacctccagaagccatctgggcagatgatgtagatcgccgggtgcaatttggcattgaaagtggaaagctccgtggcttcctccgtgttggagacctggtgattgtggtgacaggctggcgacctggctccggctacaccaacatcatgcgggtgctaagcatatcctgagacgcccctccctcctctggcccagcctacccttgtaccccatcccttcctccccagtctacgttctccagcccacacccctccaaagccccacctttaagtcctctcttctctattcctgaccctccctacctgaggcctatctgagactataactgtcatctagccccttcgaggttgccccttccccatctccatttcacacaggtcctgaaagtctgtgtccaattatgcactggccacccaacagcaccaattgtacattccctgcatccaatctgctcagcaggcccctcatgataatctgggcatctcgtgccagggcaggctaccccttcatggtgactaacagttacatgaaagtccacgcttttgggaaaactgggtgggatggatgctggggagaagtgagggctgggcagctgattttgtcactgtcttcacaacctccgtgctgggcttgtagaccactgtcctggctgctctcatgcctgcctgataccctgcttggtcaaatccccggctgcttccttctgcacccagaaattccttcccactcatgttgttcccacacacaaaccaagagccaaaaatgagtgtgtctattttatatttaaacccagctgtttggaagcaattataaaacttctcccacacaccaagaaccccagaactccccacccagaaggaaaggagacttagggtcctggtcccacagtctttaatgctgtagagtaggagaggggacaggcagagtgagggtggtaaaggactactcttgtccctgagaaggcagaggtgctggctggcctgcccttccccaggcttggataccttgggcctttcccttattcctgcaccaacagcaaactcagaaggaaaaaacaaaacaaaactctaaaggtaaacgcggtccttctccctctctcatgtggctcctcctgcccctacctgggagaaggttcaagtattgcgctgatgggtttgggcaaggaccacagaggctggcatggagaggccctgcctcctcctactcctcctgtctccttacctgaaaaggaggggagggatggataaaggaatgggtaaacaaaattaattggtaacacataaagttagtaaatgaataaatacaattaaataaatgaataaataaacaagcgaagaaaaaaatatcacacaaggattcagccatttgcccctccaccgggggggatctaggctgg

SEQ ID NO: 361727 - DNA, 3047 bp, Homo sapiens
ccccaggcccacactgaaagcatgtcgatccaggagaacatatcatccctgcagcttcggtcatgggtctctaagtcccaaagagacttagcaaagtccatcctgattggggctccaggagggccagcggggtatctgcggcgggccagtgtggcccaactgacccaggagctgggcactgccttcttccagcagcagcagctgccagctgctatggcagacaccttcctggaacacctctgcctactggacattgactccgagcccgtggctgctcgcagtaccagcatcattgccaccatcgggccagcatctcgctccgtggagcgcctcaaggagatgatcaaggccgggatgaacattgcgcgactcaacttctcccacggctcccacgagtaccatgctgagtccatcgccaacgtccgggaggcggtggagagctttgcaggttccccactcagctaccggcccgtggccatcgccctggacaccaagggaccggagatccgcactgggatcctgcaggggggtccagagtcggaagtggagctggtgaagggctcccaggtgctggtgactgtggaccccgcgttccggacgcgggggaacgcgaacaccgtgtgggtggactaccccaatattgtccgggtcgtgccggtggggggccgcatctacattgacgacgggctcatctccctagtggtccagaaaatcggcccagagggactggtgacccaagtggagaacggcggcgtcctgggcagccggaagggcgtgaacttgccaggggcccaggtggacttgcccgggctgtccgagcaggacgtccgagacctgcgcttcggggtggagcatggggtggacatcgtctttgcctcctttgtgcggaaagccagcgacgtggctgccgtcagggctgctctgggtccggaaggacacggcatcaagatcatcacgacggcatcatggtggcacggggggacctaggcatcgagatcccagcagagaaggttttcctggctcagaagatgatgattgggcgctgcaacttggcgggcaagcctgttgtctgtgccacacagatgctggagagcatgattaccaagccccggccaacgagggcagagacaagcgatgtcgccaatgctgtgctggatggggctgactgcatcatgctgtcaggggagactgccaagggcaacttccctgtggaagcggtgaagatgcagcatgcgattgcccgggaggcagaggccgcagtgtaccaccggcagctgtttgaggagctacgtcgggcagcgccactaagccgtgatcccactgaggtcaccgccattggtgctgtggaggctgccttcaagtgctgtgctgctgccatcattgtgctgaccacaactggccgctcagcccagcttctgtctcggtaccgacctcgggcagcagtcattgctgtcacccgctctgcccaggctgcccgccaggtccacttatgccgaggagtcttccccttgctttaccgtgaacctccagaagccatctgggcagatgatgtagatcgccgggtgcaatttggcattgaaagtggaaagctccgtggcttcctccgtgttggagacctggtgattgtggtgacaggctggcgacctggctccggctacaccaacatcatgcgggtgctaagcatatcctgagacgcccctccctcctctggcccagcctacccttgtaccccatcccttcctccccagtctacgttctccagcccacacccctccaaagccccacctttaagtcctctcttctctattcctgaccctccctacctgaggcctatctgagactataactgtcatctagccccttcgaggttgccccttccccatctccatttcacacaggtcctgaaagtctgtgtccaattatgcactggccacccaacagcaccaattgtacattccctgcatccaatctgctcagcaggccctaagatgccttgagtctttaatcccagtttggctggttaattccataaccccaggcatcccatcccttggggtgggggagaggggagacagggcaatcttgtccacagtctcccattctcatatgtagccctcatgataatctgggcatctcgtgccagggcaggctaccccttcatggtgactaacagttacatgaaagtccacgcttttgggaaaactgggtgggatggatgctggggagaagtgagggctgggcagctgattttgtcactgtcttcacaacctccgtgctgggcttgtagaccactgtcctggctgctctcatgcctgcctgataccctgcttggtcaaatccccggctgcttccttctgcacccagaaattccttcccactcatgttgttcccacacacaaaccaagagccaaaaatgagtgtgtctattttatatttaaacccagctgtttggaagcaattataaaacttctcccacacaccaagaaccccagaactccccacccagaaggaaaggagacttagggtcctggtcccacagtctttaatgctgtagagtaggagaggggacaggcagagtgagggtggtaaaggactactcttgtccctgagaaggcagaggtgctggctggcctgcccttccccaggcttggataccttgggcctttcccttattcctgcaccaacagcaaactcagaaggaaaaaacaaaacaaaactctaaaggtaaacgcggtccttctccctctctcatgtggctcctcctgcccctacctgggagaaggttcaagtattgcgctgatgggtttgggcaaggaccacagaggctggcatggagaggccctgcctcctcctactcctcctgtctccttacctgaaaaggaggggagggatggataaaggaatgggtaaacaaaattaattggtaacacataaagttagtaaatgaataaatacaattaaataaatgaataaataaacaagcgaagaaaaaaatatcacacaaggattcagccatttgcccctccaccgggggggatctaggctgg

SEQ ID NO: 361728 - DNA, 156 bp, Homo sapiens
gacaatgaatagacatgtgccttctcaagctaagtaacaagaataactctaaagttcacattacgaaagtattatcagaatccaataagatactactgtccaatcatagttaaggcttcatgattgatgttttaataagtaacttactcatagaac

SEQ ID NO: 361729 - DNA, 3021 bp, Homo sapiens
ccgcggccgtggccttcgggagcggggcgttgatgctggggatgttcgtgctgcagctcggcgtcttgtccacctttttgtccgagcctgtggtcaaggcgctgaccagcggggccgcgctgcacgtgctcttgtcccagctgccgagcctcttggggttgtccctcccgcgccagatcggctgcttctctctcttcaagacgctggcctccttgctgactgcgctgcctcggagcagtccggccgaactgaccatctccgcgctcagcctggcgctgctcgtgccggtcaaggaattgaacgtgagattccgagaccggctacccacgccgatcccgggggaagtcgtcttggtgcttctggcctccgtgctctgcttcacctcttctgtggacacaagataccaagtccagatagtggggctgttgcctggagggtaagagaatgaaaagatgccagctttctcttctcccacctctcccacccaacactccctcttatctccaccccccattttctctgccttccttatctcactgaagcacctaacccctcctcaccatggatccctccctctccagatttccccaacccctcctccccaacctggctgagctgcccaggattctggctgactcgctgcccattgcactggttagttttgcggtgtctgcctccctggcctccatccatgcagacaagtatagctacactattgactccaaccaggtgggactctgactgtggaccccaaccctctcatttgacttcccaccatgcctttgtctctcccacttcatctcactgtatccctccaggagttcctggcacatggtgcctccaacctcatctcctccctcttctcttgctttcccaactcggctacgctggccaccaccaatctactggtggatgctggtgggaaaacacaggtaagagggcatccttggatgaggagaaaggatgggccatccaggcaaggtggcggtggtggagaaacaggtggaagatggctagaatcccaggtggcacctatatagagaagactggggatctgtgagaaagggtgactgaggggatggaattatagataggagagatggaagataacaatgttccagtaagacctttgtaggctctaagcgctgaaaaagtttatggtgccccaggtgtggttcaaaataaaaacacaaaactataaaataaacttaagagataaaattcttatttttttcacacaatgacattgtcttttaaaaggaatatcacatatcaaagtctccccctaatatttttggtttcccttactttgctggtgccctaaacacatataccctgcttatagggtaacccaacagtggcttttaaggtggaggtgggctacaaaactggggaacttgaacaatggacatctacaaggagactggtgaataatgggcatttaattaattggggggagcgggagggttagatgtgaatggcagaatattaagaagggggttgtgtggaaggagatttgggagaagggagacttccgaggaagattaggcagagtgggcaggaagaccagctctcatgtgggggtgggaggctctcttccttttttgctcctgttcctccttttctctagctggcaggcctcttctcctgcacagtggtcctgtcggtgctgctgtggctggggcccttcttttactatctgcccaaggtaatgagcagaggaggcatgagcatggctgggaggggtagctgtattccaggacatcgaggtagtcagcccacctcctctgcctcaaggctgtcctggcttgcatcaacatctccagcatgcgccaggtgttctgccagatgcaggaacttccacaactatggcacatcagccgagtggactttgtgagaaatgccattacccccagattgccccctctcatcttgttagcatccccagcctctgccctgaaccaaacctaattgtcctggtcttaagttctgcaacccacccactcccccagcaaacataactcctagtatgctttactcacaggcaagggaaaggatggggtttgaacccctttggcctgaatatttgtaacttcccaactggtgcgggtcattacatttggtgtgtgtcccattgaatcaaccctgttgtttccttctgtcatgctttccacttcttcctggatcatctctccccatcacttgccttggtagtcactgccctggatctctttacccagcagtgatggcctggcttttcttttgggcaatccacccctatccctatcctgcaggctgtgtggatggtcacctgggtggcagtagtgaccctgagtgtggatttgggcctggctgtgggtgtggtcttctccatgatgactgtggtctgccgcacccggagctcctccaggtcccggggctctgcatcctgagctatccaacaccactgtactttgggacccgtgggcagtttcgctgcaacctggagtggcacctggggctcggagaaggagaaaaggagacttcaaagccagatggcccaatggttgcagttgctgagcctgtcagggtggtggtcctagacttcagtggtgtcacctttgcagatgctgctggggccagagaagtggtgcagctggccagccgatgtcgagatgctaggatccgcctcctcctggctcagtgtaatgccttggtgcaggggacactgacccgggtaggactcctggacagggtgactccagatcagctgtttgtgagtgtgcaggatgcagctgcttatgccctggggagcctggtaaggggcagtagcaccaggagcgggagccaggaggcactgggctgcggcaagtgaggcaggggagctcactgacccaaagatttgcaccgtgtgggtctgacctcatcatgtggagtgcagagggccctgatgacatgtgtgtgatgaggaccatgacccttgaacccccttacctaacgtaactaataaaatgaagctgagagctttggaatccatgaagt

SEQ ID NO: 361730 - DNA, 3147 bp, Homo sapiens
ctctcatggtcagccccttctagcttctgccagggaccccatctcttcccatgccttcattttgctctctttttcaggtgcttctggcctccgtgctctgcttcacctcttctgtggacacaagataccaagtccagatagtggggctgttgcctggagggtaagagaatgaaaagatgccagctttctcttctcccacctctcccacccaacactccctcttatctccaccccccattttctctgccttccttatctcactgaagcacctaacccctcctcaccatggatccctccctctccagatttccccaacccctcctccccaacctggctgagctgcccaggattctggctgactcgctgcccattgcactggttagttttgcggtgtctgcctccctggcctccatccatgcagacaagtatagctacactattgactccaaccaggtgggactctgactgtggaccccaaccctctcatttgacttcccaccatgcctttgtctctcccacttcatctcactgtatccctccaggagttcctggcacatggtgcctccaacctcatctcctccctcttctcttgctttcccaactcggctacgctggccaccaccaatctactggtggatgctggtgggaaaacacaggtaagagggcatccttggatgaggagaaaggatgggccatccaggcaaggtggcggtggtggagaaacaggtggaagatggctagaatcccaggtggcacctatatagagaagactggggatctgtgagaaagggtgactgaggggatggaattatagataggagagatggaagataacaatgttccagtaagacctttgtaggctctaagcgctgaaaaagtttatggtgccccaggtgtggttcaaaataaaaacacaaaactataaaataaacttaagagataaaattcttatttttttcacacaatgacattgtcttttaaaaggaatatcacatatcaaagtctccccctaatatttttggtttcccttactttgctggtgccctaaacacatataccctgcttatagggtaacccaacagtggcttttaaggtggaggtgggctacaaaactggggaacttgaacaatggacatctacaaggagactggtgaataatgggcatttaattaattggggggagcgggagggttagatgtgaatggcagaatattaagaagggggttgtgtggaaggagatttgggagaagggagacttccgaggaagattaggcagagtgggcaggaagaccagctctcatgtgggggtgggaggctctcttccttttttgctcctgttcctccttttctctagctggcaggcctcttctcctgcacagtggtcctgtcggtgctgctgtggctggggcccttcttttactatctgcccaaggtaatgagcagaggaggcatgagcatggctgggaggggtagctgtattccaggacatcgaggtagtcagcccacctcctctgcctcaaggctgtcctggcttgcatcaacatctccagcatgcgccaggtgttctgccagatgcaggaacttccacaactatggcacatcagccgagtggactttgtgagaaatgccattacccccagattgccccctctcatcttgttagcatccccagcctctgccctgaaccaaacctaattgtcctggtcttaagttctgcaacccacccactcccccagcaaacataactcctagtatgctttactcacaggcaagggaaaggatggggtttgaacccctttggcctgaatatttgtaacttcccaactggtgcgggtcattacatttggtgtgtgtcccattgaatcaaccctgttgtttccttctgtcatgctttccacttcttcctggatcatctctccccatcacttgccttggtagtcactgccctggatctctttacccagcagtgatggcctggcttttcttttgggcaatccacccctatccctatcctgcaggctgtgtggatggtcacctgggtggcagtagtgaccctgagtgtggatttgggcctggctgtgggtgtggtcttctccatgatgactgtggtctgccgcacccggaggtgggcatagagatgagtggagttgaggtcggggcaggggaagagaatgaggtgcttggggtgactctccagccaggccaggctaagctggaaatctggccccaccttcttccctagggtgtagtgcctggcacttggacaggctgaggggacagagctctacagaccactcagaggaagccccagggtgggtgggctgcagccaaagaaggaagggaagattagccccagacatttctctgatcctttgacctcttagctcctccaggtcccggggctctgcatcctgagctatccaacaccactgtactttgggacccgtgggcagtttcgctgcaacctggagtggcacctggggctcggagaaggagaaaagaaggtgaaggagcttggtttaggagggatgtggatcctcagggagtgggaggcaggtgggtgttctgagggggatccttgtgctcaaggggtgcatgttcatgctgtgtttcgggagtggtgactgcccttctttacttataggagacttcaaagccagatggcccaatggttgcagttgctgagcctgtcagggtggtggtcctagacttcagtggtgtcacctttgcagatgctgctggggccagagaagtggtgcagctggccagccgatgtcgagatgctaggatccgcctcctcctggctcagtgtaatgccttggtgcaggggacactgacccgggtaggactcctggacagggtgactccagatcagctgtttgtgagtgtgcaggatgcagctgcttatgccctggggagcctggtaaggggcagtagcaccaggagcgggagccaggaggcactgggctgcggcaagtgaggcaggggagctcactgacccaaagatttgcaccgtgtgggtctgacctcatcatgtggagtgcagagggccctgatgacatgtgtgtgatgaggaccatgacccttgaacccccttacctaacgtaactaataaaatgaagctgagagctttggaatccatgaagt

SEQ ID NO: 361731 - DNA, 3264 bp, Homo sapiens
ctctcatggtcagccccttctagcttctgccagggaccccatctcttcccatgccttcattttgctctctttttcaggtgcttctggcctccgtgctctgcttcacctcttctgtggacacaagataccaagtccagatagtggggctgttgcctggagggtaagagaatgaaaagatgccagctttctcttctcccacctctcccacccaacactccctcttatctccaccccccattttctctgccttccttatctcactgaagcacctaacccctcctcaccatggatccctccctctccagatttccccaacccctcctccccaacctggctgagctgcccaggattctggctgactcgctgcccattgcactggttagttttgcggtgtctgcctccctggcctccatccatgcagacaagtatagctacactattgactccaaccaggtgggactctgactgtggaccccaaccctctcatttgacttcccaccatgcctttgtctctcccacttcatctcactgtatccctccaggagttcctggcacatggtgcctccaacctcatctcctccctcttctcttgctttcccaactcggctacgctggccaccaccaatctactggtggatgctggtgggaaaacacaggtaagagggcatccttggatgaggagaaaggatgggccatccaggcaaggtggcggtggtggagaaacaggtggaagatggctagaatcccaggtggcacctatatagagaagactggggatctgtgagaaagggtgactgaggggatggaattatagataggagagatggaagataacaatgttccagtaagacctttgtaggctctaagcgctgaaaaagtttatggtgccccaggtgtggttcaaaataaaaacacaaaactataaaataaacttaagagataaaattcttatttttttcacacaatgacattgtcttttaaaaggaatatcacatatcaaagtctccccctaatatttttggtttcccttactttgctggtgccctaaacacatataccctgcttatagggtaacccaacagtggcttttaaggtggaggtgggctacaaaactggggaacttgaacaatggacatctacaaggagactggtgaataatgggcatttaattaattggggggagcgggagggttagatgtgaatggcagaatattaagaagggggttgtgtggaaggagatttgggagaagggagacttccgaggaagattaggcagagtgggcaggaagaccagctctcatgtgggggtgggaggctctcttccttttttgctcctgttcctccttttctctagctggcaggcctcttctcctgcacagtggtcctgtcggtgctgctgtggctggggcccttcttttactatctgcccaaggtaatgagcagaggaggcatgagcatggctgggaggggtagctgtattccaggacatcgaggtagtcagcccacctcctctgcctcaaggctgtcctggcttgcatcaacatctccagcatgcgccaggtgttctgccagatgcaggaacttccacaactatggcacatcagccgagtggactttgtgagaaatgccattacccccagattgccccctctcatcttgttagcatccccagcctctgccctgaaccaaacctaattgtcctggtcttaagttctgcaacccacccactcccccagcaaacataactcctagtatgctttactcacaggcaagggaaaggatggggtttgaacccctttggcctgaatatttgtaacttcccaactggtgcgggtcattacatttggtgtgtgtcccattgaatcaaccctgttgtttccttctgtcatgctttccacttcttcctggatcatctctccccatcacttgccttggtagtcactgccctggatctctttacccagcagtgatggcctggcttttcttttgggcaatccacccctatccctatcctgcaggctgtgtggatggtcacctgggtggcagtagtgaccctgagtgtggatttgggcctggctgtgggtgtggtcttctccatgatgactgtggtctgccgcacccggaggtgggcatagagatgagtggagttgaggtcggggcaggggaagagaatgaggtgcttggggtgactctccagccaggccaggctaagctggaaatctggccccaccttcttccctagggtgtagtgcctggcacttggacaggctgaggggacagagctctacagaccactcagaggaagccccagggtgggtgggctgcagccaaagaaggaagggaagattagccccagacatttctctgatcctttgacctcttagctcctccaggtcccggggctctgcatcctgagctatccaacaccactgtactttgggacccgtgggcagtttcgctgcaacctggagtggcacctggggctcggagaaggagaaaagaaggtgaaggagcttggtttaggagggatgtggatcctcagggagtgggaggcaggtgggtgttctgagggggatccttgtgctcaaggggtgcatgttcatgctgtgtttcgggagtggtgactgcccttctttacttataggagacttcaaagccagatggcccaatggttgcagttgctgagcctgtcagggtggtggtcctagacttcagtggtgtcacctttgcagatgctgctggggccagagaagtggtgcagctggccagccgatgtcgagatgctaggatccgcctcctcctggctcagtgtaatggtgagatgtgtggagaagagcggggcccagtgcctgggcaatgactggacacctgcggtagggaaaaggacccggtgtggacttagggtctcagagtctgacaccctccccacatagccttggtgcaggggacactgacccgggtaggactcctggacagggtgactccagatcagctgtttgtgagtgtgcaggatgcagctgcttatgccctggggagcctggtaaggggcagtagcaccaggagcgggagccaggaggcactgggctgcggcaagtgaggcaggggagctcactgacccaaagatttgcaccgtgtgggtctgacctcatcatgtggagtgcagagggccctgatgacatgtgtgtgatgaggaccatgacccttgaacccccttacctaacgtaactaataaaatgaagctgagagctttggaatccatgaagt

SEQ ID NO: 361732 - DNA, 2921 bp, Homo sapiens
ctctcatggtcagccccttctagcttctgccagggaccccatctcttcccatgccttcattttgctctctttttcaggtgcttctggcctccgtgctctgcttcacctcttctgtggacacaagataccaagtccagatagtggggctgttgcctggagggtaagagaatgaaaagatgccagctttctcttctcccacctctcccacccaacactccctcttatctccaccccccattttctctgccttccttatctcactgaagcacctaacccctcctcaccatggatccctccctctccagatttccccaacccctcctccccaacctggctgagctgcccaggattctggctgactcgctgcccattgcactggttagttttgcggtgtctgcctccctggcctccatccatgcagacaagtatagctacactattgactccaaccaggtgggactctgactgtggaccccaaccctctcatttgacttcccaccatgcctttgtctctcccacttcatctcactgtatccctccaggagttcctggcacatggtgcctccaacctcatctcctccctcttctcttgctttcccaactcggctacgctggccaccaccaatctactggtggatgctggtgggaaaacacaggtaagagggcatccttggatgaggagaaaggatgggccatccaggcaaggtggcggtggtggagaaacaggtggaagatggctagaatcccaggtggcacctatatagagaagactggggatctgtgagaaagggtgactgaggggatggaattatagataggagagatggaagataacaatgttccagtaagacctttgtaggctctaagcgctgaaaaagtttatggtgccccaggtgtggttcaaaataaaaacacaaaactataaaataaacttaagagataaaattcttatttttttcacacaatgacattgtcttttaaaaggaatatcacatatcaaagtctccccctaatatttttggtttcccttactttgctggtgccctaaacacatataccctgcttatagggtaacccaacagtggcttttaaggtggaggtgggctacaaaactggggaacttgaacaatggacatctacaaggagactggtgaataatgggcatttaattaattggggggagcgggagggttagatgtgaatggcagaatattaagaagggggttgtgtggaaggagatttgggagaagggagacttccgaggaagattaggcagagtgggcaggaagaccagctctcatgtgggggtgggaggctctcttccttttttgctcctgttcctccttttctctagctggcaggcctcttctcctgcacagtggtcctgtcggtgctgctgtggctggggcccttcttttactatctgcccaaggtaatgagcagaggaggcatgagcatggctgggaggggtagctgtattccaggacatcgaggtagtcagcccacctcctctgcctcaaggctgtcctggcttgcatcaacatctccagcatgcgccaggtgttctgccagatgcaggaacttccacaactatggcacatcagccgagtggactttgtgagaaatgccattacccccagattgccccctctcatcttgttagcatccccagcctctgccctgaaccaaacctaattgtcctggtcttaagttctgcaacccacccactcccccagcaaacataactcctagtatgctttactcacaggcaagggaaaggatggggtttgaacccctttggcctgaatatttgtaacttcccaactggtgcgggtcattacatttggtgtgtgtcccattgaatcaaccctgttgtttccttctgtcatgctttccacttcttcctggatcatctctccccatcacttgccttggtagtcactgccctggatctctttacccagcagtgatggcctggcttttcttttgggcaatccacccctatccctatcctgcaggctgtgtggatggtcacctgggtggcagtagtgaccctgagtgtggatttgggcctggctgtgggtgtggtcttctccatgatgactgtggtctgccgcacccggaggtgggcatagagatgagtggagttgaggtcggggcaggggaagagaatgaggtgcttggggtgactctccagccaggccaggctaagctggaaatctggccccaccttcttccctagggtgtagtgcctggcacttggacaggctgaggggacagagctctacagaccactcagaggaagccccagggtgggtgggctgcagccaaagaaggaagggaagattagccccagacatttctctgatcctttgacctcttagctcctccaggtcccggggctctgcatcctgagctatccaacaccactgtactttgggacccgtgggcagtttcgctgcaacctggagtggcacctggggctcggagaaggagaaaaggagacttcaaagccagatggcccaatggttgcagctggccagccgatgtcgagatgctaggatccgcctcctcctggctcagtgtaatgccttggtgcaggggacactgacccgggtaggactcctggacagggtgactccagatcagctgtttgtgagtgtgcaggatgcagctgcttatgccctggggagcctggtaaggggcagtagcaccaggagcgggagccaggaggcactgggctgcggcaagtgaggcaggggagctcactgacccaaagatttgcaccgtgtgggtctgacctcatcatgtggagtgcagagggccctgatgacatgtgtgtgatgaggaccatgacccttgaacccccttacctaacgtaactaataaaatgaagctgagagctttggaatccatgaagt

SEQ ID NO: 361733 - DNA, 2711 bp, Homo sapiens
ctctcatggtcagccccttctagcttctgccagggaccccatctcttcccatgccttcattttgctctctttttcaggtgcttctggcctccgtgctctgcttcacctcttctgtggacacaagataccaagtccagatagtggggctgttgcctggagggtaagagaatgaaaagatgccagctttctcttctcccacctctcccacccaacactccctcttatctccaccccccattttctctgccttccttatctcactgaagcacctaacccctcctcaccatggatccctccctctccagatttccccaacccctcctccccaacctggctgagctgcccaggattctggctgactcgctgcccattgcactggttagttttgcggtgtctgcctccctggcctccatccatgcagacaagtatagctacactattgactccaaccaggtgggactctgactgtggaccccaaccctctcatttgacttcccaccatgcctttgtctctcccacttcatctcactgtatccctccaggagttcctggcacatggtgcctccaacctcatctcctccctcttctcttgctttcccaactcggctacgctggccaccaccaatctactggtggatgctggtgggaaaacacaggtaagagggcatccttggatgaggagaaaggatgggccatccaggcaaggtggcggtggtggagaaacaggtggaagatggctagaatcccaggtggcacctatatagagaagactggggatctgtgagaaagggtgactgaggggatggaattatagataggagagatggaagataacaatgttccagtaagacctttgtaggctctaagcgctgaaaaagtttatggtgccccaggtgtggttcaaaataaaaacacaaaactataaaataaacttaagagataaaattcttatttttttcacacaatgacattgtcttttaaaaggaatatcacatatcaaagtctccccctaatatttttggtttcccttactttgctggtgccctaaacacatataccctgcttatagggtaacccaacagtggcttttaaggtggaggtgggctacaaaactggggaacttgaacaatggacatctacaaggagactggtgaataatgggcatttaattaattggggggagcgggagggttagatgtgaatggcagaatattaagaagggggttgtgtggaaggagatttgggagaagggagacttccgaggaagattaggcagagtgggcaggaagaccagctctcatgtgggggtgggaggctctcttccttttttgctcctgttcctccttttctctagctggcaggcctcttctcctgcacagtggtcctgtcggtgctgctgtggctggggcccttcttttactatctgcccaaggtaatgagcagaggaggcatgagcatggctgggaggggtagctgtattccaggacatcgaggtagtcagcccacctcctctgcctcaaggctgtcctggcttgcatcaacatctccagcatgcgccaggtgttctgccagatgcaggaacttccacaactatggcacatcagccgagtggactttgtgagaaatgccattacccccagattgccccctctcatcttgttagcatccccagcctctgccctgaaccaaacctaattgtcctggtcttaagttctgcaacccacccactcccccagcaaacataactcctagtatgctttactcacaggcaagggaaaggatggggtttgaacccctttggcctgaatatttgtaacttcccaactggtgcgggtcattacatttggtgtgtgtcccattgaatcaaccctgttgtttccttctgtcatgctttccacttcttcctggatcatctctccccatcacttgccttggtagtcactgccctggatctctttacccagcagtgatggcctggcttttcttttgggcaatccacccctatccctatcctgcaggctgtgtggatggtcacctgggtggcagtagtgaccctgagtgtggatttgggcctggctgtgggtgtggtcttctccatgatgactgtggtctgccgcacccggagctcctccaggtcccggggctctgcatcctgagctatccaacaccactgtactttgggacccgtgggcagtttcgctgcaacctggagtggcacctggggctcggagaaggagaaaagttgctgagcctgtcagggtggtggtcctagacttcagtggtgtcacctttgcagatgctgctggggccagagaagtggtgcagctggccagccgatgtcgagatgctaggatccgcctcctcctggctcagtgtaatgccttggtgcaggggacactgacccgggtaggactcctggacagggtgactccagatcagctgtttgtgagtgtgcaggatgcagctgcttatgccctggggagcctggtaaggggcagtagcaccaggagcgggagccaggaggcactgggctgcggcaagtgaggcaggggagctcactgacccaaagatttgcaccgtgtgggtctgacctcatcatgtggagtgcagagggccctgatgacatgtgtgtgatgaggaccatgacccttgaacccccttacctaacgtaactaataaaatgaagctgagagctttggaatccatgaagt

SEQ ID NO: 361734 - DNA, 853 bp, Homo sapiens
ccgcggccgtggccttcgggagcggggcgttgatggtgagggaggacccggggaggaacccggggggatccctgctgaggggccagggaaattgggccggggaagagggagggaccagctttcggcttgggttcgggagggcggaggtgcgcggggttggtttgctcctcctctagatggtgacagcgcgtcttctcccccacagctggggatgttcgtgctgcagctcggcgtcttgtccacctttttgtccgagcctgtggtcaaggcgctgaccagcggggccgcgctgcacgtgctcttgtcccagctgccgagcctcttggggttgtccctcccgcgccagatcggctgcttctctctcttcaaggtgggggtggaagaagaaaggagaaggggcttctagaggtcccgtgaatagggaaactcgaaaagggaggaaggacggagggtggaggggtagtatgtgacaagggagcaggaaaggaggttggagccacgtggctgaacgagggcgctgaggaggtgtaagccctggtggcactgggtagagagggcctcgctctgggggtcccgcgccggggcgcatgagccctggcacggggccctctgctcatcgcccctgccctcagacgctggcctccttgctgactgcgctgcctcggagcagtccggccgaactgaccatctccgcgctcagcctggcgctgctcgtgccggtcaaggaattgaacgtgagattccgagaccggctacccacgccgatcccgggggaagtcgtcttggtgaggatggccgtgcgcgccggccccctgcccgcgcagaccctgcggtcctgtgggaactggccgct

SEQ ID NO: 361735 - DNA, 1250 bp, Homo sapiens
ctctatggtttccgcggctcgctagaaggagtgcggtccactggaggtctccctacattcttcctccattatctcactgcctccggtggctgctgggataccggagactcgggtcccggctcgactcagtcctccagccgcccggggaatacctctagttcttcccggccgccgccgcctccgccccgccgcttcctcctccgcctgccggcctccttcgccccgccccgtccgcgcagcgcgtccggcccgcccgcaggccagcttctctcgggagcctccacccaggcgcatggctccatgaagcaagaggaggaggcagagcgcgagagatcccgtccgccccagccgcgtctgggccaggagaaaagcaaaaccatattcctgctgctgtcagttttgatgcactgagaaaacttcagagacctaagctttttccagagaagagaagctttactggtgttccagccctaaggctcatatgacattaacagacaagacacttttcagaaagacaggcaacgtgttggaccttccggagcttctcagaagacagagggttttcttttgaggctgttgtacagtggcctgattatagctcactgtagcctcgaaattctgggccgaaatgatccgcctgcctcagcctccaaagtagctgagactacaggtattgtttgggttttaatacagacaaatcaactcaatcaaagaaaccaactcaaagaaagatgggtctacatacaacaaaactgaacaaaatctgcaagaagagtgattcatacatgggctattgaggcaacatgagatggacattaatcgactaagtaaaaaacagatttcttgaagaattaataaagaacttttgttttggaaaaactctattgtttaaaattagccagatgtggtggcctgcacctacagtcccagctactcaggaggctgaggtggaaggatcacttgagcccaagaggcggaggttgcagtgagctgagactgtgccgctgcactacagacagcctcctgcatgacagagccagaccctgtctcaaaatttgggggggagtaaagttctctattgtttgaaataataacgaaacattaaaggctctaaagtcagctaacgaatagtcctaaaaatagaatggctcaaaaagattgtccaattttggaaaactaacatttcaaaaagttgtttcattttttatgaatcctaagatttccatatcctagaaaactaacatctcaga

SEQ ID NO: 361736 - DNA, 481 bp, Homo sapiens
cagttgctagtagtttgcttaatgtaagatatgggatgaatattttcatgatggcccctgcatctaagttatcatttagcagtacctgccttatctcttgtacagaatcagattagacagcataggaagaatgaaaaggtgaggtgggataataaggaatgttgtttgtggaaacataatggttgcttcaatttgagtgtaaactgtcctttttactgaagcaattgcaaccaagtgtgtgagttcacaggtgcctacattgcttttttggcttaggtattgtttgggttttaatacagacaaatcaactcaatcaaagaaaccaactcaaagaaagatgggtctacatacaacaaaactgaacaaaatctgcaagaagagtgattcatacatgggctattgaggcaacatgagatggacattaatcgactaagtaaaaaacagatttcttgaagaattaataaagaacttttgttttgga

SEQ ID NO: 361737 - DNA, 776 bp, Homo sapiens
tatagtccctttcttcccttacaggctcatatgacattaacagacaagacacttttcagaaagacaggcaacgtgttggaccttccggagcttctcagaagacagagggttttcttttgaggctgttgtacagtggcctgattatagctcactgtagcctcgaaattctgggccgaaatgatccgcctgcctcagcctccaaagtagctgagactacagacaaatcaactcaatcaaagaaaccaactcaaagaaagatgggtctacatacaacaaaactgaacaaaatctgcaagaagagtgattcatacatgggctattgaggcaacatgagatggacattaatcgactaagtaaaaaacagatttcttgaagaattaataaagaacttttgttttggaaaaactctattgtttaaaattagccagatgtggtggcctgcacctacagtcccagctactcaggaggctgaggtggaaggatcacttgagcccaagaggcggaggttgcagtgagctgagactgtgccgctgcactacagacagcctcctgcatgacagagccagaccctgtctcaaaatttgggggggagtaaagttctctattgtttgaaataataacgaaacattaaaggctctaaagtcagctaacgaatagtcctaaaaatagaatggctcaaaaagattgtccaattttggaaaactaacatttcaaaaagttgtttcattttttatgaatcctaagatttccatatcctagaaaactaacatctcaga

SEQ ID NO: 361738 - DNA, 856 bp, Homo sapiens
cagttgctagtagtttgcttaatgtaagatatgggatgaatattttcatgatggcccctgcatctaagttatcatttagcagtacctgccttatctcttgtacagaatcagattagacagcataggaagaatgaaaaggtgaggtgggataataaggaatgttgtttgtggaaacataatggttgcttcaatttgagtgtaaactgtcctttttactgaagcaattgcaaccaagtgtgtgagttcacaggtgcctacattgcttttttggcttaggtattgtttgggttttaatacagacaaatcaactcaatcaaagaaaccaactcaaagaaagatgggtctacatacaacaaaactgaacaaaatctgcaagaagagtgattcatacatgggctattgaggcaacatgagatggacattaatcgactaagtaaaaaacagatttcttgaagaattaataaagaacttttgttttggaaaaactctattgtttaaaattagccagatgtggtggcctgcacctacagtcccagctactcaggaggctgaggtggaaggatcacttgagcccaagaggcggaggttgcagtgagctgagactgtgccgctgcactacagacagcctcctgcatgacagagccagaccctgtctcaaaatttgggggggagtaaagttctctattgtttgaaataataacgaaacattaaaggctctaaagtcagctaacgaatagtcctaaaaatagaatggctcaaaaagattgtccaattttggaaaactaacatttcaaaaagttgtttcattttttatgaatcctaagatttccatatcctagaaaactaacatctcaga

SEQ ID NO: 361739 - DNA, 862 bp, Homo sapiens
ctctatggtttccgcggctcgctagaaggagtgcggtccactggaggtctccctacattcttcctccattatctcactgcctccggtggctgctgggataccggagactcgggtcccggctcgactcagtcctccagccgcccggggaatacctctagttcttcccggccgccgccgcctccgccccgccgcttcctcctccgcctgccggcctccttcgccccgccccgtccgcgcagcgcgtccggcccgcccgcaggccagcttctctcgggagcctccacccaggcgcatggctccatgaagcaagaggaggaggcagagcgcgagagatcccgtccgccccagccgcgtctgggccaggagaaaagcaaaaccatattcctgctgctgtcagttttgatgcactgagaaaacttcagagacctaagctttttccagagaagagaagctttactggtgttccagccctaagaaacttaaatcctcagtgtgacacaactcagtccttctactgcagcagctcttttataaaagcctcccaaagctccaagaaggaacaaagaatgtgacccagtaagctcacaccataagtctatattgcagaaacctttgttcaacaaaactgcagatgctctgttgaatccactggagattgtcctgatactaaggacaagtatgggaatttctacttatcttaaaaacatatatagatattgatctgcggagaaatatatctctgttatttcaaggctcatatgacattaacagacaagacacttttcagaaagacagaaactactctgaaaaactctcttaatgctttttacggccgggtgcggtggctggagcctgtaatcca

SEQ ID NO: 361740 - DNA, 840 bp, Homo sapiens
agtatgatcacctcttgccaatgcaatttcacttgatttgcaactggtgtttagtaaagaattttgctatgcaaaaatagtgtcttaattggattattgtaagacaaagtatgcatttttaatgtcgtattagtattttattaataaggctagggaaacccactaaatccctatactaaagtgaatttgattctcccatagaaacttaaatcctcagtgtgacacaactcagtccttctactgcagcagctcttttataaaagcctcccaaagctccaagaaggaacaaagaatgtgacccagtaagctcacaccataagtctatattgcagaaacctttgttcaacaaaactgcagatgctctgttgaatccactggagattgtcctgatactaaggacaagtatgctcatatgacattaacagacaagacacttttcagaaagacaggctgttgtacagtggcctgattatagctcactgtagcctcgaaattctgggccgaaatgatccgcctgcctcagcctccaaagtagctgagactacaggctggtcttgaactcttgggctgaagagattctcccacctcagcctcccaaggtgttgagattacaagcatgagccacctcacctggccaagagctagttgttaaaagagcctagcactacccccctctttcttgtttcctctctcaccatgtgatctccacacacattggcttgccttccctttctgacatgagcggaagcagcctgaggccctcaccagatgtggatgccagtgccatgcttcttgtacaatctgcagaatcataagctaaatacacctcttttctttata

SEQ ID NO: 361741 - DNA, 774 bp, Homo sapiens
ctgccccatcttcctcccttcttctaagactccagttacgtatgtattaggcctgttcaccacttcccacaagtatcttatgttctttgctgtattttccatactctttgtctctgtttttcagcttagagtttttattctgtcctgtattacagttcaaagaatgttccttctgctaaatctaattgtagttaacccatatgctaagtacttaatttcagttattgtatttttaagttttaaatttccatttcattctttcttatagattccagttctttgatgaaagtctctattccacccatcaagtctgtgtctgataacaccaatatctgggtcattagtggctccgttttgttgtgtctgttttcccctccttcctgttttgtggtgtgtttgatcacttattgttgaatgctaaccattataataaattttagtggctccaggaaacattatctgaaaacaatgtctgtctcaagggagggtttaccatgtcatctgatagacagagtgggaagattttaccttaatccaatggtactgaactgactagagtctatgttgcagtttttggaaggcttcatctccatctctggtttgcccatctatctagagtgtggtcctccaaggattccagctgagcgtctgatgtgattattaggcttcttttccttggtgggtcctgaactccaacttttatctcattaatatgacactgccaaaacctgctgcctttcatagcctttctgcatagcttaattcagcagatgc

SEQ ID NO: 361742 - DNA, 379 bp, Homo sapiens
cctcctggctttttgagaatcggctggcatcagggtgctgactgacaaacttcccggggtctgggcacggtggggacggagcctgcagacggcggtgtccccgctagaagagccgtggggacgtgattaacagttacaagctattgaggcactccagagtgacggcatgtgatccccctgacacaagaaacaggcccagataacacaccgttcagaccgacagcagttctggttatgctgcagtacatcagaaaagtgctcttatccatccacagttcttatcacagttacttatgcatatattcattttttatataaaagaatcttgaatcggtcacttaaatattgaatctcaataataaaaaatactaaaagttta

SEQ ID NO: 361743 - DNA, 1227 bp, Homo sapiens
ctctatggtttccgcggctcgctagaaggagtgcggtccactggaggtctccctacattcttcctccattatctcactgcctccggtggctgctgggataccggagactcgggtcccggctcgactcagtcctccagccgcccggggaatacctctagttcttcccggccgccgccgcctccgccccgccgcttcctcctccgcctgccggcctccttcgccccgccccgtccgcgcagcgcgtccggcccgcccgcaggccagcttctctcgggagcctccacccaggcgcatggctccatgaagcaagaggaggaggcagagcgcgagagatcccgtccgccccagccgcgtctgggccaggagaaaagcaaaaccatattcctgctgctgtcagttttgatgcactgagaaaacttcagagacctaagctttttccagagaagagaagctttactggtgttccagccctaaggctcatatgacattaacagacaagacacttttcagaaagacaggcaacgtgttggaccttccggagcttctcagaagacagagggttttcttttgaggctgttgtacagtggcctgattatagctcactgtagcctcgaaattctgggccgaaatgatccgcctgcctcagcctccaaagtagctgagactacagacaaatcaactcaatcaaagaaaccaactcaaagaaagatgggtctacatacaacaaaactgaacaaaatctgcaagaagagtgattcatacatgggctattgaggcaacatgagatggacattaatcgactaagtaaaaaacagatttcttgaagaattaataaagaacttttgttttggaaaaactctattgtttaaaattagccagatgtggtggcctgcacctacagtcccagctactcaggaggctgaggtggaaggatcacttgagcccaagaggcggaggttgcagtgagctgagactgtgccgctgcactacagacagcctcctgcatgacagagccagaccctgtctcaaaatttgggggggagtaaagttctctattgtttgaaataataacgaaacattaaaggctctaaagtcagctaacgaatagtcctaaaaatagaatggctcaaaaagattgtccaattttggaaaactaacatttcaaaaagttgtttcattttttatgaatcctaagatttccatatcctagaaaactaacatctcaga

SEQ ID NO: 361744 - DNA, 1331 bp, Homo sapiens
ctctatggtttccgcggctcgctagaaggagtgcggtccactggaggtctccctacattcttcctccattatctcactgcctccggtggctgctgggataccggagactcgggtcccggctcgactcagtcctccagccgcccggggaatacctctagttcttcccggccgccgccgcctccgccccgccgcttcctcctccgcctgccggcctccttcgccccgccccgtccgcgcagcgcgtccggcccgcccgcaggccagcttctctcgggagcctccacccaggcgcatggctccatgaagcaagaggaggaggcagagcgcgagagatcccgtccgccccagccgcgtctgggccaggagaaaagcaaaaccatattcctgctgctgtcagttttgatgcactgagaaaacttcagagacctaagctttttccagagaagagaagctttactggtgttccagccctaaggctcatatgacattaacagacaagacacttttcagaaagacagatggagtctctctgtcacccagactggaatgcagtggcatgatcttggttcactgaaacctctgcctttctggttcaagcaattctcatgtttcagcctcccaggcaacgtgttggaccttccggagcttctcagaagacagagggttttcttttgaggctgttgtacagtggcctgattatagctcactgtagcctcgaaattctgggccgaaatgatccgcctgcctcagcctccaaagtagctgagactacagacaaatcaactcaatcaaagaaaccaactcaaagaaagatgggtctacatacaacaaaactgaacaaaatctgcaagaagagtgattcatacatgggctattgaggcaacatgagatggacattaatcgactaagtaaaaaacagatttcttgaagaattaataaagaacttttgttttggaaaaactctattgtttaaaattagccagatgtggtggcctgcacctacagtcccagctactcaggaggctgaggtggaaggatcacttgagcccaagaggcggaggttgcagtgagctgagactgtgccgctgcactacagacagcctcctgcatgacagagccagaccctgtctcaaaatttgggggggagtaaagttctctattgtttgaaataataacgaaacattaaaggctctaaagtcagctaacgaatagtcctaaaaatagaatggctcaaaaagattgtccaattttggaaaactaacatttcaaaaagttgtttcattttttatgaatcctaagatttccatatcctagaaaactaacatctcaga

SEQ ID NO: 361745 - DNA, 1539 bp, Homo sapiens
ctctatggtttccgcggctcgctagaaggagtgcggtccactggaggtctccctacattcttcctccattatctcactgcctccggtggctgctgggataccggagactcgggtcccggctcgactcagtcctccagccgcccggggaatacctctagttcttcccggccgccgccgcctccgccccgccgcttcctcctccgcctgccggcctccttcgccccgccccgtccgcgcagcgcgtccggcccgcccgcaggccagcttctctcgggagcctccacccaggcgcatggctccatgaagcaagaggaggaggcagagcgcgagagatcccgtccgccccagccgcgtctgggccaggagaaaagcaaaaccatattcctgctgctgtcagttttgatgcactgagaaaacttcagagacctaagctttttccagagaagagaagctttactggtgttccagccctaagaaacttaaatcctcagtgtgacacaactcagtccttctactgcagcagctcttttataaaagcctcccaaagctccaagaaggaacaaagaatgtgacccagtaagctcacaccataagtctatattgcagaaacctttgttcaacaaaactgcagatgctctgttgaatccactggagattgtcctgatactaaggacaagtatgctcatatgacattaacagacaagacacttttcagaaagacaggttgttcttttgggccacatctaagaaatctttgtctagccaaaagccacaaataatttctcattttttggcttctggaagatgtacagttaaatgttatatttgggactgttatctaatttgattaaattgcactctacaatatgatatttgaattgatgaaaaattagtaaatgttaatattttttaaagtagccaaatcttgcaatttatatataatagagaagactagaaaatcccccatatttatttcctcttacttcgtactactaaaatttgtatttaggcatttggtttctcagataaacattacattccccagtatatggttctatctggcttggtgacgacatgttgaacattaagatgtgagcagaagtaatacatacacactctttttaatgtctttaattgaatgggatattggcccattttttcttccagtttattacactgaatattgacatgttattttccaatattgagacaatcaatgacaagactttaagagtaacaatgtaaaaattatagaagttgtctgagtttatcaacaatcccctggattagaaccccctaccagttctaggtcatctaatatatagacattgtgttcagtagaaataaatatatatattttttaatatactttaagttctaggatacatgtgcacaacatgcaggtttgttacattggtatacacatgccatgttggtttgctgcacccattaactcatcatttacattagttatttctcctaatgctatccctccccctgccccccaccccccgacaggccctggggtgtgatgttccc

SEQ ID NO: 361746 - DNA, 1341 bp, Homo sapiens
aattgctgatgataccaccaccaagaaatcatcaccattaatattttggcttttttgttttcagattttttccattatgaaattgttgatatttgatccttttgacctataaaaatgttaatatcatatagcttactcgaacatatccaaataatgtcatatatattattttatgtaccaaaaagcatactaaacagattgttttatagcttacttttctcatttttaacattataatttaagcatttgttcataatattaaaactttttgaaaacattattatgaatgactatttcaatatgtggatgtaccacaacttacctaatgatttacctactggtaatcattgagttggactggttggacatgagttgtttctaatttgtcgctattacaaataatgctctgataaatatgtataattaatttgtgtttcagattatttttatttctagaaatgagattcttggttataggctaaatatattttcttgttttttttttttttgttcatttgtttgtttgagatggagtctctctgtcacccagactggaatgcagtggcatgatcttggttcactgaaacctctgcctttctggttcaagcaattctcatgtttcagcctcccaggcaacgtgttggaccttccggagcttctcagaagacagagggttttcttttgaggctgttgtacagtggcctgattatagctcactgtagcctcgaaattctgggccgaaatgatccgcctgcctcagcctccaaagtagctgagactacagacaaatcaactcaatcaaagaaaccaactcaaagaaagatgggtctacatacaacaaaactgaacaaaatctgcaagaagagtgattcatacatgggctattgaggcaacatgagatggacattaatcgactaagtaaaaaacagatttcttgaagaattaataaagaacttttgttttggaaaaactctattgtttaaaattagccagatgtggtggcctgcacctacagtcccagctactcaggaggctgaggtggaaggatcacttgagcccaagaggcggaggttgcagtgagctgagactgtgccgctgcactacagacagcctcctgcatgacagagccagaccctgtctcaaaatttgggggggagtaaagttctctattgtttgaaataataacgaaacattaaaggctctaaagtcagctaacgaatagtcctaaaaatagaatggctcaaaaagattgtccaattttggaaaactaacatttcaaaaagttgtttcattttttatgaatcctaagatttccatatcctagaaaactaacatctcaga

SEQ ID NO: 361747 - DNA, 1369 bp, Homo sapiens
ctctatggtttccgcggctcgctagaaggagtgcggtccactggaggtctccctacattcttcctccattatctcactgcctccggtggctgctgggataccggagactcgggtcccggctcgactcagtcctccagccgcccggggaatacctctagttcttcccggccgccgccgcctccgccccgccgcttcctcctccgcctgccggcctccttcgccccgccccgtccgcgcagcgcgtccggcccgcccgcaggccagcttctctcgggagcctccacccaggcgcatggctccatgaagcaagaggaggaggcagagcgcgagagatcccgtccgccccagccgcgtctgggccaggagaaaagcaaaaccatattcctgctgctgtcagttttgatgcactgagaaaacttcagagacctaagctttttccagagaagagaagctttactggtgttccagccctaagaaacttaaatcctcagtgtgacacaactcagtccttctactgcagcagctcttttataaaagcctcccaaagctccaagaaggaacaaagaatgtgacccagtaagctcacaccataagtctatattgcagaaacctttgttcaacaaaactgcagatgctctgttgaatccactggagattgtcctgatactaaggacaagtatgctcatatgacattaacagacaagacacttttcagaaagacaggttgttcttttgggccacatctaagaaatctttgtctagccaaaagccacaaataatttctcattttttggcttctggaagatgtacagttaaatgttatatttgggactgttatctaatttgattaaattgcactctacaatatgatatttgaattgatgaaaaattagtaaatgttaatattttttaaagtagccaaatcttgcaatttatatataatagagaagactagaaaatcccccatatttatttcctcttacttcgtactactaaaatttgtatttaggcatttggtttctcagataaacattacattccccagtatatggttctatctggcttggtgacgacatgttgaacattaagatgtgagcagaagtaatacatacacactctttttaatgtctttaattgaatgggatattggcccattttttcttccagtttattacactgaatattgacatgttattttccaatattgagacaatcaatgacaagactttaagagtaacaatgtaaaaattatagaagttgtctgagtttatcaacaatcccctggattagaaccccctaccagttctaggtcatctaatatatagacattgtgttcagtagaaataaatatatatattttttaatatac

SEQ ID NO: 361748 - DNA, 963 bp, Homo sapiens
ctctatggtttccgcggctcgctagaaggagtgcggtccactggaggtctccctacattcttcctccattatctcactgcctccggtggctgctgggataccggagactcgggtcccggctcgactcagtcctccagccgcccggggaatacctctagttcttcccggccgccgccgcctccgccccgccgcttcctcctccgcctgccggcctccttcgccccgccccgtccgcgcagcgcgtccggcccgcccgcaggccagcttctctcgggagcctccacccaggcgcatggctccatgaagcaagaggaggaggcagagcgcgagagatcccgtccgccccagccgcgtctgggccaggagaaaagcaaaaccatattcctgctgctgtcagttttgatgcactgagaaaacttcagagacctaagctttttccagagaagagaagctttactggtgttccagccctaaggctcatatgacattaacagacaagacacttttcagaaagacaggcaacgtgttggaccttccggagcttctcagaagacagagggttttcttttgaggctgttgtacagtggcctgattatagctcactgtagcctcgaaattctgggccgaaatgatccgcctgcctcagcctccaaagtagctgagactacaggctggtcttgaactcttgggctgaagagattctcccacctcagcctcccaaggtgttgagattacaagcatgagccacctcacctggccaagagctagttgttaaaagagcctagcactacccccctctttcttgtttcctctctcaccatgtgatctccacacacattggcttgccttccctttctgacatgagcggaagcagcctgaggccctcaccagatgtggatgccagtgccatgcttcttgtacaatctgcagaatcataagctaaatacacctcttttctttata

SEQ ID NO: 361749 - DNA, 981 bp, Homo sapiens
ctctatggtttccgcggctcgctagaaggagtgcggtccactggaggtctccctacattcttcctccattatctcactgcctccggtggctgctgggataccggagactcgggtcccggctcgactcagtcctccagccgcccggggaatacctctagttcttcccggccgccgccgcctccgccccgccgcttcctcctccgcctgccggcctccttcgccccgccccgtccgcgcagcgcgtccggcccgcccgcaggccagcttctctcgggagcctccacccaggcgcatggctccatgaagcaagaggaggaggcagagcgcgagagatcccgtccgccccagccgcgtctgggccaggagaaaagcaaaaccatattcctgctgctgtcagttttgatgcactgagaaaacttcagagacctaagctttttccagagaagagaagctttactggtgttccagccctaaggctcatatgacattaacagacaagacacttttcagaaagacaggcaacgtgttggaccttccggagcttctcagaagacagagggttttcttttgaggctgttgtacagtggcctgattatagctcactgtagcctcgaaattctgggccgaaatgatccgcctgcctcagcctccaaagtagctgagactacaggtgtgtttgtcaaagtgtctctgatgaaccacaacaagtttgtcaagtgcaagaagacttcagctgtgctgggctccatcaaccctgtgtacaatgagaccttcagcttcaaggccgatgccaccaagctggataccgctagcctcagcctgaccgcggtgcagaacatggaaggggacagtaaggccacaccctaccctgggctgctgggatggggaccacgaggggctgccgagtgttcaggcagagtgagtgcctcctgtcctgacctcagaaggagctgtacgagctccctccctggttaaggaaac

SEQ ID NO: 361750 - DNA, 1280 bp, Homo sapiens
ctctatggtttccgcggctcgctagaaggagtgcggtccactggaggtctccctacattcttcctccattatctcactgcctccggtggctgctgggataccggagactcgggtcccggctcgactcagtcctccagccgcccggggaatacctctagttcttcccggccgccgccgcctccgccccgccgcttcctcctccgcctgccggcctccttcgccccgccccgtccgcgcagcgcgtccggcccgcccgcaggccagcttctctcgggagcctccacccaggcgcatggctccatgaagcaagaggaggaggcagagcgcgagagatcccgtccgccccagccgcgtctgggccaggagaaaagcaaaaccatattcctgctgctgtcagttttgatgcactgagaaaacttcagagacctaagctttttccagagaagagaagctttactggtgttccagccctaaggctcatatgacattaacagacaagacacttttcagaaagacagatggagtctctctgtcacccagactggaatgcagtggcatgatcttggttcactgaaacctctgcctttctggttcaagcaattctcatgtttcagcctcccaggcaacgtgttggaccttccggagcttctcagaagacagagggttttcttttgaggctgttgtacagtggcctgattatagctcactgtagcctcgaaattctgggccgaaatgatccgcctgcctcagcctccaaagtagctgagactacagattccagttctttgatgaaagtctctattccacccatcaagtctgtgtctgataacaccaatatctgggtcattagtggctccgttttgttgtgtctgttttcccctccttcctgttttgtggtgtgtttgatcacttattgttgaatgctaaccattataataaattttagtggctccaggaaacattatctgaaaacaatgtctgtctcaagggagggtttaccatgtcatctgatagacagagtgggaagattttaccttaatccaatggtactgaactgactagagtctatgttgcagtttttggaaggcttcatctccatctctggtttgcccatctatctagagtgtggtcctccaaggattccagctgagcgtctgatgtgattattaggcttcttttccttggtgggtcctgaactccaacttttatctcattaatatgacactgccaaaacctgctgcctttcatagcctttctgcatagcttaattcagcagatgc

SEQ ID NO: 361751 - DNA, 871 bp, Homo sapiens
ttttatgaagtcatatttattgttgttgtaactggtttttttgtttgttctctaggttgttcttttgggccacatctaagaaatctttgtctagccaaaagccacaaataatttctcattttttggcttctggaagatgtacagttaaatgttatatttgggactgttatctaatttgattaaattgcactctacaatatgatatttgaattgatgaaaaattagtaaatgttaatattttttaaagtagccaaatcttgcaatttatatataatagagaagactagaaaatcccccatatttatttcctcttacttcgtactactaaaatttgtatttaggcatttggtttctcagataaacattacattccccagtatatggttctatctggcttggtgacgacatgttgaacattaagatgtgagcagaagtaatacatacacactctttttaatgtctttaattgaatgggatattggcccattttttcttccagtttattacactgaatattgacatgttattttccaatattgagacaatcaatgacaagactttaagagtaacaatgtaaaaattatagaagttgtctgagtttatcaacaatcccctggattagaaccccctaccagttctaggtcatctaatatatagacattgtgttcagtagaaataaatatatatattttttaatatactttaagttctaggatacatgtgcacaacatgcaggtttgttacattggtatacacatgccatgttggtttgctgcacccattaactcatcatttacattagttatttctcctaatgctatccctccccctgccccccaccccccgacaggccctggggtgtgatgttccc

SEQ ID NO: 361752 - DNA, 762 bp, Homo sapiens
ccagggactgagagagggaacaggaaattggcaacgtgttggaccttccggagcttctcagaagacagagggttttcttttgaggctgttgtacagtggcctgattatagctcactgtagcctcgaaattctgggccgaaatgatccgcctgcctcagcctccaaagtagctgagactacaggtattgtttgggttttaatacagacaaatcaactcaatcaaagaaaccaactcaaagaaagatgggtctacatacaacaaaactgaacaaaatctgcaagaagagtgattcatacatgggctattgaggcaacatgagatggacattaatcgactaagtaaaaaacagatttcttgaagaattaataaagaacttttgttttggaaaaactctattgtttaaaattagccagatgtggtggcctgcacctacagtcccagctactcaggaggctgaggtggaaggatcacttgagcccaagaggcggaggttgcagtgagctgagactgtgccgctgcactacagacagcctcctgcatgacagagccagaccctgtctcaaaatttgggggggagtaaagttctctattgtttgaaataataacgaaacattaaaggctctaaagtcagctaacgaatagtcctaaaaatagaatggctcaaaaagattgtccaattttggaaaactaacatttcaaaaagttgtttcattttttatgaatcctaagatttccatatcctagaaaactaacatctcaga

SEQ ID NO: 361753 - DNA, 712 bp, Homo sapiens
ctctatggtttccgcggctcgctagaaggagtgcggtccactggaggtctccctacattcttcctccattatctcactgcctccggtggctgctgggataccggagactcgggtcccggctcgactcagtcctccagccgcccggggaatacctctagttcttcccggccgccgccgcctccgccccgccgcttcctcctccgcctgccggcctccttcgccccgccccgtccgcgcagcgcgtccggcccgcccgcaggccagcttctctcgggagcctccacccaggcgcatggctccatgaagcaagaggaggaggcagagcgcgagagatcccgtccgccccagccgcgtctgggccaggagaaaagcaaaaccatattcctgctgctgtcagttttgatgcactgagaaaacttcagagacctaagctttttccagagaagagaagctttactggtgttccagccctaaggctcatatgacattaacagacaagacacttttcagaaagacaggcaacgtgttggaccttccggagcttctcagaagacagagggttttcttttgaggtaaatttgatagtacattttgatagtacaggaggcgatacggcatggtgacagaaaagcgccggcttggttagcgggaccacctggcagggctgcaggctgtgccacttaccaggcaggggaccttgggccagctgctt

SEQ ID NO: 361754 - DNA, 527 bp, Homo sapiens
ttccgggttgtcaagtgtctctgatgaaccacaacaagttgtcaagtgcaagaagacttcagctgcaacgtgttggaccttccggagcttctcagaagacagagggttttcttttgaggctgttgtacagtggcctgattatagctcactgtagcctcgaaattctgggccgaaatgatccgcctgcctcagcctccaaagtagctgagactacaggtgtgtttgtcaaagtgtctctgatgaaccacaacaagtttgtcaagtgcaagaagacttcagctgtgctgggctccatcaaccctgtgtacaatgagaccttcagcttcaaggccgatgccaccaagctggataccgctagcctcagcctgaccgcggtgcagaacatggaaggggacagtaaggccacaccctaccctgggctgctgggatggggaccacgaggggctgccgagtgttcaggcagagtgagtgcctcctgtcctgacctcagaaggagctgtacgagctccctccctggttaaggaaac

SEQ ID NO: 361755 - DNA, 956 bp, Homo sapiens
ctctatggtttccgcggctcgctagaaggagtgcggtccactggaggtctccctacattcttcctccattatctcactgcctccggtggctgctgggataccggagactcgggtcccggctcgactcagtcctccagccgcccggggaatacctctagttcttcccggccgccgccgcctccgccccgccgcttcctcctccgcctgccggcctccttcgccccgccccgtccgcgcagcgcgtccggcccgcccgcaggccagcttctctcgggagcctccacccaggcgcatggctccatgaagcaagaggaggaggcagagcgcgagagatcccgtccgccccagccgcgtctgggccaggagaaaagcaaaaccatattcctgctgctgtcagttttgatgcactgagaaaacttcagagacctaagctttttccagagaagagaagctttactggtgttccagccctaaggctcatatgacattaacagacaagacacttttcagaaagacagatggagtctctctgtcacccagactggaatgcagtggcatgatcttggttcactgaaacctctgcctttctggttcaagcaattctcatgtttcagcctcccaggcaacgtgttggaccttccggagcttctcagaagacagagggttttcttttgaggctgttgtacagtggcctgattatagctcactgtagcctcgaaattctgggccgaaatgatccgcctgcctcagcctccaaagtagctgagactacagacaaatcaactcaatcaaagaaaccaactcaaagaaagatgggtctacatacaacaaaactgaacaaaatctgcaagaagagtgattcatacatgggctattgaggcaacatgagatggacattaatcgactaagtaaaaaacagatttcttgaagaattaataaagaacttttgttttgga

SEQ ID NO: 361756 - DNA, 959 bp, Homo sapiens
ctctatggtttccgcggctcgctagaaggagtgcggtccactggaggtctccctacattcttcctccattatctcactgcctccggtggctgctgggataccggagactcgggtcccggctcgactcagtcctccagccgcccggggaatacctctagttcttcccggccgccgccgcctccgccccgccgcttcctcctccgcctgccggcctccttcgccccgccccgtccgcgcagcgcgtccggcccgcccgcaggccagcttctctcgggagcctccacccaggcgcatggctccatgaagcaagaggaggaggcagagcgcgagagatcccgtccgccccagccgcgtctgggccaggagaaaagcaaaaccatattcctgctgctgtcagttttgatgcactgagaaaacttcagagacctaagctttttccagagaagagaagctttactggtgttccagccctaaggctcatatgacattaacagacaagacacttttcagaaagacaggcaacgtgttggaccttccggagcttctcagaagacagagggttttcttttgaggctgttgtacagtggcctgattatagctcactgtagcctcgaaattctgggccgaaatgatccgcctgcctcagcctccaaagtagctgagactacagactctggaagtctctctttggcgaacacctagcccccaactcccagggcacttcccagacagccaatgccacatcacaggcagcccctgctctgcccttggggtctgtgcctggcagaagggcggcagaccctcggcccctcttggcctgggccccagctcctccgggccctggaaccagcagaaacacccaccctgcgcctgatggactggacatgcttgttcccattggtgatggtgtgttgggagggaactgttttagaaaccaatgtaaatctgtgtctacatca

SEQ ID NO: 361757 - DNA, 1176 bp, Homo sapiens
ctctatggtttccgcggctcgctagaaggagtgcggtccactggaggtctccctacattcttcctccattatctcactgcctccggtggctgctgggataccggagactcgggtcccggctcgactcagtcctccagccgcccggggaatacctctagttcttcccggccgccgccgcctccgccccgccgcttcctcctccgcctgccggcctccttcgccccgccccgtccgcgcagcgcgtccggcccgcccgcaggccagcttctctcgggagcctccacccaggcgcatggctccatgaagcaagaggaggaggcagagcgcgagagatcccgtccgccccagccgcgtctgggccaggagaaaagcaaaaccatattcctgctgctgtcagttttgatgcactgagaaaacttcagagacctaagctttttccagagaagagaagctttactggtgttccagccctaaggctcatatgacattaacagacaagacacttttcagaaagacaggcaacgtgttggaccttccggagcttctcagaagacagagggttttcttttgaggctgttgtacagtggcctgattatagctcactgtagcctcgaaattctgggccgaaatgatccgcctgcctcagcctccaaagtagctgagactacagattccagttctttgatgaaagtctctattccacccatcaagtctgtgtctgataacaccaatatctgggtcattagtggctccgttttgttgtgtctgttttcccctccttcctgttttgtggtgtgtttgatcacttattgttgaatgctaaccattataataaattttagtggctccaggaaacattatctgaaaacaatgtctgtctcaagggagggtttaccatgtcatctgatagacagagtgggaagattttaccttaatccaatggtactgaactgactagagtctatgttgcagtttttggaaggcttcatctccatctctggtttgcccatctatctagagtgtggtcctccaaggattccagctgagcgtctgatgtgattattaggcttcttttccttggtgggtcctgaactccaacttttatctcattaatatgacactgccaaaacctgctgcctttcatagcctttctgcatagcttaattcagcagatgc

SEQ ID NO: 361758 - DNA, 888 bp, Homo sapiens
ctctatggtttccgcggctcgctagaaggagtgcggtccactggaggtctccctacattcttcctccattatctcactgcctccggtggctgctgggataccggagactcgggtcccggctcgactcagtcctccagccgcccggggaatacctctagttcttcccggccgccgccgcctccgccccgccgcttcctcctccgcctgccggcctccttcgccccgccccgtccgcgcagcgcgtccggcccgcccgcaggccagcttctctcgggagcctccacccaggcgcatggctccatgaagcaagaggaggaggcagagcgcgagagatcccgtccgccccagccgcgtctgggccaggagaaaagcaaaaccatattcctgctgctgtcagttttgatgcactgagaaaacttcagagacctaagctttttccagagaagagaagctttactggtgttccagccctaaggctcatatgacattaacagacaagacacttttcagaaagacaggcaacgtgttggaccttccggagcttctcagaagacagagggttttcttttgaggctgttgtacagtggcctgattatagctcactgtagcctcgaaattctgggccgaaatgatccgcctgcctcagcctccaaagtagctgagactacagattccagttctttgatgaaagtctctattccacccatcaagtctgtgtctgataacaccaatatctgggtcattagtggctccgttttgttgtgtctgttttcccctccttcctgttttgtggtgtgtttgatcacttattgttgaatgctaaccattataataaaaagagatgcggccaggtttccccctttttttcaccccgttcgataataccta

SEQ ID NO: 361759 - DNA, 3255 bp, Homo sapiens
gccgcccagcgactccccctccccctcccccagccccgccccgccccaacccggggctccgagccggagccgagtctgcgcctgggggaggaccatgcggcagtagcagccatgctgccctttctgctggccacactgggcaccacagccctcaacaacagcaaccccaaggactactgctacagcgcccgcatccgcagcactgtcctgcagggcctgccctttgggggcgtccccaccgtgctggctctcgacttcatgtgcttccttgcactgctgttcttattctctatcctccggaaggtggcctgggactatgggcggctggccttggtgacagatgcagacaggcttcggcggcaggagagggaccgagtggaacaggaatatgtggcttcagctatgcacggggacagccatgaccggtatgagcgtctcacctctgtctccagctccgttgactttgaccaaagggacaatggtttctgttcctggctgacagccatcttcaggataaaggatgatgagatccgggacaaatgtgggggcgatgccgtgcactacctgtcctttcagcggcacatcatcgggctgctggtggttgtgggcgtcctctccgtaggcatcgtgctgcctgtcaacttctcaggggacctgctggagaacaatgcctacagctttgggagaaccaccattgccaacttgaaatcagggaacaacctgctatggctgcacacctccttcgccttcctgtatctgctgctcaccgtctacagcatgcgtagacacacctccaagatgcgctacaaggaggatgatctggtgaagcggaccctcttcatcaatggaatctccaaatatgcagagtcagaaaagatcaagaagcattttgaggaagcctaccccaactgcacagttctcgaagcccgcccgtgttacaacgtggctcgcctaatgttcctcgatgcagagaggaagaaggccgagcggggaaagctgtacttcacaaacctccagagcaaggagaacgtgcctaccatgatcaaccccaagccctgtggccacctctgctgctgtgtggtgcgaggctgtgagcaggtggaggccattgagtactacacaaagctggagcagaagctgaaggaagactacaagcgggagaaggagaaggtgaatgagaagcctcttggcatggcctttgtcaccttccacaatgagactatcaccgccatcatcctgaaggacttcaacgtgtgtaaatgccagggctgcacctgccgtggggagccacgcccctcatcctgcagcgagtccctgcacatctccaactggaccgtgtcctatgcccctgaccctcagaacatctactgggagcacctctccatccgaggcttcatctggtggctgcgctgcctggtcatcaatgtcgtcctcttcatcctcctcttcttcctcaccactccagccatcatcatcaccaccatggacaagttcaacgtcaccaagcctgtggagtacctcaacaaccccatcatcacccagttcttccccaccctgctgctgtggtgcttctcggccctccttcccaccatcgtctactactcagccttctttgaagcccactggacacgctctggggagaacaggacaaccatgcacaagtgctacactttcctcatcttcatggtgctgctcctaccctcgctgggactgagcagcctggacctcttcttccgctggctctttgataagaaattcttggctgaggcagctattcggtttgagtgtgtgttcctgcccgacaacggcgccttcttcgtgaactacgtcattgcctcagcctttatcggcaacgccatggacctgctgcgcatcccaggcctgctcatgtacatgatccggctctgcctggcgcgctcggccgccgagaggcgcaacgtgaagcggcatcaggcctacgagttccagtttggcgcagcctacgcctggatgatgtgcgtcttcacggtggtcatgacctacagtatcacctgccccatcatcgtgcccttcgggctcatgtacatgctgctgaagcacctggtagacaggtacaatctctactacgcctacctgccggccaagctggacaagaagatccactcgggggctgtgaaccaggtggtggccgcgcccatcctctgcctcttctggctgctcttcttttccaccatgcgcacggggttcctagctcccacgtctatgttcacatttgtggtcctggtcatcaccatcgtcatctgtctctgccacgtctgctttggacacttcaaatacctcagtgcccacaactacaagattgagcacacggagacagatactgtggaccccagaagcaatggacggccccccactgctgctgctgtccccaaatctgcgaaatacatcgctcaggtgctgcaggactcagaggtggacggggatggggatggggctcctgggagctcaggggatgagcccccatcatcctcatcccaagatgaggagttgctgatgccacccgacgccctcacggacacagacttccagtcttgcgaggacagcctcatagagaatgagattcaccagtaaggggagggaggggccctggaggccacatcctgccccaccccacccccactcccacggacactaaaacgctaataatttattagatctaaagccccttcctccccagcccctgctttcattaaggtatttaaacttgggggtttcactgctctcccccatgatggagggagggagccccccaacctcagtgaggagagccccgagccggccccggggcaaagaggggtgcagagggagttcccccagatcagtaccccccacccctccccagctagtagcatgaccaggagagggttaatgagagccaagaggagtacctggtgcacctggtgccggtggctggagacctggggggcaggtggatctggggctgttcccccccctccgttttttccaccccacagttcctcctgggatctggccctccagggaagtggagcctccagcccctaggggatgcatgaggggggagggggtgctgagtgggaggaagagtcaggctcacagctggggtggcctgggggtgggggtgggcaaggctgacactggaaaatgggtttttgcactgttttttttttggtttttttgttcttttttgtttttttcctttaaaataaaaacaaagaaaagctctgaaaaaaaaaa

SEQ ID NO: 361760 - DNA, 2951 bp, Homo sapiens
gccgcccagcgactccccctccccctcccccagccccgccccgccccaacccggggctccgagccggagccgagtctgcgcctgggggaggaccatgcggcagtagcagccatgctgccctttctgctggccacactgggcaccacagccctcaacaacagcaaccccaaggactactgctacagcgcccgcatccgcagcactgtcctgcagggcctgccctttgggggcgtccccaccgtgctggctctcgacttcatgtgcttccttgcactgctgttcttattctctatcctccggaaggtggcctgggactatgggcggctggccttggtgacagatgcagacaggcttcggcggcaggagagggaccgagtggaacaggaatatgtggcttcagctatgcacggggacagccatgaccggtatgagcgtctcacctctgtctccagctccgttgactttgaccaaagggacaatggtttctgttcctggctgacagccatcttcaggataaagtgaagcggaccctcttcatcaatggaatctccaaatatgcagagtcagaaaagatcaagaagcattttgaggaagcctaccccaactgcacagttctcgaagcccgcccgtgttacaacgtggctcgcctaatgttcctcgatgcagagaggaagaaggccgagcggggaaagctgtacttcacaaacctccagagcaaggagaacgtgcctaccatgatcaaccccaagccctgtggccacctctgctgctgtgtggtgcgaggctgtgagcaggtggaggccattgagtactacacaaagctggagcagaagctgaaggaagactacaagcgggagaaggagaaggtgaatgagaagcctcttggcatggcctttgtcaccttccacaatgagactatcaccgccatcatcctgaaggacttcaacgtgtgtaaatgccagggctgcacctgccgtggggagccacgcccctcatcctgcagcgagtccctgcacatctccaactggaccgtgtcctatgcccctgaccctcagaacatctactgggagcacctctccatccgaggcttcatctggtggctgcgctgcctggtcatcaatgtcgtcctcttcatcctcctcttcttcctcaccactccagccatcatcatcaccaccatggacaagttcaacgtcaccaagcctgtggagtacctcaacaaccccatcatcacccagttcttccccaccctgctgctgtggtgcttctcggccctccttcccaccatcgtctactactcagccttctttgaagcccactggacacgctctggggagaacaggacaaccatgcacaagtgctacactttcctcatcttcatggtgctgctcctaccctcgctgggactgagcagcctggacctcttcttccgctggctctttgataagaaattcttggctgaggcagctattcggtttgagtgtgtgttcctgcccgacaacggcgccttcttcgtgaactacgtcattgcctcagcctttatcggcaacgccatggacctgctgcgcatcccaggcctgctcatgtacatgatccggctctgcctggcgcgctcggccgccgagaggcgcaacgtgaagcggcatcaggcctacgagttccagtttggcgcagcctacgcctggatgatgtgcgtcttcacggtggtcatgacctacagtatcacctgccccatcatcgtgcccttcgggctcatgtacatgctgctgaagcacctggtagacaggtacaatctctactacgcctacctgccggccaagctggacaagaagatccactcgggggctgtgaaccaggtggtggccgcgcccatcctctgcctcttctggctgctcttcttttccaccatgcgcacggggttcctagctcccacgtctatgttcacatttgtggtcctggtcatcaccatcgtcatctgtctctgccacgtctgctttggacacttcaaatacctcagtgcccacaactacaagattgagcacacggagacagatactgtggaccccagaagcaatggacggccccccactgctgctgctgtccccaaatctgcgaaatacatcgctcaggtgctgcaggactcagaggtggacggggatggggatggggctcctgggagctcaggggatgagcccccatcatcctcatcccaagatgaggagttgctgatgccacccgacgccctcacggacacagacttccagtcttgcgaggacagcctcatagagaatgagattcaccagtaaggggagggaggggccctggaggccacatcctgccccaccccacccccactcccacggacactaaaacgctaataatttattagatctaaagccccttcctccccagcccctgctttcattaaggtatttaaacttgggggtttcactgctctcccccatgatggagggagggagccccccaacctcagtgaggagagccccgagccggccccggggcaaagaggggtgcagagggagttcccccagatcagtaccccccacccctccccagctagtagcatgaccaggagagggttaatgagagccaagaggagtacctggtgcacctggtgccggtggctggagacctggggggcaggtggatctggggctgttcccccccctccgttttttccaccccacagttcctcctgggatctggccctccagggaagtggagcctccagcccctaggggatgcatgaggggggagggggtgctgagtgggaggaagagtcaggctcacagctggggtggcctgggggtgggggtgggcaaggctgacactggaaaatgggtttttgcactgttttttttttggtttttttgttcttttttgtttttttcctttaaaataaaaacaaagaaaagctctgaaaaaaaaaa

SEQ ID NO: 361761 - DNA, 3126 bp, Homo sapiens
gccgcccagcgactccccctccccctcccccagccccgccccgccccaacccggggctccgagccggagccgagtctgcgcctgggggaggaccatgcggcagtagcagccatgctgccctttctgctggccacactgggcaccacagccctcaacaacagcaaccccaaggactactgctacagcgcccgcatccgcagcactgtcctgcagggcctgccctttgggggcgtccccaccgtgctggctctcgacttcatgtgcttccttgcactgctgttcttattctctatcctccggaaggtggcctgggactatgggcggctggccttggtgacagatgcagacaggcttcggcggcaggagagggaccgagtggaacaggaatatgtggcttcagctatgcacggggacagccatgaccggtatgagcgtctcacctctgtctccagctccgttgactttgaccaaagggacaatggtttctgttcctggctgacagccatcttcaggataaaggatgatgagatccgggacaaatgtgggggcgatgccgtgcactacctgtcctttcagcggcacatcatcgggctgctggtggttgtgggcgtcctctccgtaggcatcgtgctgcctgtcaacttctcaggggacctgctggagaacaatgcctacagctttgggagaaccaccattgccaacttgaaatcagggaacaacctgctatggctgcacacctccttcgccttcctgtatctgctgctcaccgtctacagcatgcgtagacacacctccaagatgcgctacaaggaggatgatctggtgaagcggaccctcttcatcaatggaatctccaaatatgcagagtcagaaaagatcaagaagcattttgaggaagcctaccccaactgcacagttctcgaagcccgcccgtgttacaacgtggctcgcctaatgttcctcgatgcagagaggaagaaggccgagcggggaaagctgtacttcacaaacctccagagcaaggagaacgtgcctaccatgatcaaccccaagccctgtggccacctctgctgctgtgtggtgcgaggctgtgagcaggtggaggccattgagtactacacaaagctggagcagaagctgaaggaagactacaagcgggagaaggagaaggtgaatgagaagcctcttggcatggcctttgtcaccttccacaatgagactatcaccgccatcatcctgaaggacttcaacgtgtgtaaatgccagggctgcacctgccgtggggagccacgcccctcatcctgcagcgagtccctgcacatctccaactggaccgtgtcctatgcccctgaccctcagaacatctactgggagcacctctccatccgaggcttcatctggtggctgcgctgcctggtcatcaatgtcgtcctcttcatcctcctcttcttcctcaccactccagccatcatcatcaccaccatggacaagttcaacgtcaccaagcctgtggagtacctcaacaaccccatcatcacccagttcttccccaccctgctgctgtggtgcttctcggccctccttcccaccatcgtctactactcagccttctttgaagcccactggacacgctctggggagaacaggacaaccatgcacaagtgctacactttcctcatcttcatggtgctgctcctaccctcgctgggactgagcagcctggacctcttcttccgctggctctttgataagaaattcttggctgaggcagctattcggtttgagtgtgtgttcctgcccgacaacggcgccttcttcgtgaactacgtcattgcctcagcctttatcggcaacgccatggacctgctgcgcatcccaggcctgctcatgtacatgatccggctctgcctggcgcgctcggccgccgagaggcgcaacgtgaagcggcatcaggcctacgagttccagtttggcgcagcctacgcctggatgatgtgcgtcttcacggtggtcatgacctacagtatcacctgccccatcatcgtgcccttcgggctcatgtacatgctgctgaagcacctggtagacaggtacaatctctactacgcctacctgccggccaagctggacaagaagatccactcgggggctgtgaaccaggtggtggccgcgcccatcctctgcctcttctggctgctcttcttttccaccatgcgcacggggttcctagctcccacgtctatgttcacatttgtggtcctggtcatcaccatcgtcatctgtctctgccacgtctgctttggacacttcaaatacctcagtgcccacaactacaagattgagcacacggagacagatactgtggaccccagaagcaatggacggccccccactgctgctgctgtccccaaatctgcgaaatacatcgctcaggtgctgcaggactcagaggtggacggggatggggatggggctcctgggagctcaggggatgagcccccatcatcctcatcccaagatgaggagttgctgatgccacccgacgccctcacggacacagacttccagtcttgcgaggacagcctcatagagaatgagattcaccagtaaggggagggaggggccctggaggccacatcctgccccaccccacccccactcccacggacactaaaacgctaataatttattagatctaaagccccttcctccccagcccctgctttcattaaggtatttaaacttgggggtttcactgctctcccccatgatggagggagggagccccccaacctcagtgaggagagccccgagccggccccggggcaaagaggggtgcagagggagttcccccagatcagtaccccccacccctccccagctagtagcatgaccaggagagggttaatgagagccaagaggagtacctggtgcacctggtgccggtggctggagacctggggggcaggtggatctggggctgttcccccccctccgttttttccaccccacagttcctcctgggatctggccctccagggaagtggagcctccagcccctaggggatgcatgaggggggaggggtttcatcttgtaattttccaattatatatatttatttatat

SEQ ID NO: 361762 - DNA, 3143 bp, Homo sapiens
gccgcccagcgactccccctccccctcccccagccccgccccgccccaacccggggctccgagccggagccgagtctgcgcctgggggaggaccatgcggcagtagcagccatgctgccctttctgctggccacactgggcaccacagccctcaacaacagcaaccccaaggactactgctacagcgcccgcatccgcagcactgtcctgcagggcctgccctttgggggcgtccccaccgtgctggctctcgacttcatgtgcttccttgcactgctgttcttattctctatcctccggaaggtggcctgggactatgggcggctggccttggtgacagatgcagacaggcttcggcggcaggagagggaccgagtggaacaggaatatgtggcttcagctatgcacggggacagccatgaccggtatgagcgtctcacctctgtctccagctccgttgactttgaccaaagggacaatggtttctgttcctggctgacagccatcttcaggataaaggatgatgagatccgggacaaatgtgggggcgatgccgtgcactacctgtcctttcagcggcacatcatcgggctgctggtggttgtgggcgtcctctccgtaggcatcgtgctgcctgtcaacttctcaggggacctgctggagaacaatgcctacagctttgggagaaccaccattgccaacttgaaatcagggaacaacctgctatggctgcacacctccttcgccttcctgtatctgctgctcaccgtctacagcatgcgtagacacacctccaagatgcgctacaaggaggatgatctggtgaagcggaccctcttcatcaatggaatctccaaatatgcagagtcagaaaagatcaagaagcattttgaggaagcctaccccaactgcacagttctcgaagcccgcccgtgttacaacgtggctcgcctaatgttcctcgatgcagagaggaagaaggccgagcggggaaagctgtacttcacaaacctccagagcaaggagaacgtgcctaccatgatcaaccccaagccctgtggccacctctgctgctgtgtggtgcgaggctgtgagcaggtggaggccattgagtactacacaaagctggagcagaagctgaaggaagactacaagcgggagaaggagaaggtgaatgagaagcctcttggcatggcctttgtcaccttccacaatgagactatcaccgccatcatcctgaaggacttcaacgtgtgtaaatgccagggctgcacctgccgtggggagccacgcccctcatcctgcagcgagtccctgcacatctccaactggaccgtgtcctatgcccctgaccctcagaacatctactgggagcacctctccatccgaggcttcatctggtggctgcgctgcctggtcatcaatgtcgtcctcttcatcctcctcttcttcctcaccactccagccatcatcatcaccaccatggacaagttcaacgtcaccaagcctgtggagtacctcaacaaccccatcatcacccagttcttccccaccctgctgctgtggtgcttctcggccctccttcccaccatcgtctactactcagccttctttgaagcccactggacacgctctggggagaacaggacaaccatgcacaagtgctacactttcctcatcttcatggtgctgctcctaccctcgctgggactgagcagcctggacctcttcttccgctggctctttgataagaaattcttggctgaggcagctattcggtttgagtgtgtgttcctgcccgacaacggcgccttcttcgtgaactacgtcattgcctcagcctttatcggcaacgccatggacctgctgcgcatcccaggcctgctcatgtacatgatccggctctgcctggcgcgctcggccgccgagaggcgcaacgtgaagcggcatcaggcctacgagttccagtttggcgcagcctacgcctggatgatgtgcgtcttcacggtggtcatgacctacagtatcacctgccccatcatcgtgcccttcgggctcatgtacatgctgctgaagcacctggtagacaggtacaatctctactacgcctacctgccggccaagctggacaagaagatccactcgggggctgtgaaccaggtggtggccgcgcccatcctctgcctcttctggctgctcttcttttccaccatgcgcacggggttcctagctcccacgtctatgttcacatttgtggtcctggtcatcaccatcgtcatctgtctctgccacgtctgctttggacacttcaaatacctcagtgcccacaactacaagattgagcacacggagacagatactgtggaccccagaagcaatggacggccccccactgctgctgctgtccccaaatctgcgaaatacatcgctcaggtgctgcaggactcagaggtggacggggatggggatggggctcctgggagctcaggggatgagcccccatcatcctcatcccaagatgaggagttgctgatgccacccgacgccctcacggacacagacttccagtcttgcgaggacagcctcatagagaatgagattcaccagtaaggggagggaggggccctggaggccacatcctgccccaccccacccccactcccacggacactaaaacgctaataatttattagatctaaagccccttcctccccagcccctgctttcattaaggtatttaaacttgggggtttcactgctctcccccatgatggagggagggagccccccaacctcagtgaggagagccccgagccggccccggggcaaagaggggtgcagagggagttcccccaggtggatctggggctgttcccccccctccgttttttccaccccacagttcctcctgggatctggccctccagggaagtggagcctccagcccctaggggatgcatgaggggggagggggtgctgagtgggaggaagagtcaggctcacagctggggtggcctgggggtgggggtgggcaaggctgacactggaaaatgggtttttgcactgttttttttttggtttttttgttcttttttgtttttttcctttaaaataaaaacaaagaaaagctctgaaaaaaaaaa

SEQ ID NO: 361763 - DNA, 2693 bp, Homo sapiens
gccgcccagcgactccccctccccctcccccagccccgccccgccccaacccggggctccgagccggagccgagtctgcgcctgggggaggaccatgcggcagtagcagccatgctgccctttctgctggccacactgggcaccacagccctcaacaacagcaaccccaaggactactgctacagcgcccgcatccgcagcactgtcctgcagggcctgccctttgggggcgtccccaccgtgctggctctcgacttcatgtgcttccttgcactgctgttcttattctctatcctccggaaggtggcctgggactatgggcggctggccttggtgacagatgcagacaggcttcggcggcaggagagggaccgagtggaacaggaatatgtggcttcagctatgcacggggacagccatgaccggtatgagcgtctcacctctgtctccagctccgttgactttgaccaaagggacaatggtttctgttcctggctgacagccatcttcaggataaaggatgatgagatccgggacaaatgtgggggcgatgccgtgcactacctgtcctttcagcggcacatcatcgggctgctggtggttgtgggcgtcctctccgtaggcatcgtgctgcctgtcaacttctcaggggacctgctggagaacaatgcctacagctttgggagaaccaccattgccaacttgaaatcagggaacaacctgctatggctgcacacctccttcgccttcctgtatctgctgctcaccgtctacagcatgcgtagacacacctccaagatgcgctacaaggaggatgatctggtgaagcggaccctcttcatcaatggaatctccaaatatgcagagtcagaaaagatcaagaagcattttgaggaagcctaccccaactgcacagttctcgaagcccgcccgtgttacaacgtggctcgcctaatgttcctcgatgcagagaggaagaaggccgagcggggaaagctgtacttcacaaacctccagagcaaggagaacgtgcctaccatgatcaaccccaagccctgtggccacctctgctgctgtgtggtgcgaggctgtgagcaggtggaggccattgagtactacacaaagctggagcagaagctgaaggaagactacaagcgggagaaggagaaggtgaatgagaagcctcttggcatggcctttgtcaccttccacaatgagactatcaccgccatcatcctgaaggacttcaacgtgtgtaaatgccagggctgcacctgccgtggggagccacgcccctcatcctgcagcgagtccctgcacatctccaactggaccgtgtcctatgcccctgaccctcagaacatctactgggagcacctctccatccgaggcttcatctggtggctgcgctgcctggtcatcaatgtcgtcctcttcatcctcctcttcttcctcaccactccagccatcatcatcaccaccatggacaagttcaacgtcaccaagcctgtggagtacctcaacaaccccatcatcacccagttcttccccaccctgctgctgtggtgcttctcggccctccttcccaccatcgtctactactcagccttctttgaagcccactggacacgctctggggagaacaggacaaccatgcacaagtgctacactttcctcatcttcatggtgctgctcctaccctcgctgggactgagcagcctggacctcttcttccgctggctctttgataagaaattcttggctgaggcagctattcggtttgagtgtgtgttcctgcccgacaacggcgccttcttcgtgaactacgtcattgcctcagcctttatcggcaacgccatggacctgctgcgcatcccaggcctgctcatgtacatgatccggctctgcctggcgcgctcggccgccgagaggcgcaacgtgaagcggcatcaggcctacgagttccagtttggcgcagcctacgcctggatgatgtgcgtcttcacggtggtcatgacctacagtatcacctgccccatcatcgtgcccttcgggctcatgtacatgctgctgaagcacctggtagacaggtacaatctctactacgcctacctgccggccaagctggacaagaagatccactcgggggctgtgaaccaggtggtggccgcgcccatcctctgcctcttctggctgctcttcttttccaccatgcgcacggggttcctagctcccacgtctatgttcacatttgtggtcctggtcatcaccatcgtcatctgtctctgccacgtctgctttggacacttcaaatacctcagtgcccacaactacaagattgagcacacggagacagatactgtggaccccagaagcaatggacggccccccactgctgctgctgtccccaaatctgcgaaatacatcgctcaggtgctgcaggactcagaggtggacggggatggggatggggctcctgggagctcaggggatgagcccccatcatcctcatcccaagatgaggagttgctgatgccacccgacgccgctcacagctggggtggcctgggggtgggggtgggcaaggctgacactggaaaatgggtttttgcactgttttttttttggtttttttgttcttttttgtttttttcctttaaaataaaaacaaagaaaagctctgaaaaaaaaaa

SEQ ID NO: 361764 - DNA, 1810 bp, Homo sapiens
gccgcccagcgactccccctccccctcccccagccccgccccgccccaacccggggctccgagccggagccgagtctgcgcctgggggaggaccatgcggcagtagcagccatgctgccctttctgctggccacactgggcaccacagccctcaacaacagcaaccccaaggactactgctacagcgcccgcatccgcagcactgtcctgcagggcctgccctttgggggcgtccccaccgtgctggctctcgacttcatgtgcttccttgcactgctgttcttattctctatcctccggaaggtggcctgggactatgggcggctggccttggtgacagatgcagacaggcttcggcggcaggagagggaccgagtggaacaggaatatgtggcttcagctatgcacggggacagccatgaccggtatgagcgtctcacctctgtctccagctccgttgactttgaccaaagggacaatggtttctgttcctggctgacagccatcttcaggataaaggatgatgagatccgggacaaatgtgggggcgatgccgtgcactacctgtcctttcagcggcacatcatcgggctgctggtggttgtgggcgtcctctccgtaggcatcgtgctgcctgtcaacttctcaggggacctgctggagaacaatgcctacagctttgggagaaccaccattgccaacttgaaatcagggaacaacctgctatggctgcacacctccttcgccttcctgtatctgctgctcaccgtctacagcatgcgtagacacacctccaagatgcgctacaaggaggatgatctggtgaagcggaccctcttcatcaatggaatctccaaatatgcagagtcagaaaagatcaagaagcattttgaggaagcctaccccaactgcacagttctcgaagcccgcccgtgttacaacgtggctcgcctaatgttcctcgatgcagagaggaagaaggccgagcggggaaagctgtacttcacaaacctccagagcaaggagaacgtgcctaccatgatcaaccccaagccctgtggccacctctgctgctgtgtggtgcgaggctgtgagcaggtggaggccattgagtactacacaaagctggagcagaagctgaaggaagactacaagcgggagaaggagaaggtgaatgagaagcctcttggcatggcctttgtcaccttccacaatgagactatcaccgccatcatcctgaaggacttcaacgtgtgtaaatgccagggctgcacctgccgtggggagccacgcccctcatcctgcagcgagtccctgcacatctccaactggaccgtgtcctatgcccctgaccctcagaacatctactgggagcacctctccatccgaggcttcatctggtggctgcgctgcctggtcatcaatgtcgtcctcttcatcctcctcttcttcctcaccactccagccatcatcatcaccaccatggacaagttcaacgtcaccaagcctgtggagtacctcaacaaccccatcatcacccagttcttccccaccctgctgctgtggtgcttctcggccctccttcccaccatcgtctactactcagccttctttgaagcccactggacacgctctggggagaacaggacaaccatgcacaagtgctacactttcctcatcttcatggtgctgctcctaccctcgctgggactgagcagcctggacctcttcttccgctggctctttgataagaaattcttggctgaggcagctattcggtttgagtgagtgactggggcccctagggaaa

SEQ ID NO: 361765 - DNA, 1391 bp, Homo sapiens
ggggttgtagcggaggaagctgaagttctgtgatcacgctggggcacggggcactatcccgtcctggggcccgggcaggaggagggggccaacccttcagcactctcaggaccagaacaacctgtgacagacacacaaaaggttcggcagcactggttccgaggtcagggcccatgtggcttcccttagggctcatgtacatgctgctgaagcacctggtagacaggtacaatctctactacgcctacctgccggccaagctggacaagaagatccactcgggggctgtgaaccaggtggtggccgcgcccatcctctgcctcttctggctgctcttcttttccaccatgcgcacggggttcctagctcccacgtctatgttcacatttgtggtcctggtcatcaccatcgtcatctgtctctgccacgtctgctttggacacttcaaatacctcagtgcccacaactacaagattgagcacacggagacagatactgtggaccccagaagcaatggacggccccccactgctgctgctgtccccaaatctgcgaaatacatcgctcaggtgctgcaggactcagaggtggacggggatggggatggggctcctgggagctcaggggatgagcccccatcatcctcatcccaagatgaggagttgctgatgccacccgacgccctcacggacacagacttccagtcttgcgaggacagcctcatagagaatgagattcaccagtaaggggagggaggggccctggaggccacatcctgccccaccccacccccactcccacggacactaaaacgctaataatttattagatctaaagccccttcctccccagcccctgctttcattaaggtatttaaacttgggggtttcactgctctcccccatgatggagggagggagccccccaacctcagtgaggagagccccgagccggccccggggcaaagaggggtgcagagggagttcccccagatcagtaccccccacccctccccagctagtagcatgaccaggagagggttaatgagagccaagaggagtacctggtgcacctggtgccggtggctggagacctggggggcaggtggatctggggctgttcccccccctccgttttttccaccccacagttcctcctgggatctggccctccagggaagtggagcctccagcccctaggggatgcatgaggggggagggggtgctgagtgggaggaagagtcaggctcacagctggggtggcctgggggtgggggtgggcaaggctgacactggaaaatgggtttttgcactgttttttttttggtttttttgttcttttttgtttttttcctttaaaataaaaacaaagaaaagctctgaaaaaaaaaa

SEQ ID NO: 361766 - DNA, 433 bp, Homo sapiens
ccatccacccaggcagcctggtgatctgtcctcactgccccctccccacgcccaccctactgggccatgaaggggatgggggcaagcccagctgactgctccaccctctgcccaggaggaccatgcggcagtagcagccatgctgccctttctgctggccacactgggcaccacagccctcaacaacagcaaccccaaggactactgctacagcgcccgcatccgcagcactgtcctgcagggcctgccctttgggggcgtccccaccgtgctggctctcgacttcatgtgcttccttgtaagtgcctgctgccaccccttaccttggcatccatgccctgtacacacctggcaaacacttccagctctaaccactctcccacctgccccggtttcccaggcttaagcaggaggagtccccatcatccagccc

SEQ ID NO: 361767 - DNA, 605 bp, Homo sapiens
agaacaatgcctacagctttgggagaaccaccattgccaacttgaaatcagggtaagatgcgaagctggtcggccaggccaaggtctacgaccagagtctgggccatgatgtgggacagggaggaaaggcagctgcgttgatgggagcagagcctacagggatggctatgggtccctgagggcttgggttggagacagaagagggaaatgcctgctgaggatcccccaaggatgaagaggatacagaagaggagggtgaaatctcaggaaccagggagggccagctggggcagttggagacactgtaaccagtgggtagggcgtagaaaggtgacctatcagggatattttcattggaatcgaagaattttggtgtctaggggatgtgggatgtgggcctgccttgcgaggagtcagtgccagaaggctggtggcagtagagggccctgtctgtatcaagggtttaacactgacaggctgaggtgtctcctctgagtgtgtcctagccccagtggctcccatgtatcctctctgcttctcccaggaacaacctgctatggctgcacacctccttcgccttcctgtatctgctgctcaccgtctac

SEQ ID NO: 361768 - DNA, 3262 bp, Homo sapiens
acccaaagaaaaaacctggactcagctgcgcgtcccctcccttcaacctcctgcgggacccagaggtgcccgggcccgcgggacccaggggtggcgcgcgctgcccccaaccccgcaccatcccgagccaaatgaggaccatgcggcagtagcagccatgctgccctttctgctggccacactgggcaccacagccctcaacaacagcaaccccaaggactactgctacagcgcccgcatccgcagcactgtcctgcagggcctgccctttgggggcgtccccaccgtgctggctctcgacttcatgtgcttccttgcactgctgttcttattctctatcctccggaaggtggcctgggactatgggcggctggccttggtgacagatgcagacagtgtggcttcagctatgcacggggacagccatgaccggtatgagcgtctcacctctgtctccagctccgttgactttgaccaaagggacaatggtttctgttcctggctgacagccatcttcaggataaaggatgatgagatccgggacaaatgtgggggcgatgccgtgcactacctgtcctttcagcggcacatcatcgggctgctggtggttgtgggcgtcctctccgtaggcatcgtgctgcctgtcaacttctcaggggacctgctggagaacaatgcctacagctttgggagaaccaccattgccaacttgaaatcagggaacaacctgctatggctgcacacctccttcgccttcctgtatctgctgctcaccgtctacagcatgcgtagacacacctccaagatgcgctacaaggaggatgatctggtgaagcggaccctcttcatcaatggaatctccaaatatgcagagtcagaaaagatcaagaagcattttgaggaagcctaccccaactgcacagttctcgaagcccgcccgtgttacaacgtggctcgcctaatgttcctcgatgcagagaggaagaaggccgagcggggaaagctgtacttcacaaacctccagagcaaggagaacgtgcctaccatgatcaaccccaagccctgtggccacctctgctgctgtgtggtgcgaggctgtgagcaggtggaggccattgagtactacacaaagctggagcagaagctgaaggaagactacaagcgggagaaggagaaggtgaatgagaagcctcttggcatggcctttgtcaccttccacaatgagactatcaccgccatcatcctgaaggacttcaacgtgtgtaaatgccagggctgcacctgccgtggggagccacgcccctcatcctgcagcgagtccctgcacatctccaactggaccgtgtcctatgcccctgaccctcagaacatctactgggagcacctctccatccgaggcttcatctggtggctgcgctgcctggtcatcaatgtcgtcctcttcatcctcctcttcttcctcaccactccagccatcatcatcaccaccatggacaagttcaacgtcaccaagcctgtggagtacctcaacaaccccatcatcacccagttcttccccaccctgctgctgtggtgcttctcggccctccttcccaccatcgtctactactcagccttctttgaagcccactggacacgctctggggagaacaggacaaccatgcacaagtgctacactttcctcatcttcatggtgctgctcctaccctcgctgggactgagcagcctggacctcttcttccgctggctctttgataagaaattcttggctgaggcagctattcggtttgagtgtgtgttcctgcccgacaacggcgccttcttcgtgaactacgtcattgcctcagcctttatcggcaacgccatggacctgctgcgcatcccaggcctgctcatgtacatgatccggctctgcctggcgcgctcggccgccgagaggcgcaacgtgaagcggcatcaggcctacgagttccagtttggcgcagcctacgcctggatgatgtgcgtcttcacggtggtcatgacctacagtatcacctgccccatcatcgtgcccttcgggctcatgtacatgctgctgaagcacctggtagacaggtacaatctctactacgcctacctgccggccaagctggacaagaagatccactcgggggctgtgaaccaggtggtggccgcgcccatcctctgcctcttctggctgctcttcttttccaccatgcgcacggggttcctagctcccacgtctatgttcacatttgtggtcctggtcatcaccatcgtcatctgtctctgccacgtctgctttggacacttcaaatacctcagtgcccacaactacaagattgagcacacggagacagatactgtggaccccagaagcaatggacggccccccactgctgctgctgtccccaaatctgcgaaatacatcgctcaggtgctgcaggactcagaggtggacggggatggggatggggctcctgggagctcaggggatgagcccccatcatcctcatcccaagatgaggagttgctgatgccacccgacgccctcacggacacagacttccagtcttgcgaggacagcctcatagagaatgagattcaccagtaaggggagggaggggccctggaggccacatcctgccccaccccacccccactcccacggacactaaaacgctaataatttattagatctaaagccccttcctccccagcccctgctttcattaaggtatttaaacttgggggtttcactgctctcccccatgatggagggagggagccccccaacctcagtgaggagagccccgagccggccccggggcaaagaggggtgcagagggagttcccccagatcagtaccccccacccctccccagctagtagcatgaccaggagagggttaatgagagccaagaggagtacctggtgcacctggtgccggtggctggagacctggggggcaggtggatctggggctgttcccccccctccgttttttccaccccacagttcctcctgggatctggccctccagggaagtggagcctccagcccctaggggatgcatgaggggggagggggtgctgagtgggaggaagagtcaggctcacagctggggtggcctgggggtgggggtgggcaaggctgacactggaaaatgggtttttgcactgttttttttttggtttttttgttcttttttgtttttttcctttaaaataaaaacaaagaaaagctctgaaaaaaaaaa

SEQ ID NO: 361769 - DNA, 4248 bp, Homo sapiens
gccgcccagcgactccccctccccctcccccagccccgccccgccccaacccggggctccgagccggagccgagtctgcgcctgggggaggaccatgcggcagtagcagccatgctgccctttctgctggccacactgggcaccacagccctcaacaacagcaaccccaaggactactgctacagcgcccgcatccgcagcactgtcctgcagggcctgccctttgggggcgtccccaccgtgctggctctcgacttcatgtgcttccttgcactgctgttcttattctctatcctccggaaggtggcctgggactatgggcggctggccttggtgacagatgcagacaggcttcggcggcaggagagggaccgagtggaacaggaatatgtggcttcagctatgcacggggacagccatgaccggtatgagcgtctcacctctgtctccagctccgttgactttgaccaaagggacaatggtttctgttcctggctgacagccatcttcaggataaaggatgatgagatccgggacaaatgtgggggcgatgccgtgcactacctgtcctttcagcggcacatcatcgggctgctggtggttgtgggcgtcctctccgtaggcatcgtgctgcctgtcaacttctcaggggacctgctggagaacaatgcctacagctttgggagaaccaccattgccaacttgaaatcagggaacaacctgctatggctgcacacctccttcgccttcctgtatctgctgctcaccgtctacagcatgcgtagacacacctccaagatgcgctacaaggaggatgatctggtgaagcggaccctcttcatcaatggaatctccaaatatgcagagtcagaaaagatcaagaagcattttgaggaagcctaccccaactgcacagttctcgaagcccgcccgtgttacaacgtggctcgcctaatgttcctcgatgcagagaggaagaaggccgagcggggaaagctgtacttcacaaacctccagagcaaggagaacgtgcctaccatgatcaaccccaagccctgtggccacctctgctgctgtgtggtgcgaggctgtgagcaggtggaggccattgagtactacacaaagctggagcagaagctgaaggaagactacaagcgggagaaggagaaggtgaatgagaagcctcttggcatggcctttgtcaccttccacaatgagactatcaccgccatcatcctgaaggacttcaacgtgtgtaaatgccagggctgcacctgccgtggggagccacgcccctcatcctgcagcgagtccctgcacatctccaactggaccgtgtcctatgcccctgaccctcagaacatctactgggagcacctctccatccgaggcttcatctggtggctgcgctgcctggtcatcaatgtcgtcctcttcatcctcctcttcttcctcaccactccagccatcatcatcaccaccatggacaagttcaacgtcaccaagcctgtggagtacctcaacaaccccatcatcacccagttcttccccaccctgctgctgtggtgcttctcggccctccttcccaccatcgtctactactcagccttctttgaagcccactggacacgccccatgggagggtgcaacaaagcttccaactcctggagggggcagaagagagaggatctggcggggttaccccaaaggcacccacaaggtgtcttgggtgtgtatacatggtagaagtccctggggtctgtgttggtgttcactctctggtaacctgtttggatgctaagatcaccctcaaggtatatttggggcttggggctccacattctggtagtttctatgggggtgtcttgtgcccatattctgggactaactgtgggcgtctctggagttccacttgggaggtttggggaaccatctctagggaggtcttggtgatacttagggagtgtcttggaggctactaggggtatccctgaaggtctctagagcccatatttttgggtatgtgtaggaggctcttgaccttataactctgggggtgtctgtgggcggggaggctaaaggactcacactttgggatgtttagcagtacaagttctgggaacatctctaaaatttcaggcttttattcagagatgtaactgtggagttctgtatgggcatcttctctgggaatcatgtgaggatatattgaaggtcatgcaccatggctgtgggcacaaactctaggggttttgctgtaggccatctgtggtgatctttgagtcacacttggggcatctcaggcactgataaaggttcctgggctcccccagagatgttgcgggaagggtctcaaagcttgtttgtggaggtatctgaggctcatgtcacactctgggggtaactcgagttatggtctaagtgggggaatcttctgggtgttcctggggctgtcagcctttgggttctttgagggtctcattgggttgtctttgggggtcctggacagttctcccctgaacattctagcagccttaggtggtcttgagcactctctccatgggtctttatggggcacaagttcttggagctgtctgttgccactctgtatgtctctggggggaacagggcacaggtgcttggggcgctaagctgggggtgtccacatggaagaagcatgttggtggtggaggtgttgggtgctgtagttctggcagtgggcgggcggccaccgggtcaccccaagggtgcagtgctggagcacctggtgcccgcaggtgtgtgttcctgcccgacaacggcgccttcttcgtgaactacgtcattgcctcagcctttatcggcaacgccatggacctgctgcgcatcccaggcctgctcatgtacatgatccggctctgcctggcgcgctcggccgccgagaggcgcaacgtgaagcggcatcaggcctacgagttccagtttggcgcagcctacgcctggatgatgtgcgtcttcacggtggtcatgacctacagtatcacctgccccatcatcgtgcccttcgggctcatgtacatgctgctgaagcacctggtagacaggtacaatctctactacgcctacctgccggccaagctggacaagaagatccactcgggggctgtgaaccaggtggtggccgcgcccatcctctgcctcttctggctgctcttcttttccaccatgcgcacggggttcctagctcccacgtctatgttcacatttgtggtcctggtcatcaccatcgtcatctgtctctgccacgtctgctttggacacttcaaatacctcagtgcccacaactacaagattgagcacacggagacagatactgtggaccccagaagcaatggacggccccccactgctgctgctgtccccaaatctgcgaaatacatcgctcaggtgctgcaggactcagaggtggacggggatggggatggggctcctgggagctcaggggatgagcccccatcatcctcatcccaagatgaggagttgctgatgccacccgacgccctcacggacacagacttccagtcttgcgaggacagcctcatagagaatgagattcaccagtaaggggagggaggggccctggaggccacatcctgccccaccccacccccactcccacggacactaaaacgctaataatttattagatctaaagccccttcctccccagcccctgctttcattaaggtatttaaacttgggggtttcactgctctcccccatgatggagggagggagccccccaacctcagtgaggagagccccgagccggccccggggcaaagaggggtgcagagggagttcccccagatcagtaccccccacccctccccagctagtagcatgaccaggagagggttaatgagagccaagaggagtacctggtgcacctggtgccggtggctggagacctggggggcaggtggatctggggctgttcccccccctccgttttttccaccccacagttcctcctgggatctggccctccagggaagtggagcctccagcccctaggggatgcatgaggggggagggggtgctgagtgggaggaagagtcaggctcacagctggggtggcctgggggtgggggtgggcaaggctgacactggaaaatgggtttttgcactgttttttttttggtttttttgttcttttttgtttttttcctttaaaataaaaacaaagaaaagctctgaaaaaaaaaa

SEQ ID NO: 361770 - DNA, 2406 bp, Homo sapiens
ttcccagccacttgggaggctgaggtgggagggtcactttagcctgggagcttgaggctccagtgagctgagattccaccactacactccagcctgggcatcagagcgagacgctgtttccaaaaaaaaaaaaatgcttagaggagcagtgcctggcttgtaggaagccccaagtcagcgtgggctggatgctgcaggccccagcctggctttccaactagaggccctgtccctaaccctcccacaaaggtggaggccattgagtactacacaaagctggagcagaagctgaaggaagactacaagcgggagaaggagaaggtgaatgagaagcctcttggcatggcctttgtcaccttccacaatgagactatcaccgccatcatcctgaaggacttcaacgtgtgtaaatgccagggctgcacctgccgtggggagccacgcccctcatcctgcagcgagtccctgcacatctccaactggaccgtgtcctatgcccctgaccctcagaacatctactgggagcacctctccatccgaggcttcatctggtggctgcgctgcctggtcatcaatgtcgtcctcttcatcctcctcttcttcctcaccactccagccatcatcatcaccaccatggacaagttcaacgtcaccaagcctgtggagtacctcaacaaccccatcatcacccagttcttccccaccctgctgctgtggtgcttctcggccctccttcccaccatcgtctactactcagccttctttgaagcccactggacacgctctggggagaacaggacaaccatgcacaagtgctacactttcctcatcttcatggtgctgctcctaccctcgctgggactgagcagcctggacctcttcttccgctggctctttgataagaaattcttggctgaggcagctattcggtttgagtgtgtgttcctgcccgacaacggcgccttcttcgtgaactacgtcattgcctcagcctttatcggcaacgccatggacctgctgcgcatcccaggcctgctcatgtacatgatccggctctgcctggcgcgctcggccgccgagaggcgcaacgtgaagcggcatcaggcctacgagttccagtttggcgcagcctacgcctggatgatgtgcgtcttcacggtggtcatgacctacagtatcacctgccccatcatcgtgcccttcgggctcatgtacatgctgctgaagcacctggtagacaggtacaatctctactacgcctacctgccggccaagctggacaagaagatccactcgggggctgtgaaccaggtggtggccgcgcccatcctctgcctcttctggctgctcttcttttccaccatgcgcacggggttcctagctcccacgtctatgttcacatttgtggtcctggtcatcaccatcgtcatctgtctctgccacgtctgctttggacacttcaaatacctcagtgcccacaactacaagattgagcacacggagacagatactgtggaccccagaagcaatggacggccccccactgctgctgctgtccccaaatctgcgaaatacatcgctcaggtgctgcaggactcagaggtggacggggatggggatggggctcctgggagctcaggggatgagcccccatcatcctcatcccaagatgaggagttgctgatgccacccgacgccctcacggacacagacttccagtcttgcgaggacagcctcatagagaatgagattcaccagtaaggggagggaggggccctggaggccacatcctgccccaccccacccccactcccacggacactaaaacgctaataatttattagatctaaagccccttcctccccagcccctgctttcattaaggtatttaaacttgggggtttcactgctctcccccatgatggagggagggagccccccaacctcagtgaggagagccccgagccggccccggggcaaagaggggtgcagagggagttcccccagatcagtaccccccacccctccccagctagtagcatgaccaggagagggttaatgagagccaagaggagtacctggtgcacctggtgccggtggctggagacctggggggcaggtggatctggggctgttcccccccctccgttttttccaccccacagttcctcctgggatctggccctccagggaagtggagcctccagcccctaggggatgcatgaggggggagggggtgctgagtgggaggaagagtcaggctcacagctggggtggcctgggggtgggggtgggcaaggctgacactggaaaatgggtttttgcactgttttttttttggtttttttgttcttttttgtttttttcctttaaaataaaaacaaagaaaagctctgaaaaaaaaaa

SEQ ID NO: 361771 - DNA, 2937 bp, Homo sapiens
gccgcccagcgactccccctccccctcccccagccccgccccgccccaacccggggctccgagccggagccgagtctgcgcctgggggaggaccatgcggcagtagcagccatgctgccctttctgctggccacactgggcaccacagccctcaacaacagcaaccccaaggactactgctacagcgcccgcatccgcagcactgtcctgcagggcctgccctttgggggcgtccccaccgtgctggctctcgacttcatgtgcttccttgcactgctgttcttattctctatcctccggaaggtggcctgggactatgggcggctggccttggtgacagatgcagacaggcttcggcggcaggagagggaccgagtggaacaggaatatgtggcttcagctatgcacggggacagccatgaccggtatgagcgtctcacctctgtctccagctccgttgactttgaccaaagggacaatggtttctgttcctggctgacagccatcttcaggataaaggatgatgagatccgggacaaatgtgggggcgatgccgtgcactacctgtcctttcagcggcacatcatcgggctgctggtggttgtgggcgtcctctccgtaggcatcgtgctgcctgtcaacttctcaggggacctgctggagaacaatgcctacagctttgggagaaccaccattgccaacttgaaatcagggaacaacctgctatggctgcacacctccttcgccttcctgtatctgctgctcaccgtctacagcatgcgtagacacacctccaagatgcgctacaaggaggatgatctggtgaagcggaccctcttcatcaatggaatctccaaatatgcagagtcagaaaagatcaagaagcattttgaggaagcctaccccaactgcacagttctcgaagcccgcccgtgttacaacgtggctcgcctaatgttcctcgatgcagagaggaagaaggccgagcggggaaagctgtacttcacaaacctccagagcaaggagaacgtgcctaccatgatcaaccccaagccctgtggccacctctgctgctgtgtggtgcgaggctgtgagcaggtggaggccattgagtactacacaaagctggagcagaagctgaaggaagactacaagcgggagaaggagaaggtgaatgagaagcctcttggcatggcctttgtcaccttccacaatgagactatcaccgccatcatcctgaaggacttcaacgtgtgtaaatgccagggctgcacctgccgtggggagccacgcccctcatcctgcagcgagtccctgcacatctccaactggaccgtgtcctatgcccctgaccctcagaacatctactgggagcacctctccatccgaggcttcatctggtggctgcgctgcctggtcatcaatgtcgtcctcttcatcctcctcttcttcctcaccactccagccatcatcatcaccaccatggacaagttcaacgtcaccaagcctgtggagtacctcaacaaccccatcatcacccagttcttccccaccctgctgctgtggtgcttctcggccctccttcccaccatcgtctactactcagccttctttgaagcccactggacacgctctggggagaacaggacaaccatgcacaagtgctacactttcctcatcttcatggtgctgctcctaccctcgctgggactgagcagcctggacctcttcttccgctggctctttgataagaaattcttggctgaggcagctattcggtttgagtgtgtgttcctgcccgacaacggcgccttcttcgtgaactacgtcattgcctcagcctttatcggcaacgccatggacctgctgcgcatcccaggcctgctcatgtacatgatccggctctgcctggcgcgctcggccgccgagaggcgcaacgtgaagcggcatcaggcctacgagttccagtttggcgcagcctacgcctggatgatgtgcgtcttcacggtggtcatgacctacagtatcacctgccccatcatcgtgcccttcgggctcatgtacatgctgctgaagcacctggtagacaggtacaatctctactacgcctacctgccggccaagctggacaagaagatccactcgggggctgtgaaccaggtggtggccgcgcccatcctctgcctcttctggctgctcttcttttccaccatgcgcacggggttcctagctcccacgtctatgttcacatttgtggtcctggtcatcaccatcgtcatctgtctctgccacgtctgctttggacacttcaaatacctcagtgcccacaactacaagattgagcacacggagacagatactgtggaccccagaagcaatggacggccccccactgctgctgctgtccccaaatctgcgaaatacatcgctcaggtgctgcaggactcagaggtggacggggatggggatggggctcctgggagctcaggggatgagcccccatcatcctcatcccaagatgaggagttgctgatgccacccgacgccctcacggacacagacttccagtcttgcgaggacagcctcatagagaatgagattcaccagtaaggggagggaggggccctggaggccacatcctgccccaccccacccccactcccacggacactaaaacgctaataatttattagatctaaagccccttcctccccagcccctgctttcattaaggtatttaaacttgggggtttcactgctctcccccatgatggagggagggagccccccaacctcagtgaggagagccccgagccggccccggggcaaagaggggtgcagagggagttcccccagatcagtaccccccacccctccccagctagtagcatgaccaggagagggtttactcctcttggctctcattaaccgtcgagc

SEQ ID NO: 361772 - DNA, 2935 bp, Homo sapiens
ttaccgaaagagttcgtgtcctatgccccttatctcagaagcatatactgatagcaccgtctgcatccgaggcataatctggtgagctagcgctgccttgtcatcacatgtcgtgctcttcatccttctcttcttccttagcactccagcctcatcattatcaccatggacagttcatcgtcaccaatccttgctggggtaccgtccacaaccttcgtcatcacccgtcttcttccccaccctgctgctgtggtgcttctcggccctccttcccaccatcgtctactactcagccttctttgaagcccactggacacgccccatgggagggtgcaacaaagcttccaactcctggagggggcagaagagagaggatctggcggggttaccccaaaggcacccacaaggtgtcttgggtgtgtatacatggtagaagtccctggggtctgtgttggtgttcactctctggtaacctgtttggatgctaagatcaccctcaaggtatatttggggcttggggctccacattctggtagtttctatgggggtgtcttgtgcccatattctgggactaactgtgggcgtctctggagttccacttgggaggtttggggaaccatctctagggaggtcttggtgatacttagggagtgtcttggaggctactaggggtatccctgaaggtctctagagcccatatttttgggtatgtgtaggaggctcttgaccttataactctgggggtgtctgtgggcggggaggctaaaggactcacactttgggatgtttagcagtacaagttctgggaacatctctaaaatttcaggcttttattcagagatgtaactgtggagttctgtatgggcatcttctctgggaatcatgtgaggatatattgaaggtcatgcaccatggctgtgggcacaaactctaggggttttgctgtaggccatctgtggtgatctttgagtcacacttggggcatctcaggcactgataaaggttcctgggctcccccagagatgttgcgggaagggtctcaaagcttgtttgtggaggtatctgaggctcatgtcacactctgggggtaactcgagttatggtctaagtgggggaatcttctgggtgttcctggggctgtcagcctttgggttctttgagggtctcattgggttgtctttgggggtcctggacagttctcccctgaacattctagcagccttaggtggtcttgagcactctctccatgggtctttatggggcacaagttcttggagctgtctgttgccactctgtatgtctctggggggaacagggcacaggtgcttggggcgctaagctgggggtgtccacatggaagaagcatgttggtggtggaggtgttgggtgctgtagttctggcagtgggcgggcggccaccgggtcaccccaagggtgcagtgctggagcacctggtgcccgcaggtgtgtgttcctgcccgacaacggcgccttcttcgtgaactacgtcattgcctcagcctttatcggcaacgccatggacctgctgcgcatcccaggcctgctcatgtacatgatccggctctgcctggcgcgctcggccgccgagaggcgcaacgtgaagcggcatcaggcctacgagttccagtttggcgcagcctacgcctggatgatgtgcgtcttcacggtggtcatgacctacagtatcacctgccccatcatcgtgcccttcgggctcatgtacatgctgctgaagcacctggtagacaggtacaatctctactacgcctacctgccggccaagctggacaagaagatccactcgggggctgtgaaccaggtggtggccgcgcccatcctctgcctcttctggctgctcttcttttccaccatgcgcacggggttcctagctcccacgtctatgttcacatttgtggtcctggtcatcaccatcgtcatctgtctctgccacgtctgctttggacacttcaaatacctcagtgcccacaactacaagattgagcacacggagacagatactgtggaccccagaagcaatggacggccccccactgctgctgctgtccccaaatctgcgaaatacatcgctcaggtgctgcaggactcagaggtggacggggatggggatggggctcctgggagctcaggggatgagcccccatcatcctcatcccaagatgaggagttgctgatgccacccgacgccctcacggacacagacttccagtcttgcgaggacagcctcatagagaatgagattcaccagtaaggggagggaggggccctggaggccacatcctgccccaccccacccccactcccacggacactaaaacgctaataatttattagatctaaagccccttcctccccagcccctgctttcattaaggtatttaaacttgggggtttcactgctctcccccatgatggagggagggagccccccaacctcagtgaggagagccccgagccggccccggggcaaagaggggtgcagagggagttcccccagatcagtaccccccacccctccccagctagtagcatgaccaggagagggttaatgagagccaagaggagtacctggtgcacctggtgccggtggctggagacctggggggcaggtggatctggggctgttcccccccctccgttttttccaccccacagttcctcctgggatctggccctccagggaagtggagcctccagcccctaggggatgcatgaggggggagggggtgctgagtgggaggaagagtcaggctcacagctggggtggcctgggggtgggggtgggcaaggctgacactggaaaatgggtttttgcactgttttttttttggtttttttgttcttttttgtttttttcctttaaaataaaaacaaagaaaagctctgaaaaaaaaaa

SEQ ID NO: 361773 - DNA, 1101 bp, Homo sapiens
gccgcccagcgactccccctccccctcccccagccccgccccgccccaacccggggctccgagccggagccgagtctgcgcctgggggaggaccatgcggcagtagcagccatgctgccctttctgctggccacactgggcaccacagccctcaacaacagcaaccccaaggactactgctacagcgcccgcatccgcagcactgtcctgcagggcctgccctttgggggcgtccccaccgtgctggctctcgacttcatgtgcttccttgcactgctgttcttattctctatcctccggaaggtggcctgggactatgggcggctggccttggtgacagatgcagacaggcttcggcggcaggagagggaccgagtggaacaggaatatgtggcttcagctatgcacggggacagccatgaccggtatgagcgtctcacctctgtctccagctccgttgactttgaccaaagggacaatggtttctgttcctggctgacagccatcttcaggataaaggatgatgagatccgggacaaatgtgggggcgatgccgtgcactacctgtcctttcagcggcacatcatcgggctgctggtggttgtgggcgtcctctccgtaggcatcgtgctgcctgtcaacttctcaggggacctgctggagaacaatgcctacagctttgggagaaccaccattgccaacttgaaatcagggaacaacctgctatggctgcacacctccttcgccttcctgtatctgctgctcaccgtctacagcatgcgtagacacacctccaagatgcgctacaaggaggatgatctggtgaagcggaccctcttcatcaatggaatctccaaatatgcagagtcagaaaagatcaagaagcattttgagtgagtaagccacgcttccccctaccctcaagccctgctgcagagccttctctgcctttgaactctaagaacatccttataccctagcctggagctctgccgtgggtgggatagagattagatccaggaagaaatgtccgattccagggtggtttagcacttgggtcgggtgataggcccctttaagaacaggaaaaataagacaaaa

SEQ ID NO: 361774 - DNA, 368 bp, Homo sapiens
caggggtgggtatgcttgagagacattgccagccccatgggagggtgcaacaaagcttccaactcctggagggggcagaagagagaggatctggcggggttaccccaaaggcacccacaaggtgtcttgggtgtgtatacatggtagaagtccctggggtctgtgttggtgttcactctctggtaacctgtttggatgctaagatcaccctcaaggtatatttggggcttggggctccacattctggtagtttctatgggggtgtcttgtgcccatattctgggactaactgtgggcgtctctggagttccacttgggaggtttggggaaccatctctagggaggtcttggtgatacttagggagtgt

SEQ ID NO: 361775 - DNA, 369 bp, Homo sapiens
ctacaagaccaatgtagaaatgtacttttaagaagtgattaggccctatgaggtggctcacgcctgttattacagccctttgggaggccaaggcaggaggatcccgtgagcccaggagtttgagactgcagtgagttatgattgtgccactgcactccaacctgggcaacagagtaagaccctgtctcaaaaaacaaaagttttttttaaaacttagcattttataagagtggaacaattttaatagtcaaatgcattatagtatgggaatggtgaaattaatgataatctatatggtggatacaacttctaaaaatcattttaaaaatgtactgacataagtataatataatattaagagaaaaatta

SEQ ID NO: 361776 - DNA, 937 bp, Homo sapiens
ataaaaattggtcagtgtgtgttctccaaaaaaaaatcttgataatggggaaaatcagagattagacaggaaaagaagatattgtggctaagatttgactgcacttacgctttcatctctcttgcctttttattctctgagaaggtccctaaaattgtagttaatgctgctttattattatgttcagtgacttaacttcaatgtgtatctaatatcactgaacagtaactagggtccgaacatttgctcattaactcctgaaagtagtctgttgtgatacgtcaccaaacaaaggtttcaaatgtagaagcatgaaaggttctttaattatttgatgtgaattagttaaaagttccttgaaattttattttggatgatcttaactcacttttttctaatgaaatttttgctttcaactggtagtaactggtcctgggcattcagatttttatatttatgtatgtatgcaagatacactattctcttttgagaaaatgttgtcttagctaatttctgggatttgtgaaaggaaatgtaatatgttaatagctattattggcactctatgttacaatattaaggatctaaatagattcccacttagccacgatgcttttcttaagcataattcatctctacgtaaatatcccatatgaaagaaaatttagagccctccatttaaaaaagctttcttgctctgcataaaacttgaaaataattaatttcaaagttatattgatattaaaacatagattcagtcttgtcttaaaagtgtattacaatttatttcttgccatttttgtgtaaaatttacagaaagagtgttacaccgtgcgctccaaaggtaatgtctcattactctaaggctctctctctctttgcctttatctctttaattctgttgttatgtgcattgaaacattttaagaaaaaaaaa

SEQ ID NO: 361777 - DNA, 1096 bp, Homo sapiens
gtcaatctgtgctcatggatgggcttctcagcaatataattctttttattttttatttttctcttcagttttccaaaatgggtcggatagtaagcagtacaatatcatgtgtccctgtaaggaaggttcccaagtaccaagcgaaatctgaatgttaccagactctttaccctaaaatggttaagaaccattgttttaaaggcagaaaactgaggcccagtttgcataatcgtttccttttatgaagcagatttcaagttctcattccattctagttgcttcatacaacaaacagtttggttttattttcaggtctgtggacatgtcattgattacagttaattgtcttgattactgtttatagcttaattatcaaaccagttgtttcttgaatttgtattatgacagggtgcatgtagtctttggactggttatttctggttttgaagtaatcgaacaaattgaaaatctgaagaccgatgctgcaagcagaccatatgcagatgtgcgagttattgactgtggagtacttgccacaaaatcaataaaagatgtttttgagaaaaaaaggaagaaaccaactcattcagaaggctcggattcctcttccaattcctcctcttcttcagaatcatcttcagaaagtgaacttgaacatgagagaagcagaaggaggaaacataagaggaggccaaaagttaaacgttctaaaaagaggcgaaaggaagcaagcagttcagaagagccaaggaataaacatgcaatgaacccaaaagggtacgtgtaaaacaccaatgtactcttacctaaaaacaaacactctggaatgggaaaagtatgtataattctataaactcaattttattacctgttattgaaaaaggatagcactttttaaactttaaattgaaatctggcaaatctaggagtaggtagcataggcatttcatttcaaagatttgtgtgttttcagttttcgggtgaaaatagtcctaagaactctttttttaagagatagggtcttgctctgttatccaggctggaatacagtggcacaattatagctcactgcatcctccacctcctgggctcaaga

SEQ ID NO: 361778 - DNA, 781 bp, Homo sapiens
taaaaattaaacacctaaaaagattattgaacttcttccatgtatagcacattaggcaagctaattggaaatttggaggaagtaagctagagatttttctaaaattttattagttttccctgaaagttaataatttaaatatcatttagccaaagtatgttactactaaaagtgactgttctaaggctgtttgtgtgaagtattaaatatatgttcttttcctcaaggctttaattagtatcttttggcctttttatgcttttgttatttgattagcttaaatttttcttttctgagtgttcagtcaagttatctgtactgaccagaagaggaatttcatcttttgctttctatttattacttgaacattactttaaagtgacttataattggagactgacaaatttgtgttttcttcaaacagatgaaaactttattctcaaacatgacagagcgttccttttatcaatggcaaatcgagggaaacataccaatggttcccagtttttcatgtgagtaggcataattcagagatgagcttttcttaaacagagaagcgctgttcataagaaagatggtatagttaaaccaagtttaatgctaaaattctgtcagctttatttttattattaatttctaatatcatagtaacttataaggtctaacaactgcctcagcattcagcatatatcctgaattggaagaatgggacttaaaaaatttaaaacttatacattgttttcaaaatatgccgtcatcttcagaaaagatgacggcatat

SEQ ID NO: 361779 - DNA, 775 bp, Homo sapiens
gtactctcgcggtatttgtcccgactctcgcggggtttagcgtggcattgggaggcccggcctgggggaggagacggcgttccgttagcggcgttggggtttggctgcagtggcagtgctttctcttctgctcacggggacccgctcaggctggaggccagccagctcttgccgccacctcggtcgcgatgggggcgcaggaccggccgcagtgccacttcgacatcgagatcaaccgggagccggttggtcgcattatgtttcagctcttctcagacatatgtccaaaaacatgcaaaaacttcctttgcttgtgctcaggagagaaaggccttgggaaaacaactgggaagaagttatgttataaaggttctacgttccatcgtgtggttaaaaactttatgattcagggtggggacttcagtgaaggtaatggaaaaggtggagaatcaatttatggtggatattttaaagagaatgtggtcttttgcaaaatgaaaaggtaagagaacgaagctcagtaacacaaactccaattctgttcccttgcacccttcctaataaatttatggacagtctgggtcaggttgtggctggatttctatattgcttgaagacttggaaaattctgtgtattatttcatacatgcttctgtatcttttttcatttcccaatgggttattaatttcacatcagagaaaagagtctagttgtggggttttttttcccctaaaccaagcaatttctttgaataaaagttgaaatttcgttttt

SEQ ID NO: 361780 - DNA, 633 bp, Homo sapiens
taaaaattaaacacctaaaaagattattgaacttcttccatgtatagcacattaggcaagctaattggaaatttggaggaagtaagctagagatttttctaaaattttattagttttccctgaaagttaataatttaaatatcatttagccaaagtatgttactactaaaagtgactgttctaaggctgtttgtgtgaagtattaaatatatgttcttttcctcaaggctttaattagtatcttttggcctttttatgcttttgttatttgattagcttaaatttttcttttctgagtgttcagtcaagttatctgtactgaccagaagaggaatttcatcttttgctttctatttattacttgaacattactttaaagtgacttataattggagactgacaaatttgtgttttcttcaaacagatgaaaactttattctcaaacatgacagagcgttccttttatcaatggcaaatcgagggaaacataccaatggttcccagtttttcataaagagtgttacaccgtgcgctccaaaggtaatgtctcattactctaaggctctctctctctttgcctttatctctttaattctgttgttatgtgcattgaaacattttaagaaaaaaaaa

SEQ ID NO: 361781 - DNA, 558 bp, Homo sapiens
ggtttttttttttaagtgttttgttttgttgttttggagttgagagtaactttaatttttatgtgtattcatgctgtgtatttatggctacaagtcaaactgatttcatatgtatgcatacatatagtctaatagagatgattgtaattcattataatcttgagttttttaaattagtaagatggctactattgctgttttggggtttttaaggttagatatatatcatgtttaactttttcccctatctttttatctttacttctttgttctctacatgctgtgtttaaacctttctgctctcttcacctgaacacatcgtgtttgacatcatctttgtgttgatgtttattacatagtaccacaaagcctgctccacacctggatgggtaagagttacattcttactacattggggaagtgtttgggtggccagccataaagagagattggaccatggttgagccctcaagggagcgctcttgatgtctggcttaatctcatagcaaaagctattccttaggatcacagaatatacttgttttgagaccccatggc

SEQ ID NO: 361782 - DNA, 7512 bp, Homo sapiens
gtactctcgcggtatttgtcccgactctcgcggggtttagcgtggcattgggaggcccggcctgggggaggagacggcgttccgttagcggcgttggggtttggctgcagtggcagtgctttctcttctgctcacggggacccgctcaggctggaggccagccagctcttgccgccacctcggtcgcgatgggggcgcaggaccggccgcagtgccacttcgacatcgagatcaaccgggagccggttggtcgcattatgtttcagctcttctcagacatatgtccaaaaacatgcaaaaacttcctttgcttgtgctcaggagagaaaggccttgggaaaacaactgggaagaagttatgttataaaggttctacgttccatcgtgtggttaaaaactttatgattcagggtggggacttcagtgaaggtaatggaaaaggtggagaatcaatttatggtggatattttaaagatgaaaactttattctcaaacatgacagagcgttccttttatcaatggcaaatcgagggaaacataccaatggttcccagtttttcattaccacaaagcctgctccacacctggatggggtgcatgtagtctttggactggttatttctggttttgaagtaatcgaacaaattgaaaatctgaagaccgatgctgcaagcagaccatatgcagatgtgcgagttattgactgtggagtacttgccacaaaatcaataaaagatgtttttgagaaaaaaaggaagaaaccaactcattcagaaggctcggattcctcttccaattcctcctcttcttcagaatcatcttcagaaagtgaacttgaacatgagagaagcagaaggaggaaacataagaggaggccaaaagttaaacgttctaaaaagaggcgaaaggaagcaagcagttcagaagagccaaggaataaacatgcaatgaacccaaaaggtcactctgagaggagtgataccaatgaaaaaaggtcagttgattccagtgctaaaagggaaaaacctgtggtccgcccagaagagattcctccagtgcctgagaaccgatttttactgagaagagatatgcctgttgttactgcagaacctgaaccgaagattcctgatgttgcacccattgtaagtgatcagaaaccatctgtatcaaagtctggacggaagattaaaggaaggggcacaattcgctatcacacacctccaagatcaagatcctgttctgagtcagatgatgatgacagcagtgaaactcctcctcactggaaagaggaaatgcagagattaagagcatatagaccacctagtggagaaaaatggagtaaaggagataagttaagtgacccctgttcaagccgatgggatgaaagaagcttgtctcagagatccagatcatggtcctataatggatattattcagaccttagtacagcaagacactctggccaccataaaaaacgcagaaaagaaaaaaaggttaagcataaaaagaaagggaaaaagcagaaacactgcagaagacacaaacaaacaaagaagagaaggattcttataccgtctgacatagaatcctcaaaatcttccactcgaagaatgaaatcctcttgtgatagagaaaggagttctcgttcttcctcattgtcatctcatcactcatcaaagagagactggtctaaatctgataaggatgtccagagctctttaacccattccagcagagactcatacagatcaaaatctcactcacagtcttattctagaggaagctcaagatcaaggactgcgtcaaagtcctcatcacattctcgaagtagatcaaagtccagatctagttccaagtctgggcaccgaaagagagcatcaaaatcaccaagaaaaacagcttctcagttaagtgaaaataaaccagttaaaacagaacctttaagagcaaccatggcacaaaatgaaaatgtagtagtacaaccagttgtagcagaaaatattcctgtaataccactgagtgacagtccccccccttcaagatggaagcctggacagaaaccttggaagccctcttatgagcgaattcaggaaatgaaagctaaaacaacccatttgctacccatccaaagcacttacagtttagcaaatattaaagagactggtagctcatcatcctaccataaaagagaaaaaaattcggaaagtgatcagagcacttattcaaaatacagtgatagaagttcagaaagctcaccaaggtcaaggagcagatcttctaggagtagatcttattccagatcatatacaagatcacgtagtctagctagttcacattcaaggtctaggtctccatcatctagatctcattcacgaaataaatacagtgatcattcacagtgtagtagatcatcttcatatacttctattagcagtgatgatggaaggcgagctaagaggagacttagatccagtgggaaaaaaaatagcgtttcacataaaaagcatagcagcagctctgaaaagacacttcacagtaaatatgtcaaaggtagagacaggtcttcatgtgtgagaaagtatagcgagagcagatcatctttagattattcttcagacagtgagcagtcaagtgttcaggccacacagtcagcccaggaaaaagagaagcagggccaaatggaaagaacacataataaacaagaaaaaaacagaggtgaagaaaaatccaagtctgaacgggaatgccctcattcaaaaaaaagaactttgaaagagaatctttctgatcaccttagaaatggcagtaagcccaaaaggaagaattatgctggtagtaaatgggactctgagtcaaattcagaacgagatgtcactaaaaacagtaaaaatgactcccatccatcctctgacaaggaagaaggtgaggccacatccgattctgaatcagaggttagtgaaattcacatcaaagtcaaacccacaaccaagtcgtccacaaatacttcactgcctgatgataatggtgcttggaaatcaagcaaacagcgcacatcaacttctgactctgaggggtcctgttccaattcggaaaacaataggggaaagccacaaaagcacaaacatgggtcaaaggaaaatcttaaaagagaacacaccaaaaaagtgaaagagaaattgaaagggaaaaaagacaaaaagcataaggctccaaaacgaaagcaagcatttcactggcagcctccactagaatttggtgaagaggaggaggaggagattgatgacaagcaagttactcaggaatcaaaagagaaaaaagtttctgaaaacaatgaaaccataaaagataatattctaaaaactgagaaatccagtgaagaggacctttcaggtaaacatgatacagtgactgtttcatcagatcttgatcagtttactaaagatgatagtaaactcagtatttctcccacagctttaaatactgaggaaaatgtggcctgtttacaaaacattcagcacgttgaagaaagtgttcccaatggagtggaagatgtgcttcaaacagatgacaacatggagatctgcactcctgataggagttccccagcaaaagtagaggagacttcccctctaggaaatgcacggcttgataccccagatataaacattgttttgaagcaggatatggcaacggaacatcctcaagcagaggtagtaaaacaggaaagcagcatgtccgaaagtaaagtgttgggtgaagtggggaaacaggacagcagctctgctagcttggctagtgctggagaaagtaccgggaagaaggaggtggctgagaagagccagatcaacctcattgataagaaatggaagcccctgcaaggtgtggggaacctggcagcacctaatgctgccacatccagtgctgtggaagttaaggtgttgaccactgtgcctgaaatgaaaccacaaggcttgagaatagaaattaaaagcaaaaataaagttcggcctgggtctctctttgatgaagtaagaaagacagcacgcttaaaccgtagaccaagaaatcaggagagttcaagtgatgagcagacgcctagtcgggatgatgatagccagtccaggagtccaagtagatctcgaagtaaatctgaaaccaaatcaagacacagaacaaggtctgtctcctatagtcactcaagaagtcgatcgagaagttccacatcatcttatcgatcaagaagctactctagaagtcggagcagaggatggtacagcagaggccgaaccagaagccggagcagttcctaccggagttacaaaagtcacaggacgtccagcaggagcagatccaggagcagctcatatgatccccacagtcgatccaggtcctacacctacgatagctactatagcaggagtcggagtcgaagtagaagccagagaagtgacagttaccaccgaggcagaagttataatcggcggtccaggagttgtagatcttatggctctgacagtgaaagtgaccgaagttactctcatcaccggagccccagtgagagcagcagatacagttgaaaacgtccggatacaaattatatcttatttgtaaatatctggcaacttagcttaagaaatgtaatgacagtctgttgttctatttcaatatcagaggtgaatttcaaaaatagacacttcttaattgttactggttcatttacatgtggggagaagaatttaaaatacagatatgtctcctaaaaatatttttatgccacattttacagtagccaactatggaaatgaatttcattttcttgaatcaagaaatcgtgaaatttatctatgtataatttgcaatattattttaagtctatttcactctatcttacgtatcccttagaatacagattctttttgcctgtttttccagttttagcatatatgctgccaagcatagaactgtgaaggagaactgttaaaggcggccaaatatttatatactgattacatagagtcttgtacatatgtgctctaaaaacaaaccacccagaattgatactgttggtaaccaggagtataaggcagtggctctggggttcttaattcattcctaacttctttgatacttcacaggattaggaaagtggtcatcatacatcccacacagtctgtattacttcaggcttgtgggcaaggttaggaagaatcaatcagccttaactataaatacctgcactgtctctgaggacttactattttatgttctttttaatcaataccgatcagaagtttaggttataaaaacaattctacttcatgctttggtgcttggtaatttttggtgcgtctttaagcattactcttatatatcatatattaaaataccataaaaatgaaattcagacaaaatcactggcaccaaaaatggtttattctgagctgtcttcactttgactatttggggggcttctctcaagtacagatgtgggttggggtcccctggagcaggcaggattggcagtaagagatattggccactcaagtctactgtgtgtgtgtgcctctggaagagtgaagaatggacttcaaaagtaacatcaaaaatctaactgccaccatcctggagacattttgcagggctttcctttcaagtctttcaagtacaggatattaccacaacagcagctgaactgttgtaaccagcatgtttttcctatttccactgtgacctgcagctgactcaaagccttgcgtgacctgacccaggtgcaagagacaggggaagagggatagagggtatagcataaattacatattttcatggctttgggtggttcctccaaaaataattggacctgtaaaaactagtgtgtgtgtgtgtgtgtgtgtgtgtgtgtgtgtggtttttttttttaatctttactttgaatttgttccccaagtgtacttaatcaccttagtgccagtttaatccagttatgcagaagaaattcatattggttgcctgatgtagagctcagcaccaccctaccacaggccttgtctggtgtatttgggaagtggaaaagagccctcagttggagggagctgacaacccttggtggagggagggtgcccttgaatgtattaaaactatcacccaaagaaggtatgaaaacagggtaaggtggtcagttgtttgccaggtcaatagacagaaagtacattagaaaacaggacttaggccaaacaaacaatactggatactgaatacaaaacagtatgatttatattaaaggtttccaaaggttgcctgcaaaggagaatattactactagtcagcaggaaaaaaatgcattcagaacccaagcagaaactgccaaatgtaattaggttaagaaaagttacccttgggcagtgtattagttttctattgctgtgtgacaaattaccccaaatttagcagtttaaaaaacaatacccatagcagttctgtagctcatgagtctggcacagtgtggctggattctctgctcagggtcttaaaggctgaaataagggttggcaggacaacattccttcatggaggctctggggaagaatctgcttctaagttcattcaggttgttggcggaattcagttctttgctggctctcagctggaggcccctctctcacctcaaggctgcctgcattccttcttatgtggtcccctccagcttcaaaccagccttcctgctctttctcatgcttcatatctctctcccgtcctcctgttttaggggcatatgattagctcaagcccacagatatattttaaggttgattgtgcgatagaacataattgcaggagtactgtctcatctcatcatattcacgggttctggagattagctcattgaaagtgggaggggcattttcaaattctgcctaccacaggcaataactgcccatctcagctgtaggtggaatttttacccagaaaagataggccctagaagcctcatttcttttctccatggaaaaggacagccctctgctgcagcgttcaacttgtgtgtttactgacagagtgaactacagaaatagcttttcttcctaaaggggattgttctacattttgaagttattttttaataaaattgaattatgttgtgtattgtgcttcttaataggaaatgcattattggactgtttttgtaacatcctgtttattgcaaatagctagtatcgttcaaaaactgtataaaatacttttgtacatattagcaatgtctaatttgtatacacttcagttaaatttccctaaaacttgaaaggggaccttgtagaaattaaaatatatacttagtctaaatgcaatctgattgcatttagacaatgtaggttgtagtcactttagatggaaaattacctcacatctgttttcttcagtattacttaagattgtttatttagtggtagagagttttttttttcagcctagaggcagctattttaccatctggtatttatggtctaaatgcaatca

SEQ ID NO: 361783 - DNA, 7134 bp, Homo sapiens
ggtttttttttttaagtgttttgttttgttgttttggagttgagagtaactttaatttttatgtgtattcatgctgtgtatttatggctacaagtcaaactgatttcatatgtatgcatacatatagtctaatagagatgattgtaattcattataatcttgagttttttaaattagtaagatggctactattgctgttttggggtttttaaggttagatatatatcatgtttaactttttcccctatctttttatctttacttctttgttctctacatgctgtgtttaaacctttctgctctcttcacctgaacacatcgtgtttgacatcatctttgtgttgatgtttattacatagtaccacaaagcctgctccacacctggatggggtgcatgtagtctttggactggttatttctggttttgaagtaatcgaacaaattgaaaatctgaagaccgatgctgcaagcagaccatatgcagatgtgcgagttattgactgtggagtacttgccacaaaatcaataaaagatgtttttgagaaaaaaaggaagaaaccaactcattcagaaggctcggattcctcttccaattcctcctcttcttcagaatcatcttcagaaagtgaacttgaacatgagagaagcagaaggaggaaacataagaggaggccaaaagttaaacgttctaaaaagaggcgaaaggaagcaagcagttcagaagagccaaggaataaacatgcaatgaacccaaaaggtcactctgagaggagtgataccaatgaaaaaaggtcagttgattccagtgctaaaagggaaaaacctgtggtccgcccagaagagattcctccagtgcctgagaaccgatttttactgagaagagatatgcctgttgttactgcagaacctgaaccgaagattcctgatgttgcacccattgtaagtgatcagaaaccatctgtatcaaagtctggacggaagattaaaggaaggggcacaattcgctatcacacacctccaagatcaagatcctgttctgagtcagatgatgatgacagcagtgaaactcctcctcactggaaagaggaaatgcagagattaagagcatatagaccacctagtggagaaaaatggagtaaaggagataagttaagtgacccctgttcaagccgatgggatgaaagaagcttgtctcagagatccagatcatggtcctataatggatattattcagaccttagtacagcaagacactctggccaccataaaaaacgcagaaaagaaaaaaaggttaagcataaaaagaaagggaaaaagcagaaacactgcagaagacacaaacaaacaaagaagagaaggattcttataccgtctgacatagaatcctcaaaatcttccactcgaagaatgaaatcctcttgtgatagagaaaggagttctcgttcttcctcattgtcatctcatcactcatcaaagagagactggtctaaatctgataaggatgtccagagctctttaacccattccagcagagactcatacagatcaaaatctcactcacagtcttattctagaggaagctcaagatcaaggactgcgtcaaagtcctcatcacattctcgaagtagatcaaagtccagatctagttccaagtctgggcaccgaaagagagcatcaaaatcaccaagaaaaacagcttctcagttaagtgaaaataaaccagttaaaacagaacctttaagagcaaccatggcacaaaatgaaaatgtagtagtacaaccagttgtagcagaaaatattcctgtaataccactgagtgacagtccccccccttcaagatggaagcctggacagaaaccttggaagccctcttatgagcgaattcaggaaatgaaagctaaaacaacccatttgctacccatccaaagcacttacagtttagcaaatattaaagagactggtagctcatcatcctaccataaaagagaaaaaaattcggaaagtgatcagagcacttattcaaaatacagtgatagaagttcagaaagctcaccaaggtcaaggagcagatcttctaggagtagatcttattccagatcatatacaagatcacgtagtctagctagttcacattcaaggtctaggtctccatcatctagatctcattcacgaaataaatacagtgatcattcacagtgtagtagatcatcttcatatacttctattagcagtgatgatggaaggcgagctaagaggagacttagatccagtgggaaaaaaaatagcgtttcacataaaaagcatagcagcagctctgaaaagacacttcacagtaaatatgtcaaaggtagagacaggtcttcatgtgtgagaaagtatagcgagagcagatcatctttagattattcttcagacagtgagcagtcaagtgttcaggccacacagtcagcccaggaaaaagagaagcagggccaaatggaaagaacacataataaacaagaaaaaaacagaggtgaagaaaaatccaagtctgaacgggaatgccctcattcaaaaaaaagaactttgaaagagaatctttctgatcaccttagaaatggcagtaagcccaaaaggaagaattatgctggtagtaaatgggactctgagtcaaattcagaacgagatgtcactaaaaacagtaaaaatgactcccatccatcctctgacaaggaagaaggtgaggccacatccgattctgaatcagaggttagtgaaattcacatcaaagtcaaacccacaaccaagtcgtccacaaatacttcactgcctgatgataatggtgcttggaaatcaagcaaacagcgcacatcaacttctgactctgaggggtcctgttccaattcggaaaacaataggggaaagccacaaaagcacaaacatgggtcaaaggaaaatcttaaaagagaacacaccaaaaaagtgaaagagaaattgaaagggaaaaaagacaaaaagcataaggctccaaaacgaaagcaagcatttcactggcagcctccactagaatttggtgaagaggaggaggaggagattgatgacaagcaagttactcaggaatcaaaagagaaaaaagtttctgaaaacaatgaaaccataaaagataatattctaaaaactgagaaatccagtgaagaggacctttcaggtaaacatgatacagtgactgtttcatcagatcttgatcagtttactaaagatgatagtaaactcagtatttctcccacagctttaaatactgaggaaaatgtggcctgtttacaaaacattcagcacgttgaagaaagtgttcccaatggagtggaagatgtgcttcaaacagatgacaacatggagatctgcactcctgataggagttccccagcaaaagtagaggagacttcccctctaggaaatgcacggcttgataccccagatataaacattgttttgaagcaggatatggcaacggaacatcctcaagcagaggtagtaaaacaggaaagcagcatgtccgaaagtaaagtgttgggtgaagtggggaaacaggacagcagctctgctagcttggctagtgctggagaaagtaccgggaagaaggaggtggctgagaagagccagatcaacctcattgataagaaatggaagcccctgcaaggtgtggggaacctggcagcacctaatgctgccacatccagtgctgtggaagttaaggtgttgaccactgtgcctgaaatgaaaccacaaggcttgagaatagaaattaaaagcaaaaataaagttcggcctgggtctctctttgatgaagtaagaaagacagcacgcttaaaccgtagaccaagaaatcaggagagttcaagtgatgagcagacgcctagtcgggatgatgatagccagtccaggagtccaagtagatctcgaagtaaatctgaaaccaaatcaagacacagaacaaggtctgtctcctatagtcactcaagaagtcgatcgagaagttccacatcatcttatcgatcaagaagctactctagaagtcggagcagaggatggtacagcagaggccgaaccagaagccggagcagttcctaccggagttacaaaagtcacaggacgtccagcaggagcagatccaggagcagctcatatgatccccacagtcgatccaggtcctacacctacgatagctactatagcaggagtcggagtcgaagtagaagccagagaagtgacagttaccaccgaggcagaagttataatcggcggtccaggagttgtagatcttatggctctgacagtgaaagtgaccgaagttactctcatcaccggagccccagtgagagcagcagatacagttgaaaacgtccggatacaaattatatcttatttgtaaatatctggcaacttagcttaagaaatgtaatgacagtctgttgttctatttcaatatcagaggtgaatttcaaaaatagacacttcttaattgttactggttcatttacatgtggggagaagaatttaaaatacagatatgtctcctaaaaatatttttatgccacattttacagtagccaactatggaaatgaatttcattttcttgaatcaagaaatcgtgaaatttatctatgtataatttgcaatattattttaagtctatttcactctatcttacgtatcccttagaatacagattctttttgcctgtttttccagttttagcatatatgctgccaagcatagaactgtgaaggagaactgttaaaggcggccaaatatttatatactgattacatagagtcttgtacatatgtgctctaaaaacaaaccacccagaattgatactgttggtaaccaggagtataaggcagtggctctggggttcttaattcattcctaacttctttgatacttcacaggattaggaaagtggtcatcatacatcccacacagtctgtattacttcaggcttgtgggcaaggttaggaagaatcaatcagccttaactataaatacctgcactgtctctgaggacttactattttatgttctttttaatcaataccgatcagaagtttaggttataaaaacaattctacttcatgctttggtgcttggtaatttttggtgcgtctttaagcattactcttatatatcatatattaaaataccataaaaatgaaattcagacaaaatcactggcaccaaaaatggtttattctgagctgtcttcactttgactatttggggggcttctctcaagtacagatgtgggttggggtcccctggagcaggcaggattggcagtaagagatattggccactcaagtctactgtgtgtgtgtgcctctggaagagtgaagaatggacttcaaaagtaacatcaaaaatctaactgccaccatcctggagacattttgcagggctttcctttcaagtctttcaagtacaggatattaccacaacagcagctgaactgttgtaaccagcatgtttttcctatttccactgtgacctgcagctgactcaaagccttgcgtgacctgacccaggtgcaagagacaggggaagagggatagagggtatagcataaattacatattttcatggctttgggtggttcctccaaaaataattggacctgtaaaaactagtgtgtgtgtgtgtgtgtgtgtgtgtgtgtgtgtggtttttttttttaatctttactttgaatttgttccccaagtgtacttaatcaccttagtgccagtttaatccagttatgcagaagaaattcatattggttgcctgatgtagagctcagcaccaccctaccacaggccttgtctggtgtatttgggaagtggaaaagagccctcagttggagggagctgacaacccttggtggagggagggtgcccttgaatgtattaaaactatcacccaaagaaggtatgaaaacagggtaaggtggtcagttgtttgccaggtcaatagacagaaagtacattagaaaacaggacttaggccaaacaaacaatactggatactgaatacaaaacagtatgatttatattaaaggtttccaaaggttgcctgcaaaggagaatattactactagtcagcaggaaaaaaatgcattcagaacccaagcagaaactgccaaatgtaattaggttaagaaaagttacccttgggcagtgtattagttttctattgctgtgtgacaaattaccccaaatttagcagtttaaaaaacaatacccatagcagttctgtagctcatgagtctggcacagtgtggctggattctctgctcagggtcttaaaggctgaaataagggttggcaggacaacattccttcatggaggctctggggaagaatctgcttctaagttcattcaggttgttggcggaattcagttctttgctggctctcagctggaggcccctctctcacctcaaggctgcctgcattccttcttatgtggtcccctccagcttcaaaccagccttcctgctctttctcatgcttcatatctctctcccgtcctcctgttttaggggcatatgattagctcaagcccacagatatattttaaggttgattgtgcgatagaacataattgcaggagtactgtctcatctcatcatattcacgggttctggagattagctcattgaaagtgggaggggcattttcaaattctgcctaccacaggcaataactgcccatctcagctgtaggtggaatttttacccagaaaagataggccctagaagcctcatttcttttctccatggaaaaggacagccctctgctgcagcgttcaacttgtgtgtttactgacagagtgaactacagaaatagcttttcttcctaaaggggattgttctacattttgaagttattttttaataaaattgaattatgttgtgtattgtgcttcttaataggaaatgcattattggactgtttttgtaacatcctgtttattgcaaatagctagtatcgttcaaaaactgtataaaatacttttgtacatattagcaatgtctaatttgtatacacttcagttaaatttccctaaaacttgaaaggggaccttgtagaaattaaaatatatacttagtctaa

SEQ ID NO: 361784 - DNA, 7079 bp, Homo sapiens
ggtttttttttttaagtgttttgttttgttgttttggagttgagagtaactttaatttttatgtgtattcatgctgtgtatttatggctacaagtcaaactgatttcatatgtatgcatacatatagtctaatagagatgattgtaattcattataatcttgagttttttaaattagtaagatggctactattgctgttttggggtttttaaggttagatatatatcatgtttaactttttcccctatctttttatctttacttctttgttctctacatgctgtgtttaaacctttctgctctcttcacctgaacacatcgtgtttgacatcatctttgtgttgatgtttattacatagtaccacaaagcctgctccacacctggatggggtgcatgtagtctttggactggttatttctggttttgaagtaatcgaacaaattgaaaatctgaagaccgatgctgcaagcagaccatatgcagatgtgcgagttattgactgtggagtacttgccacaaaatcaataaaagatgtttttgagaaaaaaaggaagaaaccaactcattcagaaggctcggattcctcttccaattcctcctcttcttcagaatcatcttcagaaagtgaacttgaacatgagagaagcagaaggaggaaacataagaggaggccaaaagttaaacgttctaaaaagaggcgaaaggaagcaagcagttcagaagagccaaggaataaacatgcaatgaacccaaaaggtcactctgagaggagtgataccaatgaaaaaaggtcagttgattccagtgctaaaagggaaaaacctgtggtccgcccagaagagattcctccagtgcctgagaaccgatttttactgagaagagatatgcctgttgttactgcagaacctgaaccgaagattcctgatgttgcacccattgtaagtgatcagaaaccatctgtatcaaagtctggacggaagattaaaggaaggggcacaattcgctatcacacacctccaagatcaagatcctgttctgagtcagatgatgatgacagcagtgaaactcctcctcactggaaagaggaaatgcagagattaagagcatatagaccacctagtggagaaaaatggagtaaaggagataagttaagtgacccctgttcaagccgatgggatgaaagaagcttgtctcagagatccagatcatggtcctataatggatattattcagaccttagtacagcaagacactctggccaccataaaaaacgcagaaaagaaaaaaaggttaagcataaaaagaaagggaaaaagcagaaacactgcagaagacacaaacaaacaaagaagagaaggattcttataccgtctgacatagaatcctcaaaatcttccactcgaagaatgaaatcctcttgtgatagagaaaggagttctcgttcttcctcattgtcatctcatcactcatcaaagagagactggtctaaatctgataaggatgtccagagctctttaacccattccagcagagactcatacagatcaaaatctcactcacagtcttattctagaggaagctcaagatcaaggactgcgtcaaagtcctcatcacattctcgaagtagatcaaagtccagatctagttccaagtctgggcaccgaaagagagcatcaaaatcaccaagaaaaacagcttctcagttaagtgaaaataaaccagttaaaacagaacctttaagagcaaccatggcacaaaatgaaaatgtagtagtacaaccagttgtagcagaaaatattcctgtaataccactgagtgacagtccccccccttcaagatggaagcctggacagaaaccttggaagccctcttatgagcgaattcaggaaatgaaagctaaaacaacccatttgctacccatccaaagcacttacagtttagcaaatattaaagagactggtagctcatcatcctaccataaaagagaaaaaaattcggaaagtgatcagagcacttattcaaaatacagtgatagaagttcagaaagctcaccaaggtcaaggagcagatcttctaggagtagatcttattccagatcatatacaagatcacgtagtctagctagttcacattcaaggtctaggtctccatcatctagatctcattcacgaaataaatacagtgatcattcacagtgtagtagatcatcttcatatacttctattagcagtgatgatggaaggcgagctaagaggagacttagatccagtgggaaaaaaaatagcgtttcacataaaaagcatagcagcagctctgaaaagacacttcacagtaaatatgtcaaaggtagagacaggtcttcatgtgtgagaaagtatagcgagagcagatcatctttagattattcttcagacagtgagcagtcaagtgttcaggccacacagtcagcccaggaaaaagagaagcagggccaaatggaaagaacacataataaacaagaaaaaaacagaggtgaagaaaaatccaagtctgaacgggaatgccctcattcaaaaaaaagaactttgaaagagaatctttctgatcaccttagaaatggcagtaagcccaaaaggaagaattatgctggtagtaaatgggactctgagtcaaattcagaacgagatgtcactaaaaacagtaaaaatgactcccatccatcctctgacaaggaagaaggtgaggccacatccgattctgaatcagaggttagtgaaattcacatcaaagtcaaacccacaaccaagtcgtccacaaatacttcactgcctgatgataatggtgcttggaaatcaagcaaacagcgcacatcaacttctgactctgaggggtcctgttccaattcggaaaacaataggggaaagccacaaaagcacaaacatgggtcaaaggaaaatcttaaaagagaacacaccaaaaaagtgaaagagaaattgaaagggaaaaaagacaaaaagcataaggctccaaaacgaaagcaagcatttcactggcagcctccactagaatttggtgaagaggaggaggaggagattgatgacaagcaagttactcaggaatcaaaagagaaaaaagtttctgaaaacaatgaaaccataaaagataatattctaaaaactgagaaatccagtgaagaggacctttcaggtaaacatgatacagtgactgtttcatcagatcttgatcagtttactaaagatgatagtaaactcagtatttctcccacagctttaaatactgaggaaaatgtggcctgtttacaaaacattcagcacgttgaagaaagtgttcccaatggagtggaagatgtgcttcaaacagatgacaacatggagatctgcactcctgataggagttccccagcaaaagtagaggagacttcccctctaggaaatgcacggcttgataccccagatataaacattgttttgaagcaggatatggcaacggaacatcctcaagcagaggtaaggacagcagctctgctagcttggctagtgctggagaaagtaccgggaagaaggaggtggctgagaagagccagatcaacctcattgataagaaatggaagcccctgcaaggtgtggggaacctggcagcacctaatgctgccacatccagtgctgtggaagttaaggtgttgaccactgtgcctgaaatgaaaccacaaggcttgagaatagaaattaaaagcaaaaataaagttcggcctgggtctctctttgatgaagtaagaaagacagcacgcttaaaccgtagaccaagaaatcaggagagttcaagtgatgagcagacgcctagtcgggatgatgatagccagtccaggagtccaagtagatctcgaagtaaatctgaaaccaaatcaagacacagaacaaggtctgtctcctatagtcactcaagaagtcgatcgagaagttccacatcatcttatcgatcaagaagctactctagaagtcggagcagaggatggtacagcagaggccgaaccagaagccggagcagttcctaccggagttacaaaagtcacaggacgtccagcaggagcagatccaggagcagctcatatgatccccacagtcgatccaggtcctacacctacgatagctactatagcaggagtcggagtcgaagtagaagccagagaagtgacagttaccaccgaggcagaagttataatcggcggtccaggagttgtagatcttatggctctgacagtgaaagtgaccgaagttactctcatcaccggagccccagtgagagcagcagatacagttgaaaacgtccggatacaaattatatcttatttgtaaatatctggcaacttagcttaagaaatgtaatgacagtctgttgttctatttcaatatcagaggtgaatttcaaaaatagacacttcttaattgttactggttcatttacatgtggggagaagaatttaaaatacagatatgtctcctaaaaatatttttatgccacattttacagtagccaactatggaaatgaatttcattttcttgaatcaagaaatcgtgaaatttatctatgtataatttgcaatattattttaagtctatttcactctatcttacgtatcccttagaatacagattctttttgcctgtttttccagttttagcatatatgctgccaagcatagaactgtgaaggagaactgttaaaggcggccaaatatttatatactgattacatagagtcttgtacatatgtgctctaaaaacaaaccacccagaattgatactgttggtaaccaggagtataaggcagtggctctggggttcttaattcattcctaacttctttgatacttcacaggattaggaaagtggtcatcatacatcccacacagtctgtattacttcaggcttgtgggcaaggttaggaagaatcaatcagccttaactataaatacctgcactgtctctgaggacttactattttatgttctttttaatcaataccgatcagaagtttaggttataaaaacaattctacttcatgctttggtgcttggtaatttttggtgcgtctttaagcattactcttatatatcatatattaaaataccataaaaatgaaattcagacaaaatcactggcaccaaaaatggtttattctgagctgtcttcactttgactatttggggggcttctctcaagtacagatgtgggttggggtcccctggagcaggcaggattggcagtaagagatattggccactcaagtctactgtgtgtgtgtgcctctggaagagtgaagaatggacttcaaaagtaacatcaaaaatctaactgccaccatcctggagacattttgcagggctttcctttcaagtctttcaagtacaggatattaccacaacagcagctgaactgttgtaaccagcatgtttttcctatttccactgtgacctgcagctgactcaaagccttgcgtgacctgacccaggtgcaagagacaggggaagagggatagagggtatagcataaattacatattttcatggctttgggtggttcctccaaaaataattggacctgtaaaaactagtgtgtgtgtgtgtgtgtgtgtgtgtgtgtgtgtggtttttttttttaatctttactttgaatttgttccccaagtgtacttaatcaccttagtgccagtttaatccagttatgcagaagaaattcatattggttgcctgatgtagagctcagcaccaccctaccacaggccttgtctggtgtatttgggaagtggaaaagagccctcagttggagggagctgacaacccttggtggagggagggtgcccttgaatgtattaaaactatcacccaaagaaggtatgaaaacagggtaaggtggtcagttgtttgccaggtcaatagacagaaagtacattagaaaacaggacttaggccaaacaaacaatactggatactgaatacaaaacagtatgatttatattaaaggtttccaaaggttgcctgcaaaggagaatattactactagtcagcaggaaaaaaatgcattcagaacccaagcagaaactgccaaatgtaattaggttaagaaaagttacccttgggcagtgtattagttttctattgctgtgtgacaaattaccccaaatttagcagtttaaaaaacaatacccatagcagttctgtagctcatgagtctggcacagtgtggctggattctctgctcagggtcttaaaggctgaaataagggttggcaggacaacattccttcatggaggctctggggaagaatctgcttctaagttcattcaggttgttggcggaattcagttctttgctggctctcagctggaggcccctctctcacctcaaggctgcctgcattccttcttatgtggtcccctccagcttcaaaccagccttcctgctctttctcatgcttcatatctctctcccgtcctcctgttttaggggcatatgattagctcaagcccacagatatattttaaggttgattgtgcgatagaacataattgcaggagtactgtctcatctcatcatattcacgggttctggagattagctcattgaaagtgggaggggcattttcaaattctgcctaccacaggcaataactgcccatctcagctgtaggtggaatttttacccagaaaagataggccctagaagcctcatttcttttctccatggaaaaggacagccctctgctgcagcgttcaacttgtgtgtttactgacagagtgaactacagaaatagcttttcttcctaaaggggattgttctacattttgaagttattttttaataaaattgaattatgttgtgtattgtgcttcttaataggaaatgcattattggactgtttttgtaacatcctgtttattgcaaatagctagtatcgttcaaaaactgtataaaatacttttgtacatattagcaatgtctaatttgtatacacttcagttaaatttccctaaaacttgaaaggggaccttgtagaaattaaaatatatacttagtctaa

SEQ ID NO: 361785 - DNA, 6800 bp, Homo sapiens
ggtttttttttttaagtgttttgttttgttgttttggagttgagagtaactttaatttttatgtgtattcatgctgtgtatttatggctacaagtcaaactgatttcatatgtatgcatacatatagtctaatagagatgattgtaattcattataatcttgagttttttaaattagtaagatggctactattgctgttttggggtttttaaggttagatatatatcatgtttaactttttcccctatctttttatctttacttctttgttctctacatgctgtgtttaaacctttctgctctcttcacctgaacacatcgtgtttgacatcatctttgtgttgatgtttattacatagtaccacaaagcctgctccacacctggatggggtgcatgtagtctttggactggttatttctggttttgaagtaatcgaacaaattgaaaatctgaagaccgatgctgcaagcagaccatatgcagatgtgcgagttattgactgtggagtacttgccacaaaatcaataaaagatgtttttgagaaaaaaaggaagaaaccaactcattcagaaggctcggattcctcttccaattcctcctcttcttcagaatcatcttcagaaagtgaacttgaacatgagagaagcagaaggaggaaacataagaggaggccaaaagttaaacgttctaaaaagaggcgaaaggaagcaagcagttcagaagagccaaggaataaacatgcaatgaacccaaaaggtcactctgagaggagtgataccaatgaaaaaaggtcagttgattccagtgctaaaagggaaaaacctgtggtccgcccagaagagattcctccagtgcctgagaaccgatttttactgagaagagatatgcctgttgttactgcagaacctgaaccgaagattcctgatgttgcacccattgtaagtgatcagaaaccatctgtatcaaagtctggacggaagattaaaggaaggggcacaattcgctatcacacacctccaagatcaagatcctgttctgagtcagatgatgatgacagcagtgaaactcctcctcactggaaagaggaaatgcagagattaagagcatatagaccacctagtggagaaaaatggagtaaaggagataagttaagtgacccctgttcaagccgatgggatgaaagaagcttgtctcagagatccagatcatggtcctataatggatattattcagaccttagtacagcaagacactctggccaccataaaaaacgcagaaaagaaaaaaaggttaagcataaaaagaaagggaaaaagcagaaacactgcagaagacacaaacaaacaaagaagagaaggattcttataccgtctgacatagaatcctcaaaatcttccactcgaagaatgaaatcctcttgtgatagagaaaggagttctcgttcttcctcattgtcatctcatcactcatcaaagagagactggtctaaatctgataaggatgtccagagctctttaacccattccagcagagactcatacagatcaaaatctcactcacagtcttattctagaggaagctcaagatcaaggactgcgtcaaagtcctcatcacattctcgaagtagatcaaagtccagatctagttccaagtctgggcaccgaaagagagcatcaaaatcaccaagaaaaacagcttctcagttaagtgaaaataaaccagttaaaacagaacctttaagagcaaccatggcacaaaatgaaaatgtagtagtacaaccagttgtagcagaaaatattcctgtaataccactgagtgacagtccccccccttcaagatggaagcctggacagaaaccttggaagccctcttatgagcgaattcaggaaatgaaagctaaaacaacccatttgctacccatccaaagcacttacagtttagcaaatattaaagagactggtagctcatcatcctaccataaaagagaaaaaaattcggaaagtgatcagagcacttattcaaaatacagtgatagaagttcagaaagctcaccaaggtcaaggagcagatcttctaggagtagatcttattccagatcatatacaagatcacgtagtctagctagttcacattcaaggtctaggtctccatcatctagatctcattcacgaaataaatacagtgatcattcacagtgtagtagatcatcttcatatacttctattagcagtgatgatggaaggcgagctaagaggagacttagatccagtgggaaaaaaaatagcgtttcacataaaaagcatagcagcagctctgaaaagacacttcacagtaaatatgtcaaaggtagagacaggtcttcatgtgtgagaaagtatagcgagagcagatcatctttagattattcttcagacagtgagcagtcaagtgttcaggccacacagtcagcccaggaaaaagagaagcagggccaaatggaaagaacacataataaacaagaaaaaaacagaggtgaagaaaaatccaagtctgaacgggaatgccctcattcaaaaaaaagaactttgaaagagaatctttctgatcaccttagaaatggcagtaagcccaaaaggaagaattatgctggtagtaaatgggactctgagtcaaattcagaacgagatgtcactaaaaacagtaaaaatgactcccatccatcctctgacaaggaagaaggtgaggccacatccgattctgaatcagaggttagtgaaattcacatcaaagtcaaacccacaaccaagtcgtccacaaatacttcactgcctgatgataatggtgcttggaaatcaagcaaacagcgcacatcaacttctgactctgaggggtcctgttccaattcggaaaacaataggggaaagccacaaaagcacaaacatgggtcaaaggaaaatcttaaaagagaacacaccaaaaaagtgaaagagaaattgaaagggaaaaaagacaaaaagcataaggctccaaaacgaaagcaagcatttcactggcagcctccactagaatttggtgaagaggaggaggaggagattgatgacaagcaagttactcaggaatcaaaagagaaaaaagtttctgaaaacaatgaaaccataaaagataatattctaaaaactgagaaatccagtgaagaggacctttcaggtaaacatgatacagtgactgtttcatcagatcttgatcagtttactaaagatgatagtaaactcagtatttctcccacagctttaaatactgaggaaaatgtggcctgtttacaaaacattcagcacgttgaagaaagtgttcccaatggagtggaagatgtgcttcaaacagatgacaacatggagatctgcactcctgataggagttccccagcaaaagtagaggagacttcccctctaggaaatgcacggcttgataccccagatataaacattgttttgaagcaggatatggcaacggaacatcctcaagcagaggtagtaaaacaggaaagcagcatgtccgaaagtaaagtgttgggtgaagtggggaaacaggacagcagctctgctagcttggctagtgctggagaaagtaccgggaagaaggaggtggctgagaagagccagatcaacctcattgataagaaatggaagcccctgcaaggtgtggggaacctggcagcacctaatgctgccacatccagtgctgtggaagttaaggtgttgaccactgtgcctgaaatgaaaccacaaggcttgagaatagaaattaaaagcaaaaataaagttcggcctgggtctctctttgatgaagtaagaaagacagcacgcttaaaccgtagaccaagaaatcaggagagttcaagtgatgagcagacgcctagtcgggatgatgatagccagtccaggagtccaagtagatctcgaagtaaatctgaaaccaaatcaagacacagaacaaggtctgtctcctatagtcactcaagaagtcgatcgagaagttccacatcatcttatcgatcaagaagctactctagaagtcggagcagaggatggtacagcagaggccgaaccagaagccggagcagttcctaccggagttacaaaagtcacaggacgtccagcaggagcagatccaggagcagctcatatgatccccacagtcgatccaggtcctacacctacgatagctactatagcaggagtcggagtcgaagtagaagccagagaagtgacagttaccaccgaggcagaagttataatcggcggtccaggagttgtagatcttatggctctgacagtgaaagtgaccgaagttactctcatcaccggagccccagtgagagcagcagatacagttgaaaacgtccggatacaaattatatcttatttgtaaatatctggcaacttagcttaagaaatgtaatgacagtctgttgttctatttcaatatcagaggtgaatttcaaaaatagacacttcttaattgttactggttcatttacatgtggggagaagaatttaaaatacagatatgtctcctaaaaatatttttatgccacattttacagtagccaactatggaaatgaatttcattttcttgaatcaagaaatcgtgaaatttatctatgtataatttgcaatattattttaagtctatttcactctatcttacgtatcccttagaatacagattctttttgcctgtttttccagttttagcatatatgctgccaagcatagaactgtgaaggagaactgttaaaggcggccaaatatttatatactgattacatagagtcttgtacatatgtgctctaaaaacaaaccacccagaattgatactgttggtaaccaggagtataaggcagtggctctggggttcttaattcattcctaacttctttgatacttcacaggattaggaaagtggtcatcatacatcccacacagtctgtattacttcaggcttgtgggcaaggttaggaagaatcaatcagccttaactataaatacctgcactgtctctgaggacttactattttatgttctttttaatcaataccgatcagaagtttaggttataaaaacaattctacttcatgctttggtgcttggtaatttttggtgcgtctttaagcattactcttatatatcatatattaaaataccataaaaatgaaattcagacaaaatcactggcaccaaaaatggtttattctgagctgtcttcactttgactatttggggggcttctctcaagtacagatgtgggttggggtcccctggagcaggcaggattggcagtaagagatattggccactcaagtctactgtgtgtgtgtgtgtgtgtggtttttttttttaatctttactttgaatttgttccccaagtgtacttaatcaccttagtgccagtttaatccagttatgcagaagaaattcatattggttgcctgatgtagagctcagcaccaccctaccacaggccttgtctggtgtatttgggaagtggaaaagagccctcagttggagggagctgacaacccttggtggagggagggtgcccttgaatgtattaaaactatcacccaaagaaggtatgaaaacagggtaaggtggtcagttgtttgccaggtcaatagacagaaagtacattagaaaacaggacttaggccaaacaaacaatactggatactgaatacaaaacagtatgatttatattaaaggtttccaaaggttgcctgcaaaggagaatattactactagtcagcaggaaaaaaatgcattcagaacccaagcagaaactgccaaatgtaattaggttaagaaaagttacccttgggcagtgtattagttttctattgctgtgtgacaaattaccccaaatttagcagtttaaaaaacaatacccatagcagttctgtagctcatgagtctggcacagtgtggctggattctctgctcagggtcttaaaggctgaaataagggttggcaggacaacattccttcatggaggctctggggaagaatctgcttctaagttcattcaggttgttggcggaattcagttctttgctggctctcagctggaggcccctctctcacctcaaggctgcctgcattccttcttatgtggtcccctccagcttcaaaccagccttcctgctctttctcatgcttcatatctctctcccgtcctcctgttttaggggcatatgattagctcaagcccacagatatattttaaggttgattgtgcgatagaacataattgcaggagtactgtctcatctcatcatattcacgggttctggagattagctcattgaaagtgggaggggcattttcaaattctgcctaccacaggcaataactgcccatctcagctgtaggtggaatttttacccagaaaagataggccctagaagcctcatttcttttctccatggaaaaggacagccctctgctgcagcgttcaacttgtgtgtttactgacagagtgaactacagaaatagcttttcttcctaaaggggattgttctacattttgaagttattttttaataaaattgaattatgttgtgtattgtgcttcttaataggaaatgcattattggactgtttttgtaacatcctgtttattgcaaatagctagtatcgttcaaaaactgtataaaatacttttgtacatattagcaatgtctaatttgtatacacttcagttaaatttccctaaaacttgaaaggggaccttgtagaaattaaaatatatacttagtctaa

SEQ ID NO: 361786 - DNA, 7828 bp, Homo sapiens
aacttcgttcagcctgatctgaagaagtgtctggttattcggcgtgtgcacacgccgagtaaccataccacaatgaccttaggcttaatattctccagttctccattcgttagtctccacaaaacatggcctggtgtatctcccccaatttccaaattcagtgcatgaagtggggaaaaaagctctcgccatatctcatattgctgcattaactgcaccatggagtctcccacggacagtacatcaggctctttgtctttacagtccaaaacaaatctgttgtgctggtttgaagaagaaaaaaaaattattaactggcacttctggctgggtgtggtggcccatgcttgtactctcttcatttagggaggcccaggcaggaggattgcttgaacccaggagtttgagaccagcctgggcaatatagcaagaccctgtctacaaaaaacaatttttttttttttttttttttttccaggagagaaaggccttgggaaaacaactgggaagaagttatgttataaaggttctacgttccatcgtgtggttaaaaactttatgattcagggtggggacttcagtgaaggtaatggaaaaggtggagaatcaatttatggtggatattttaaaggtaaggcttaatattttacggtcttttgtttcagttctgatattaaagcaagtttgatcatatacttttaatgagaagaggtttacttatagttcactttttgcatgaaactaatgctgcatgaaaatactttatttgcatgaatttggggataaattatattgtaatatataatttttaattgacaagattaattaaggctaactttatggttaaacatgactttcagcatggaggttaggcaactatatacatgaaactcctatcttcctgcctaaaactgtcaacatattcttttgtttatagagaatgtggtcttttgcaaaatgaaaagatgaaaactttattctcaaacatgacagagcgttccttttatcaatggcaaatcgagggaaacataccaatggttcccagtttttcattaccacaaagcctgctccacacctggatggggtgcatgtagtctttggactggttatttctggttttgaagtaatcgaacaaattgaaaatctgaagaccgatgctgcaagcagaccatatgcagatgtgcgagttattgactgtggagtacttgccacaaaatcaataaaagatgtttttgagaaaaaaaggaagaaaccaactcattcagaaggctcggattcctcttccaattcctcctcttcttcagaatcatcttcagaaagtgaacttgaacatgagagaagcagaaggaggaaacataagaggaggccaaaagttaaacgttctaaaaagaggcgaaaggaagcaagcagttcagaagagccaaggaataaacatgcaatgaacccaaaaggtcactctgagaggagtgataccaatgaaaaaaggtcagttgattccagtgctaaaagggaaaaacctgtggtccgcccagaagagattcctccagtgcctgagaaccgatttttactgagaagagatatgcctgttgttactgcagaacctgaaccgaagattcctgatgttgcacccattgtaagtgatcagaaaccatctgtatcaaagtctggacggaagattaaaggaaggggcacaattcgctatcacacacctccaagatcaagatcctgttctgagtcagatgatgatgacagcagtgaaactcctcctcactggaaagaggaaatgcagagattaagagcatatagaccacctagtggagaaaaatggagtaaaggagataagttaagtgacccctgttcaagccgatgggatgaaagaagcttgtctcagagatccagatcatggtcctataatggatattattcagaccttagtacagcaagacactctggccaccataaaaaacgcagaaaagaaaaaaaggttaagcataaaaagaaagggaaaaagcagaaacactgcagaagacacaaacaaacaaagaagagaaggattcttataccgtctgacatagaatcctcaaaatcttccactcgaagaatgaaatcctcttgtgatagagaaaggagttctcgttcttcctcattgtcatctcatcactcatcaaagagagactggtctaaatctgataaggatgtccagagctctttaacccattccagcagagactcatacagatcaaaatctcactcacagtcttattctagaggaagctcaagatcaaggactgcgtcaaagtcctcatcacattctcgaagtagatcaaagtccagatctagttccaagtctgggcaccgaaagagagcatcaaaatcaccaagaaaaacagcttctcagttaagtgaaaataaaccagttaaaacagaacctttaagagcaaccatggcacaaaatgaaaatgtagtagtacaaccagttgtagcagaaaatattcctgtaataccactgagtgacagtccccccccttcaagatggaagcctggacagaaaccttggaagccctcttatgagcgaattcaggaaatgaaagctaaaacaacccatttgctacccatccaaagcacttacagtttagcaaatattaaagagactggtagctcatcatcctaccataaaagagaaaaaaattcggaaagtgatcagagcacttattcaaaatacagtgatagaagttcagaaagctcaccaaggtcaaggagcagatcttctaggagtagatcttattccagatcatatacaagatcacgtagtctagctagttcacattcaaggtctaggtctccatcatctagatctcattcacgaaataaatacagtgatcattcacagtgtagtagatcatcttcatatacttctattagcagtgatgatggaaggcgagctaagaggagacttagatccagtgggaaaaaaaatagcgtttcacataaaaagcatagcagcagctctgaaaagacacttcacagtaaatatgtcaaaggtagagacaggtcttcatgtgtgagaaagtatagcgagagcagatcatctttagattattcttcagacagtgagcagtcaagtgttcaggccacacagtcagcccaggaaaaagagaagcagggccaaatggaaagaacacataataaacaagaaaaaaacagaggtgaagaaaaatccaagtctgaacgggaatgccctcattcaaaaaaaagaactttgaaagagaatctttctgatcaccttagaaatggcagtaagcccaaaaggaagaattatgctggtagtaaatgggactctgagtcaaattcagaacgagatgtcactaaaaacagtaaaaatgactcccatccatcctctgacaaggaagaaggtgaggccacatccgattctgaatcagaggttagtgaaattcacatcaaagtcaaacccacaaccaagtcgtccacaaatacttcactgcctgatgataatggtgcttggaaatcaagcaaacagcgcacatcaacttctgactctgaggggtcctgttccaattcggaaaacaataggggaaagccacaaaagcacaaacatgggtcaaaggaaaatcttaaaagagaacacaccaaaaaagtgaaagagaaattgaaagggaaaaaagacaaaaagcataaggctccaaaacgaaagcaagcatttcactggcagcctccactagaatttggtgaagaggaggaggaggagattgatgacaagcaagttactcaggaatcaaaagagaaaaaagtttctgaaaacaatgaaaccataaaagataatattctaaaaactgagaaatccagtgaagaggacctttcaggtaaacatgatacagtgactgtttcatcagatcttgatcagtttactaaagatgatagtaaactcagtatttctcccacagctttaaatactgaggaaaatgtggcctgtttacaaaacattcagcacgttgaagaaagtgttcccaatggagtggaagatgtgcttcaaacagatgacaacatggagatctgcactcctgataggagttccccagcaaaagtagaggagacttcccctctaggaaatgcacggcttgataccccagatataaacattgttttgaagcaggatatggcaacggaacatcctcaagcagaggtagtaaaacaggaaagcagcatgtccgaaagtaaagtgttgggtgaagtggggaaacaggacagcagctctgctagcttggctagtgctggagaaagtaccgggaagaaggaggtggctgagaagagccagatcaacctcattgataagaaatggaagcccctgcaaggtgtggggaacctggcagcacctaatgctgccacatccagtgctgtggaagttaaggtgttgaccactgtgcctgaaatgaaaccacaaggcttgagaatagaaattaaaagcaaaaataaagttcggcctgggtctctctttgatgaagtaagaaagacagcacgcttaaaccgtagaccaagaaatcaggagagttcaagtgatgagcagacgcctagtcgggatgatgatagccagtccaggagtccaagtagatctcgaagtaaatctgaaaccaaatcaagacacagaacaaggtctgtctcctatagtcactcaagaagtcgatcgagaagttccacatcatcttatcgatcaagaagctactctagaagtcggagcagaggatggtacagcagaggccgaaccagaagccggagcagttcctaccggagttacaaaagtcacaggacgtccagcaggagcagatccaggagcagctcatatgatccccacagtcgatccaggtcctacacctacgatagctactatagcaggagtcggagtcgaagtagaagccagagaagtgacagttaccaccgaggcagaagttataatcggcggtccaggagttgtagatcttatggctctgacagtgaaagtgaccgaagttactctcatcaccggagccccagtgagagcagcagatacagttgaaaacgtccggatacaaattatatcttatttgtaaatatctggcaacttagcttaagaaatgtaatgacagtctgttgttctatttcaatatcagaggtgaatttcaaaaatagacacttcttaattgttactggttcatttacatgtggggagaagaatttaaaatacagatatgtctcctaaaaatatttttatgccacattttacagtagccaactatggaaatgaatttcattttcttgaatcaagaaatcgtgaaatttatctatgtataatttgcaatattattttaagtctatttcactctatcttacgtatcccttagaatacagattctttttgcctgtttttccagttttagcatatatgctgccaagcatagaactgtgaaggagaactgttaaaggcggccaaatatttatatactgattacatagagtcttgtacatatgtgctctaaaaacaaaccacccagaattgatactgttggtaaccaggagtataaggcagtggctctggggttcttaattcattcctaacttctttgatacttcacaggattaggaaagtggtcatcatacatcccacacagtctgtattacttcaggcttgtgggcaaggttaggaagaatcaatcagccttaactataaatacctgcactgtctctgaggacttactattttatgttctttttaatcaataccgatcagaagtttaggttataaaaacaattctacttcatgctttggtgcttggtaatttttggtgcgtctttaagcattactcttatatatcatatattaaaataccataaaaatgaaattcagacaaaatcactggcaccaaaaatggtttattctgagctgtcttcactttgactatttggggggcttctctcaagtacagatgtgggttggggtcccctggagcaggcaggattggcagtaagagatattggccactcaagtctactgtgtgtgtgtgcctctggaagagtgaagaatggacttcaaaagtaacatcaaaaatctaactgccaccatcctggagacattttgcagggctttcctttcaagtctttcaagtacaggatattaccacaacagcagctgaactgttgtaaccagcatgtttttcctatttccactgtgacctgcagctgactcaaagccttgcgtgacctgacccaggtgcaagagacaggggaagagggatagagggtatagcataaattacatattttcatggctttgggtggttcctccaaaaataattggacctgtaaaaactagtgtgtgtgtgtgtgtgtgtgtgtgtgtgtgtgtggtttttttttttaatctttactttgaatttgttccccaagtgtacttaatcaccttagtgccagtttaatccagttatgcagaagaaattcatattggttgcctgatgtagagctcagcaccaccctaccacaggccttgtctggtgtatttgggaagtggaaaagagccctcagttggagggagctgacaacccttggtggagggagggtgcccttgaatgtattaaaactatcacccaaagaaggtatgaaaacagggtaaggtggtcagttgtttgccaggtcaatagacagaaagtacattagaaaacaggacttaggccaaacaaacaatactggatactgaatacaaaacagtatgatttatattaaaggtttccaaaggttgcctgcaaaggagaatattactactagtcagcaggaaaaaaatgcattcagaacccaagcagaaactgccaaatgtaattaggttaagaaaagttacccttgggcagtgtattagttttctattgctgtgtgacaaattaccccaaatttagcagtttaaaaaacaatacccatagcagttctgtagctcatgagtctggcacagtgtggctggattctctgctcagggtcttaaaggctgaaataagggttggcaggacaacattccttcatggaggctctggggaagaatctgcttctaagttcattcaggttgttggcggaattcagttctttgctggctctcagctggaggcccctctctcacctcaaggctgcctgcattccttcttatgtggtcccctccagcttcaaaccagccttcctgctctttctcatgcttcatatctctctcccgtcctcctgttttaggggcatatgattagctcaagcccacagatatattttaaggttgattgtgcgatagaacataattgcaggagtactgtctcatctcatcatattcacgggttctggagattagctcattgaaagtgggaggggcattttcaaattctgcctaccacaggcaataactgcccatctcagctgtaggtggaatttttacccagaaaagataggccctagaagcctcatttcttttctccatggaaaaggacagccctctgctgcagcgttcaacttgtgtgtttactgacagagtgaactacagaaatagcttttcttcctaaaggggattgttctacattttgaagttattttttaataaaattgaattatgttgtgtattgtgcttcttaataggaaatgcattattggactgtttttgtaacatcctgtttattgcaaatagctagtatcgttcaaaaactgtataaaatacttttgtacatattagcaatgtctaatttgtatacacttcagttaaatttccctaaaacttgaaaggggaccttgtagaaattaaaatatatacttagtctaa

SEQ ID NO: 361787 - DNA, 7317 bp, Homo sapiens
aagctatcaaaaatgatttctgtgttagtatatttttaatgttcattatggcttaaagtaggtgattatttgcaggtaatggaaaaggtggagaatcaatttatggtggatattttaaaggtaaggcttaatattttacggtcttttgtttcagttctgatattaaagcaagtttgatcatatacttttaatgagaagaggtttacttatagttcactttttgcatgaaactaatgctgcatgaaaatactttatttgcatgaatttggggataaattatattgtaatatataatttttaattgacaagattaattaaggctaactttatggttaaacatgactttcagcatggaggttaggcaactatatacatgaaactcctatcttcctgcctaaaactgtcaacatattcttttgtttatagagaatgtggtcttttgcaaaatgaaaagatgaaaactttattctcaaacatgacagagcgttccttttatcaatggcaaatcgagggaaacataccaatggttcccagtttttcattaccacaaagcctgctccacacctggatggggtgcatgtagtctttggactggttatttctggttttgaagtaatcgaacaaattgaaaatctgaagaccgatgctgcaagcagaccatatgcagatgtgcgagttattgactgtggagtacttgccacaaaatcaataaaagatgtttttgagaaaaaaaggaagaaaccaactcattcagaaggctcggattcctcttccaattcctcctcttcttcagaatcatcttcagaaagtgaacttgaacatgagagaagcagaaggaggaaacataagaggaggccaaaagttaaacgttctaaaaagaggcgaaaggaagcaagcagttcagaagagccaaggaataaacatgcaatgaacccaaaaggtcactctgagaggagtgataccaatgaaaaaaggtcagttgattccagtgctaaaagggaaaaacctgtggtccgcccagaagagattcctccagtgcctgagaaccgatttttactgagaagagatatgcctgttgttactgcagaacctgaaccgaagattcctgatgttgcacccattgtaagtgatcagaaaccatctgtatcaaagtctggacggaagattaaaggaaggggcacaattcgctatcacacacctccaagatcaagatcctgttctgagtcagatgatgatgacagcagtgaaactcctcctcactggaaagaggaaatgcagagattaagagcatatagaccacctagtggagaaaaatggagtaaaggagataagttaagtgacccctgttcaagccgatgggatgaaagaagcttgtctcagagatccagatcatggtcctataatggatattattcagaccttagtacagcaagacactctggccaccataaaaaacgcagaaaagaaaaaaaggttaagcataaaaagaaagggaaaaagcagaaacactgcagaagacacaaacaaacaaagaagagaaggattcttataccgtctgacatagaatcctcaaaatcttccactcgaagaatgaaatcctcttgtgatagagaaaggagttctcgttcttcctcattgtcatctcatcactcatcaaagagagactggtctaaatctgataaggatgtccagagctctttaacccattccagcagagactcatacagatcaaaatctcactcacagtcttattctagaggaagctcaagatcaaggactgcgtcaaagtcctcatcacattctcgaagtagatcaaagtccagatctagttccaagtctgggcaccgaaagagagcatcaaaatcaccaagaaaaacagcttctcagttaagtgaaaataaaccagttaaaacagaacctttaagagcaaccatggcacaaaatgaaaatgtagtagtacaaccagttgtagcagaaaatattcctgtaataccactgagtgacagtccccccccttcaagatggaagcctggacagaaaccttggaagccctcttatgagcgaattcaggaaatgaaagctaaaacaacccatttgctacccatccaaagcacttacagtttagcaaatattaaagagactggtagctcatcatcctaccataaaagagaaaaaaattcggaaagtgatcagagcacttattcaaaatacagtgatagaagttcagaaagctcaccaaggtcaaggagcagatcttctaggagtagatcttattccagatcatatacaagatcacgtagtctagctagttcacattcaaggtctaggtctccatcatctagatctcattcacgaaataaatacagtgatcattcacagtgtagtagatcatcttcatatacttctattagcagtgatgatggaaggcgagctaagaggagacttagatccagtgggaaaaaaaatagcgtttcacataaaaagcatagcagcagctctgaaaagacacttcacagtaaatatgtcaaaggtagagacaggtcttcatgtgtgagaaagtatagcgagagcagatcatctttagattattcttcagacagtgagcagtcaagtgttcaggccacacagtcagcccaggaaaaagagaagcagggccaaatggaaagaacacataataaacaagaaaaaaacagaggtgaagaaaaatccaagtctgaacgggaatgccctcattcaaaaaaaagaactttgaaagagaatctttctgatcaccttagaaatggcagtaagcccaaaaggaagaattatgctggtagtaaatgggactctgagtcaaattcagaacgagatgtcactaaaaacagtaaaaatgactcccatccatcctctgacaaggaagaaggtgaggccacatccgattctgaatcagaggttagtgaaattcacatcaaagtcaaacccacaaccaagtcgtccacaaatacttcactgcctgatgataatggtgcttggaaatcaagcaaacagcgcacatcaacttctgactctgaggggtcctgttccaattcggaaaacaataggggaaagccacaaaagcacaaacatgggtcaaaggaaaatcttaaaagagaacacaccaaaaaagtgaaagagaaattgaaagggaaaaaagacaaaaagcataaggctccaaaacgaaagcaagcatttcactggcagcctccactagaatttggtgaagaggaggaggaggagattgatgacaagcaagttactcaggaatcaaaagagaaaaaagtttctgaaaacaatgaaaccataaaagataatattctaaaaactgagaaatccagtgaagaggacctttcaggtaaacatgatacagtgactgtttcatcagatcttgatcagtttactaaagatgatagtaaactcagtatttctcccacagctttaaatactgaggaaaatgtggcctgtttacaaaacattcagcacgttgaagaaagtgttcccaatggagtggaagatgtgcttcaaacagatgacaacatggagatctgcactcctgataggagttccccagcaaaagtagaggagacttcccctctaggaaatgcacggcttgataccccagatataaacattgttttgaagcaggatatggcaacggaacatcctcaagcagaggtagtaaaacaggaaagcagcatgtccgaaagtaaagtgttgggtgaagtggggaaacaggacagcagctctgctagcttggctagtgctggagaaagtaccgggaagaaggaggtggctgagaagagccagatcaacctcattgataagaaatggaagcccctgcaaggtgtggggaacctggcagcacctaatgctgccacatccagtgctgtggaagttaaggtgttgaccactgtgcctgaaatgaaaccacaaggcttgagaatagaaattaaaagcaaaaataaagttcggcctgggtctctctttgatgaagtaagaaagacagcacgcttaaaccgtagaccaagaaatcaggagagttcaagtgatgagcagacgcctagtcgggatgatgatagccagtccaggagtccaagtagatctcgaagtaaatctgaaaccaaatcaagacacagaacaaggtctgtctcctatagtcactcaagaagtcgatcgagaagttccacatcatcttatcgatcaagaagctactctagaagtcggagcagaggatggtacagcagaggccgaaccagaagccggagcagttcctaccggagttacaaaagtcacaggacgtccagcaggagcagatccaggagcagctcatatgatccccacagtcgatccaggtcctacacctacgatagctactatagcaggagtcggagtcgaagtagaagccagagaagtgacagttaccaccgaggcagaagttataatcggcggtccaggagttgtagatcttatggctctgacagtgaaagtgaccgaagttactctcatcaccggagccccagtgagagcagcagatacagttgaaaacgtccggatacaaattatatcttatttgtaaatatctggcaacttagcttaagaaatgtaatgacagtctgttgttctatttcaatatcagaggtgaatttcaaaaatagacacttcttaattgttactggttcatttacatgtggggagaagaatttaaaatacagatatgtctcctaaaaatatttttatgccacattttacagtagccaactatggaaatgaatttcattttcttgaatcaagaaatcgtgaaatttatctatgtataatttgcaatattattttaagtctatttcactctatcttacgtatcccttagaatacagattctttttgcctgtttttccagttttagcatatatgctgccaagcatagaactgtgaaggagaactgttaaaggcggccaaatatttatatactgattacatagagtcttgtacatatgtgctctaaaaacaaaccacccagaattgatactgttggtaaccaggagtataaggcagtggctctggggttcttaattcattcctaacttctttgatacttcacaggattaggaaagtggtcatcatacatcccacacagtctgtattacttcaggcttgtgggcaaggttaggaagaatcaatcagccttaactataaatacctgcactgtctctgaggacttactattttatgttctttttaatcaataccgatcagaagtttaggttataaaaacaattctacttcatgctttggtgcttggtaatttttggtgcgtctttaagcattactcttatatatcatatattaaaataccataaaaatgaaattcagacaaaatcactggcaccaaaaatggtttattctgagctgtcttcactttgactatttggggggcttctctcaagtacagatgtgggttggggtcccctggagcaggcaggattggcagtaagagatattggccactcaagtctactgtgtgtgtgtgcctctggaagagtgaagaatggacttcaaaagtaacatcaaaaatctaactgccaccatcctggagacattttgcagggctttcctttcaagtctttcaagtacaggatattaccacaacagcagctgaactgttgtaaccagcatgtttttcctatttccactgtgacctgcagctgactcaaagccttgcgtgacctgacccaggtgcaagagacaggggaagagggatagagggtatagcataaattacatattttcatggctttgggtggttcctccaaaaataattggacctgtaaaaactagtgtgtgtgtgtgtgtgtgtgtgtgtgtgtgtgtggtttttttttttaatctttactttgaatttgttccccaagtgtacttaatcaccttagtgccagtttaatccagttatgcagaagaaattcatattggttgcctgatgtagagctcagcaccaccctaccacaggccttgtctggtgtatttgggaagtggaaaagagccctcagttggagggagctgacaacccttggtggagggagggtgcccttgaatgtattaaaactatcacccaaagaaggtatgaaaacagggtaaggtggtcagttgtttgccaggtcaatagacagaaagtacattagaaaacaggacttaggccaaacaaacaatactggatactgaatacaaaacagtatgatttatattaaaggtttccaaaggttgcctgcaaaggagaatattactactagtcagcaggaaaaaaatgcattcagaacccaagcagaaactgccaaatgtaattaggttaagaaaagttacccttgggcagtgtattagttttctattgctgtgtgacaaattaccccaaatttagcagtttaaaaaacaatacccatagcagttctgtagctcatgagtctggcacagtgtggctggattctctgctcagggtcttaaaggctgaaataagggttggcaggacaacattccttcatggaggctctggggaagaatctgcttctaagttcattcaggttgttggcggaattcagttctttgctggctctcagctggaggcccctctctcacctcaaggctgcctgcattccttcttatgtggtcccctccagcttcaaaccagccttcctgctctttctcatgcttcatatctctctcccgtcctcctgttttaggggcatatgattagctcaagcccacagatatattttaaggttgattgtgcgatagaacataattgcaggagtactgtctcatctcatcatattcacgggttctggagattagctcattgaaagtgggaggggcattttcaaattctgcctaccacaggcaataactgcccatctcagctgtaggtggaatttttacccagaaaagataggccctagaagcctcatttcttttctccatggaaaaggacagccctctgctgcagcgttcaacttgtgtgtttactgacagagtgaactacagaaatagcttttcttcctaaaggggattgttctacattttgaagttattttttaataaaattgaattatgttgtgtattgtgcttcttaataggaaatgcattattggactgtttttgtaacatcctgtttattgcaaatagctagtatcgttcaaaaactgtataaaatacttttgtacatattagcaatgtctaatttgtatacacttcagttaaatttccctaaaacttgaaaggggaccttgtagaaattaaaatatatacttagtctaa

SEQ ID NO: 361788 - DNA, 7619 bp, Homo sapiens
ataaaaattggtcagtgtgtgttctccaaaaaaaaatcttgataatggggaaaatcagagattagacaggaaaagaagatattgtggctaagatttgactgcacttacgctttcatctctcttgcctttttattctctgagaaggtccctaaaattgtagttaatgctgctttattattatgttcagtgacttaacttcaatgtgtatctaatatcactgaacagtaactagggtccgaacatttgctcattaactcctgaaagtagtctgttgtgatacgtcaccaaacaaaggtttcaaatgtagaagcatgaaaggttctttaattatttgatgtgaattagttaaaagttccttgaaattttattttggatgatcttaactcacttttttctaatgaaatttttgctttcaactggtagtaactggtcctgggcattcagatttttatatttatgtatgtatgcaagatacactattctcttttgagaaaatgttgtcttagctaatttctgggatttgtgaaaggaaatgtaatatgttaatagctattattggcactctatgttacaatattaaggatctaaatagattcccacttagccacgatgcttttcttaagcataattcatctctacgtaaatatcccatatgaaagaaaatttagagccctccatttaaaaaagctttcttgctctgcataaaacttgaaaataattaatttcaaagttatattgatattaaaacatagattcagtcttgtcttaaaagtgtattacaatttatttcttgccatttttgtgtaaaatttacagaaagagtgttacaccgtgcgctccaaagtaccacaaagcctgctccacacctggatggggtgcatgtagtctttggactggttatttctggttttgaagtaatcgaacaaattgaaaatctgaagaccgatgctgcaagcagaccatatgcagatgtgcgagttattgactgtggagtacttgccacaaaatcaataaaagatgtttttgagaaaaaaaggaagaaaccaactcattcagaaggctcggattcctcttccaattcctcctcttcttcagaatcatcttcagaaagtgaacttgaacatgagagaagcagaaggaggaaacataagaggaggccaaaagttaaacgttctaaaaagaggcgaaaggaagcaagcagttcagaagagccaaggaataaacatgcaatgaacccaaaaggtcactctgagaggagtgataccaatgaaaaaaggtcagttgattccagtgctaaaagggaaaaacctgtggtccgcccagaagagattcctccagtgcctgagaaccgatttttactgagaagagatatgcctgttgttactgcagaacctgaaccgaagattcctgatgttgcacccattgtaagtgatcagaaaccatctgtatcaaagtctggacggaagattaaaggaaggggcacaattcgctatcacacacctccaagatcaagatcctgttctgagtcagatgatgatgacagcagtgaaactcctcctcactggaaagaggaaatgcagagattaagagcatatagaccacctagtggagaaaaatggagtaaaggagataagttaagtgacccctgttcaagccgatgggatgaaagaagcttgtctcagagatccagatcatggtcctataatggatattattcagaccttagtacagcaagacactctggccaccataaaaaacgcagaaaagaaaaaaaggttaagcataaaaagaaagggaaaaagcagaaacactgcagaagacacaaacaaacaaagaagagaaggattcttataccgtctgacatagaatcctcaaaatcttccactcgaagaatgaaatcctcttgtgatagagaaaggagttctcgttcttcctcattgtcatctcatcactcatcaaagagagactggtctaaatctgataaggatgtccagagctctttaacccattccagcagagactcatacagatcaaaatctcactcacagtcttattctagaggaagctcaagatcaaggactgcgtcaaagtcctcatcacattctcgaagtagatcaaagtccagatctagttccaagtctgggcaccgaaagagagcatcaaaatcaccaagaaaaacagcttctcagttaagtgaaaataaaccagttaaaacagaacctttaagagcaaccatggcacaaaatgaaaatgtagtagtacaaccagttgtagcagaaaatattcctgtaataccactgagtgacagtccccccccttcaagatggaagcctggacagaaaccttggaagccctcttatgagcgaattcaggaaatgaaagctaaaacaacccatttgctacccatccaaagcacttacagtttagcaaatattaaagagactggtagctcatcatcctaccataaaagagaaaaaaattcggaaagtgatcagagcacttattcaaaatacagtgatagaagttcagaaagctcaccaaggtcaaggagcagatcttctaggagtagatcttattccagatcatatacaagatcacgtagtctagctagttcacattcaaggtctaggtctccatcatctagatctcattcacgaaataaatacagtgatcattcacagtgtagtagatcatcttcatatacttctattagcagtgatgatggaaggcgagctaagaggagacttagatccagtgggaaaaaaaatagcgtttcacataaaaagcatagcagcagctctgaaaagacacttcacagtaaatatgtcaaaggtagagacaggtcttcatgtgtgagaaagtatagcgagagcagatcatctttagattattcttcagacagtgagcagtcaagtgttcaggccacacagtcagcccaggaaaaagagaagcagggccaaatggaaagaacacataataaacaagaaaaaaacagaggtgaagaaaaatccaagtctgaacgggaatgccctcattcaaaaaaaagaactttgaaagagaatctttctgatcaccttagaaatggcagtaagcccaaaaggaagaattatgctggtagtaaatgggactctgagtcaaattcagaacgagatgtcactaaaaacagtaaaaatgactcccatccatcctctgacaaggaagaaggtgaggccacatccgattctgaatcagaggttagtgaaattcacatcaaagtcaaacccacaaccaagtcgtccacaaatacttcactgcctgatgataatggtgcttggaaatcaagcaaacagcgcacatcaacttctgactctgaggggtcctgttccaattcggaaaacaataggggaaagccacaaaagcacaaacatgggtcaaaggaaaatcttaaaagagaacacaccaaaaaagtgaaagagaaattgaaagggaaaaaagacaaaaagcataaggctccaaaacgaaagcaagcatttcactggcagcctccactagaatttggtgaagaggaggaggaggagattgatgacaagcaagttactcaggaatcaaaagagaaaaaagtttctgaaaacaatgaaaccataaaagataatattctaaaaactgagaaatccagtgaagaggacctttcaggtaaacatgatacagtgactgtttcatcagatcttgatcagtttactaaagatgatagtaaactcagtatttctcccacagctttaaatactgaggaaaatgtggcctgtttacaaaacattcagcacgttgaagaaagtgttcccaatggagtggaagatgtgcttcaaacagatgacaacatggagatctgcactcctgataggagttccccagcaaaagtagaggagacttcccctctaggaaatgcacggcttgataccccagatataaacattgttttgaagcaggatatggcaacggaacatcctcaagcagaggtagtaaaacaggaaagcagcatgtccgaaagtaaagtgttgggtgaagtggggaaacaggacagcagctctgctagcttggctagtgctggagaaagtaccgggaagaaggaggtggctgagaagagccagatcaacctcattgataagaaatggaagcccctgcaaggtgtggggaacctggcagcacctaatgctgccacatccagtgctgtggaagttaaggtgttgaccactgtgcctgaaatgaaaccacaaggcttgagaatagaaattaaaagcaaaaataaagttcggcctgggtctctctttgatgaagtaagaaagacagcacgcttaaaccgtagaccaagaaatcaggagagttcaagtgatgagcagacgcctagtcgggatgatgatagccagtccaggagtccaagtagatctcgaagtaaatctgaaaccaaatcaagacacagaacaaggtctgtctcctatagtcactcaagaagtcgatcgagaagttccacatcatcttatcgatcaagaagctactctagaagtcggagcagaggatggtacagcagaggccgaaccagaagccggagcagttcctaccggagttacaaaagtcacaggacgtccagcaggagcagatccaggagcagctcatatgatccccacagtcgatccaggtcctacacctacgatagctactatagcaggagtcggagtcgaagtagaagccagagaagtgacagttaccaccgaggcagaagttataatcggcggtccaggagttgtagatcttatggctctgacagtgaaagtgaccgaagttactctcatcaccggagccccagtgagagcagcagatacagttgaaaacgtccggatacaaattatatcttatttgtaaatatctggcaacttagcttaagaaatgtaatgacagtctgttgttctatttcaatatcagaggtgaatttcaaaaatagacacttcttaattgttactggttcatttacatgtggggagaagaatttaaaatacagatatgtctcctaaaaatatttttatgccacattttacagtagccaactatggaaatgaatttcattttcttgaatcaagaaatcgtgaaatttatctatgtataatttgcaatattattttaagtctatttcactctatcttacgtatcccttagaatacagattctttttgcctgtttttccagttttagcatatatgctgccaagcatagaactgtgaaggagaactgttaaaggcggccaaatatttatatactgattacatagagtcttgtacatatgtgctctaaaaacaaaccacccagaattgatactgttggtaaccaggagtataaggcagtggctctggggttcttaattcattcctaacttctttgatacttcacaggattaggaaagtggtcatcatacatcccacacagtctgtattacttcaggcttgtgggcaaggttaggaagaatcaatcagccttaactataaatacctgcactgtctctgaggacttactattttatgttctttttaatcaataccgatcagaagtttaggttataaaaacaattctacttcatgctttggtgcttggtaatttttggtgcgtctttaagcattactcttatatatcatatattaaaataccataaaaatgaaattcagacaaaatcactggcaccaaaaatggtttattctgagctgtcttcactttgactatttggggggcttctctcaagtacagatgtgggttggggtcccctggagcaggcaggattggcagtaagagatattggccactcaagtctactgtgtgtgtgtgcctctggaagagtgaagaatggacttcaaaagtaacatcaaaaatctaactgccaccatcctggagacattttgcagggctttcctttcaagtctttcaagtacaggatattaccacaacagcagctgaactgttgtaaccagcatgtttttcctatttccactgtgacctgcagctgactcaaagccttgcgtgacctgacccaggtgcaagagacaggggaagagggatagagggtatagcataaattacatattttcatggctttgggtggttcctccaaaaataattggacctgtaaaaactagtgtgtgtgtgtgtgtgtgtgtgtgtgtgtgtgtggtttttttttttaatctttactttgaatttgttccccaagtgtacttaatcaccttagtgccagtttaatccagttatgcagaagaaattcatattggttgcctgatgtagagctcagcaccaccctaccacaggccttgtctggtgtatttgggaagtggaaaagagccctcagttggagggagctgacaacccttggtggagggagggtgcccttgaatgtattaaaactatcacccaaagaaggtatgaaaacagggtaaggtggtcagttgtttgccaggtcaatagacagaaagtacattagaaaacaggacttaggccaaacaaacaatactggatactgaatacaaaacagtatgatttatattaaaggtttccaaaggttgcctgcaaaggagaatattactactagtcagcaggaaaaaaatgcattcagaacccaagcagaaactgccaaatgtaattaggttaagaaaagttacccttgggcagtgtattagttttctattgctgtgtgacaaattaccccaaatttagcagtttaaaaaacaatacccatagcagttctgtagctcatgagtctggcacagtgtggctggattctctgctcagggtcttaaaggctgaaataagggttggcaggacaacattccttcatggaggctctggggaagaatctgcttctaagttcattcaggttgttggcggaattcagttctttgctggctctcagctggaggcccctctctcacctcaaggctgcctgcattccttcttatgtggtcccctccagcttcaaaccagccttcctgctctttctcatgcttcatatctctctcccgtcctcctgttttaggggcatatgattagctcaagcccacagatatattttaaggttgattgtgcgatagaacataattgcaggagtactgtctcatctcatcatattcacgggttctggagattagctcattgaaagtgggaggggcattttcaaattctgcctaccacaggcaataactgcccatctcagctgtaggtggaatttttacccagaaaagataggccctagaagcctcatttcttttctccatggaaaaggacagccctctgctgcagcgttcaacttgtgtgtttactgacagagtgaactacagaaatagcttttcttcctaaaggggattgttctacattttgaagttattttttaataaaattgaattatgttgtgtattgtgcttcttaataggaaatgcattattggactgtttttgtaacatcctgtttattgcaaatagctagtatcgttcaaaaactgtataaaatacttttgtacatattagcaatgtctaatttgtatacacttcagttaaatttccctaaaacttgaaaggggaccttgtagaaattaaaatatatacttagtctaa

SEQ ID NO: 361789 - DNA, 6615 bp, Homo sapiens
ggtttttttttttaagtgttttgttttgttgttttggagttgagagtaactttaatttttatgtgtattcatgctgtgtatttatggctacaagtcaaactgatttcatatgtatgcatacatatagtctaatagagatgattgtaattcattataatcttgagttttttaaattagtaagatggctactattgctgttttggggtttttaaggttagatatatatcatgtttaactttttcccctatctttttatctttacttctttgttctctacatgctgtgtttaaacctttctgctctcttcacctgaacacatcgtgtttgacatcatctttgtgttgatgtttattacatagtaccacaaagcctgctccacacctggatggggtgcatgtagtctttggactggttatttctggttttgaagtaatcgaacaaattgaaaatctgaagaccgatgctgcaagcagaccatatgcagatgtgcgagttattgactgtggagtacttgccacaaaatcaataaaagatgtttttgagaaaaaaaggaagaaaccaactcattcagaaggctcggattcctcttccaattcctcctcttcttcagaatcatcttcagaaagtgaacttgaacatgagagaagcagaaggaggaaacataagaggaggccaaaagttaaacgttctaaaaagaggcgaaaggaagcaagcagttcagaagagccaaggaataaacatgcaatgaacccaaaaggtcactctgagaggagtgataccaatgaaaaaaggtcagttgattccagtgctaaaagggaaaaacctgtggtccgcccagaagagattcctccagtgcctgagaaccgatttttactgagaagagatatgcctgttgttactgcagaacctgaaccgaagattcctgatgttgcacccattgtaagtgatcagaaaccatctgtatcaaagtctggacggaagattaaaggaaggggcacaattcgctatcacacacctccaagatcaagatcctgttctgagtcagatgatgatgacagcagtgaaactcctcctcactggaaagaggaaatgcagagattaagagcatatagaccacctagtggagaaaaatggagtaaaggagataagttaagtgacccctgttcaagccgatgggatgaaagaagcttgtctcagagatccagatcatggtcctataatggatattattcagaccttagtacagcaagacactctggccaccataaaaaacgcagaaaagaaaaaaaggttaagcataaaaagaaagggaaaaagcagaaacactgcagaagacacaaacaaacaaagaagagaaggattcttataccgtctgacatagaatcctcaaaatcttccactcgaagaatgaaatcctcttgtgatagagaaaggagttctcgttcttcctcattgtcatctcatcactcatcaaagagagactggtctaaatctgataaggatgtccagagctctttaacccattccagcagagactcatacagatcaaaatctcactcacagtcttattctagaggaagctcaagatcaaggactgcgtcaaagtcctcatcacattctcgaagtagatcaaagtccagatctagttccaagtctgggcaccgaaagagagcatcaaaatcaccaagaaaaacagcttctcagttaagtgaaaataaaccagttaaaacagaacctttaagagcaaccatggcacaaaatgaaaatgtagtagtacaaccagttgtagcagaaaatattcctgtaataccactgagtgacagtccccccccttcaagatggaagcctggacagaaaccttggaagccctcttatgagcgaattcaggaaatgaaagctaaaacaacccatttgctacccatccaaagcacttacagtttagcaaatattaaagagactggtagctcatcatcctaccataaaagagaaaaaaattcggaaagtgatcagagcacttattcaaaatacagtgatagaagttcagaaagctcaccaaggtcaaggagcagatcttctaggagtagatcttattccagatcatatacaagatcacgtagtctagctagttcacattcaaggtctaggtctccatcatctagatctcattcacgaaataaatacagtgatcattcacagtgtagtagatcatcttcatatacttctattagcagtgatgatggaaggcgagctaagaggagacttagatccagtgggaaaaaaaatagcgtttcacataaaaagcatagcagcagctctgaaaagacacttcacagtaaatatgtcaaaggtagagacaggtcttcatgtgtgagaaagtatagcgagagcagatcatctttagattattcttcagacagtgagcagtcaagtgttcaggccacacagtcagcccaggaaaaagagaagcagggccaaatggaaagaacacataataaacaagaaaaaaacagaggtgaagaaaaatccaagtctgaacgggaatgccctcattcaaaaaaaagaactttgaaagagaatctttctgatcaccttagaaatggcagtaagcccaaaaggaagaattatgctggtagtaaatgggactctgagtcaaattcagaacgagatgtcactaaaaacagtaaaaatgactcccatccatcctctgacaaggaagaaggtgaggccacatccgattctgaatcagaggttagtgaaattcacatcaaagtcaaacccacaaccaagtcgtccacaaatacttcactgcctgatgataatggtgcttggaaatcaagcaaacagcgcacatcaacttctgactctgaggggtcctgttccaattcggaaaacaataggggaaagccacaaaagcacaaacatgggtcaaaggaaaatcttaaaagagaacacaccaaaaaagtgaaagagaaattgaaagggaaaaaagacaaaaagcataaggctccaaaacgaaagcaagcatttcactggcagcctccactagaatttggtgaagaggaggaggaggagattgatgacaagcaagttactcaggaatcaaaagagaaaaaagtttctgaaaacaatgaaaccataaaagataatattctaaaaactgagaaatccagtgaagaggacctttcaggtaaacatgatacagtgactgtttcatcagatcttgatcagtttactaaagatgatagtaaactcagtatttctcccacagctttaaatactgaggaaaatgtggcctgtttacaaaacattcagcacgttgaagaaagtgttcccaatggagtggaagatgtgcttcaaacagatgacaacatggagatctgcactcctgataggagttccccagcaaaagtagaggagacttcccctctaggaaatgcacggcttgataccccagatataaacattgttttgaagcaggatatggcaacggaacatcctcaagcagaggtagtaaaacaggaaagcagcatgtccgaaagtaaagtgttgggtgaagtggggaaacaggacagcagctctgctagcttggctagtgctggagaaagtaccgggaagaaggaggtggctgagaagagccagatcaacctcattgataagaaatggaagcccctgcaaggtgtggggaacctggcagcacctaatgctgccacatccagtgctgtggaagttaaggtgttgaccactgtgcctgaaatgaaaccacaaggcttgagaatagaaattaaaagcaaaaataaagttcggcctgggtctctctttgatgaagtaagaaagacagcacgcttaaaccgtagaccaagaaatcaggagagttcaagtgatgagcagacgcctagtcgggatgatgatagccagtccaggagtccaagtagatctcgaagtaaatctgaaaccaaatcaagacacagaacaaggtctgtctcctatagtcactcaagaagtcgatcgagaagttccacatcatcttatcgatcaagaagctactctagaagtcggagcagaggatggtacagcagaggccgaaccagaagccggagcagttcctaccggagttacaaaagtcacaggacgtccagcaggagcagatccaggagcagctcatatgatccccacagtcgatccaggtcctacacctacgatagctactatagcaggagtcggagtcgaagtagaagccagagaagtgacagttaccaccgaggcagaagttataatcggcggtccaggagttgtagatcttatggctctgacagtgaaagtgaccgaagttactctcatcaccggagccccagtgagagcagcagatacagttgaaaacgtccggatacaaattatatcttatttgtaaatatctggcaacttagcttaagaaatgtaatgacagtctgttgttctatttcaatatcagaggtgaatttcaaaaatagacacttcttaattgttactggttcatttacatgtggggagaagaatttaaaatacagatatgtctcctaaaaatatttttatgccacattttacagtagccaactatggaaatgaatttcattttcttgaatcaagaaatcgtgaaatttatctatgtataatttgcaatattattttaagtctatttcactctatcttacgtatcccttagaatacagattctttttgcctgtttttccagttttagcatatatgctgccaagcatagaactgtgaaggagaactgttaaaggcggccaaatatttatatactgattacatagagtcttgtacatatgtgctctaaaaacaaaccacccagaattgatactgttggtaaccaggagtataaggcagtggctctggggttcttaattcattcctaacttctttgatactttcaagtctttcaagtacaggatattaccacaacagcagctgaactgttgtaaccagcatgtttttcctatttccactgtgacctgcagctgactcaaagccttgcgtgacctgacccaggtgcaagagacaggggaagagggatagagggtatagcataaattacatattttcatggctttgggtggttcctccaaaaataattggacctgtaaaaactagtgtgtgtgtgtgtgtgtgtgtgtgtgtgtgtgtggtttttttttttaatctttactttgaatttgttccccaagtgtacttaatcaccttagtgccagtttaatccagttatgcagaagaaattcatattggttgcctgatgtagagctcagcaccaccctaccacaggccttgtctggtgtatttgggaagtggaaaagagccctcagttggagggagctgacaacccttggtggagggagggtgcccttgaatgtattaaaactatcacccaaagaaggtatgaaaacagggtaaggtggtcagttgtttgccaggtcaatagacagaaagtacattagaaaacaggacttaggccaaacaaacaatactggatactgaatacaaaacagtatgatttatattaaaggtttccaaaggttgcctgcaaaggagaatattactactagtcagcaggaaaaaaatgcattcagaacccaagcagaaactgccaaatgtaattaggttaagaaaagttacccttgggcagtgtattagttttctattgctgtgtgacaaattaccccaaatttagcagtttaaaaaacaatacccatagcagttctgtagctcatgagtctggcacagtgtggctggattctctgctcagggtcttaaaggctgaaataagggttggcaggacaacattccttcatggaggctctggggaagaatctgcttctaagttcattcaggttgttggcggaattcagttctttgctggctctcagctggaggcccctctctcacctcaaggctgcctgcattccttcttatgtggtcccctccagcttcaaaccagccttcctgctctttctcatgcttcatatctctctcccgtcctcctgttttaggggcatatgattagctcaagcccacagatatattttaaggttgattgtgcgatagaacataattgcaggagtactgtctcatctcatcatattcacgggttctggagattagctcattgaaagtgggaggggcattttcaaattctgcctaccacaggcaataactgcccatctcagctgtaggtggaatttttacccagaaaagataggccctagaagcctcatttcttttctccatggaaaaggacagccctctgctgcagcgttcaacttgtgtgtttactgacagagtgaactacagaaatagcttttcttcctaaaggggattgttctacattttgaagttattttttaataaaattgaattatgttgtgtattgtgcttcttaataggaaatgcattattggactgtttttgtaacatcctgtttattgcaaatagctagtatcgttcaaaaactgtataaaatacttttgtacatattagcaatgtctaatttgtatacacttcagttaaatttccctaaaacttgaaaggggaccttgtagaaattaaaatatatacttagtctaa

SEQ ID NO: 361790 - DNA, 6735 bp, Homo sapiens
gtagagacagggtcttccgctatgttgaccaggctggtctctgactcctgtcctcaagcaatcctcccacctaagacccctaaagtactgggattacaggtgtgagccacaatgcctggcctcctggaactcttaaaataaaaaagttaggatcatttaacaattttcctatcaaaattctagtctttgggtttttcactgggttgatattgttctctttgtgaaaatcatataactcttttgagtgagacttgtaagctatcgttaattatgctgttgttttagtaactaattttatgtgcttttattatgaaatgcaaacattatacattttaatcagtgacttggtttgttctaagtcactctgagaggagtgataccaatgaaaaaaggtcagttgattccagtgctaaaagggaaaaacctgtggtccgcccagaagagattcctccagtgcctgagaaccgatttttactgagaagagatatgcctgttgttactgcagaacctgaaccgaagattcctgatgttgcacccattgtaagtgatcagaaaccatctgtatcaaagtctggacggaagattaaaggaaggggcacaattcgctatcacacacctccaagatcaagatcctgttctgagtcagatgatgatgacagcagtgaaactcctcctcactggaaagaggaaatgcagagattaagagcatatagaccacctagtggagaaaaatggagtaaaggagataagttaagtgacccctgttcaagccgatgggatgaaagaagcttgtctcagagatccagatcatggtcctataatggatattattcagaccttagtacagcaagacactctggccaccataaaaaacgcagaaaagaaaaaaaggttaagcataaaaagaaagggaaaaagcagaaacactgcagaagacacaaacaaacaaagaagagaaggattcttataccgtctgacatagaatcctcaaaatcttccactcgaagaatgaaatcctcttgtgatagagaaaggagttctcgttcttcctcattgtcatctcatcactcatcaaagagagactggtctaaatctgataaggatgtccagagctctttaacccattccagcagagactcatacagatcaaaatctcactcacagtcttattctagaggaagctcaagatcaaggactgcgtcaaagtcctcatcacattctcgaagtagatcaaagtccagatctagttccaagtctgggcaccgaaagagagcatcaaaatcaccaagaaaaacagcttctcagttaagtgaaaataaaccagttaaaacagaacctttaagagcaaccatggcacaaaatgaaaatgtagtagtacaaccagttgtagcagaaaatattcctgtaataccactgagtgacagtccccccccttcaagatggaagcctggacagaaaccttggaagccctcttatgagcgaattcaggaaatgaaagctaaaacaacccatttgctacccatccaaagcacttacagtttagcaaatattaaagagactggtagctcatcatcctaccataaaagagaaaaaaattcggaaagtgatcagagcacttattcaaaatacagtgatagaagttcagaaagctcaccaaggtcaaggagcagatcttctaggagtagatcttattccagatcatatacaagatcacgtagtctagctagttcacattcaaggtctaggtctccatcatctagatctcattcacgaaataaatacagtgatcattcacagtgtagtagatcatcttcatatacttctattagcagtgatgatggaaggcgagctaagaggagacttagatccagtgggaaaaaaaatagcgtttcacataaaaagcatagcagcagctctgaaaagacacttcacagtaaatatgtcaaaggtagagacaggtcttcatgtgtgagaaagtatagcgagagcagatcatctttagattattcttcagacagtgagcagtcaagtgttcaggccacacagtcagcccaggaaaaagagaagcagggccaaatggaaagaacacataataaacaagaaaaaaacagaggtgaagaaaaatccaagtctgaacgggaatgccctcattcaaaaaaaagaactttgaaagagaatctttctgatcaccttagaaatggcagtaagcccaaaaggaagaattatgctggtagtaaatgggactctgagtcaaattcagaacgagatgtcactaaaaacagtaaaaatgactcccatccatcctctgacaaggaagaaggtgaggccacatccgattctgaatcagaggttagtgaaattcacatcaaagtcaaacccacaaccaagtcgtccacaaatacttcactgcctgatgataatggtgcttggaaatcaagcaaacagcgcacatcaacttctgactctgaggggtcctgttccaattcggaaaacaataggggaaagccacaaaagcacaaacatgggtcaaaggaaaatcttaaaagagaacacaccaaaaaagtgaaagagaaattgaaagggaaaaaagacaaaaagcataaggctccaaaacgaaagcaagcatttcactggcagcctccactagaatttggtgaagaggaggaggaggagattgatgacaagcaagttactcaggaatcaaaagagaaaaaagtttctgaaaacaatgaaaccataaaagataatattctaaaaactgagaaatccagtgaagaggacctttcaggtaaacatgatacagtgactgtttcatcagatcttgatcagtttactaaagatgatagtaaactcagtatttctcccacagctttaaatactgaggaaaatgtggcctgtttacaaaacattcagcacgttgaagaaagtgttcccaatggagtggaagatgtgcttcaaacagatgacaacatggagatctgcactcctgataggagttccccagcaaaagtagaggagacttcccctctaggaaatgcacggcttgataccccagatataaacattgttttgaagcaggatatggcaacggaacatcctcaagcagaggtagtaaaacaggaaagcagcatgtccgaaagtaaagtgttgggtgaagtggggaaacaggacagcagctctgctagcttggctagtgctggagaaagtaccgggaagaaggaggtggctgagaagagccagatcaacctcattgataagaaatggaagcccctgcaaggtgtggggaacctggcagcacctaatgctgccacatccagtgctgtggaagttaaggtgttgaccactgtgcctgaaatgaaaccacaaggcttgagaatagaaattaaaagcaaaaataaagttcggcctgggtctctctttgatgaagtaagaaagacagcacgcttaaaccgtagaccaagaaatcaggagagttcaagtgatgagcagacgcctagtcgggatgatgatagccagtccaggagtccaagtagatctcgaagtaaatctgaaaccaaatcaagacacagaacaaggtctgtctcctatagtcactcaagaagtcgatcgagaagttccacatcatcttatcgatcaagaagctactctagaagtcggagcagaggatggtacagcagaggccgaaccagaagccggagcagttcctaccggagttacaaaagtcacaggacgtccagcaggagcagatccaggagcagctcatatgatccccacagtcgatccaggtcctacacctacgatagctactatagcaggagtcggagtcgaagtagaagccagagaagtgacagttaccaccgaggcagaagttataatcggcggtccaggagttgtagatcttatggctctgacagtgaaagtgaccgaagttactctcatcaccggagccccagtgagagcagcagatacagttgaaaacgtccggatacaaattatatcttatttgtaaatatctggcaacttagcttaagaaatgtaatgacagtctgttgttctatttcaatatcagaggtgaatttcaaaaatagacacttcttaattgttactggttcatttacatgtggggagaagaatttaaaatacagatatgtctcctaaaaatatttttatgccacattttacagtagccaactatggaaatgaatttcattttcttgaatcaagaaatcgtgaaatttatctatgtataatttgcaatattattttaagtctatttcactctatcttacgtatcccttagaatacagattctttttgcctgtttttccagttttagcatatatgctgccaagcatagaactgtgaaggagaactgttaaaggcggccaaatatttatatactgattacatagagtcttgtacatatgtgctctaaaaacaaaccacccagaattgatactgttggtaaccaggagtataaggcagtggctctggggttcttaattcattcctaacttctttgatacttcacaggattaggaaagtggtcatcatacatcccacacagtctgtattacttcaggcttgtgggcaaggttaggaagaatcaatcagccttaactataaatacctgcactgtctctgaggacttactattttatgttctttttaatcaataccgatcagaagtttaggttataaaaacaattctacttcatgctttggtgcttggtaatttttggtgcgtctttaagcattactcttatatatcatatattaaaataccataaaaatgaaattcagacaaaatcactggcaccaaaaatggtttattctgagctgtcttcactttgactatttggggggcttctctcaagtacagatgtgggttggggtcccctggagcaggcaggattggcagtaagagatattggccactcaagtctactgtgtgtgtgtgcctctggaagagtgaagaatggacttcaaaagtaacatcaaaaatctaactgccaccatcctggagacattttgcagggctttcctttcaagtctttcaagtacaggatattaccacaacagcagctgaactgttgtaaccagcatgtttttcctatttccactgtgacctgcagctgactcaaagccttgcgtgacctgacccaggtgcaagagacaggggaagagggatagagggtatagcataaattacatattttcatggctttgggtggttcctccaaaaataattggacctgtaaaaactagtgtgtgtgtgtgtgtgtgtgtgtgtgtgtgtgtggtttttttttttaatctttactttgaatttgttccccaagtgtacttaatcaccttagtgccagtttaatccagttatgcagaagaaattcatattggttgcctgatgtagagctcagcaccaccctaccacaggccttgtctggtgtatttgggaagtggaaaagagccctcagttggagggagctgacaacccttggtggagggagggtgcccttgaatgtattaaaactatcacccaaagaaggtatgaaaacagggtaaggtggtcagttgtttgccaggtcaatagacagaaagtacattagaaaacaggacttaggccaaacaaacaatactggatactgaatacaaaacagtatgatttatattaaaggtttccaaaggttgcctgcaaaggagaatattactactagtcagcaggaaaaaaatgcattcagaacccaagcagaaactgccaaatgtaattaggttaagaaaagttacccttgggcagtgtattagttttctattgctgtgtgacaaattaccccaaatttagcagtttaaaaaacaatacccatagcagttctgtagctcatgagtctggcacagtgtggctggattctctgctcagggtcttaaaggctgaaataagggttggcaggacaacattccttcatggaggctctggggaagaatctgcttctaagttcattcaggttgttggcggaattcagttctttgctggctctcagctggaggcccctctctcacctcaaggctgcctgcattccttcttatgtggtcccctccagcttcaaaccagccttcctgctctttctcatgcttcatatctctctcccgtcctcctgttttaggggcatatgattagctcaagcccacagatatattttaaggttgattgtgcgatagaacataattgcaggagtactgtctcatctcatcatattcacgggttctggagattagctcattgaaagtgggaggggcattttcaaattctgcctaccacaggcaataactgcccatctcagctgtaggtggaatttttacccagaaaagataggccctagaagcctcatttcttttctccatggaaaaggacagccctctgctgcagcgttcaacttgtgtgtttactgacagagtgaactacagaaatagcttttcttcctaaaggggattgttctacattttgaagttattttttaataaaattgaattatgttgtgtattgtgcttcttaataggaaatgcattattggactgtttttgtaacatcctgtttattgcaaatagctagtatcgttcaaaaactgtataaaatacttttgtacatattagcaatgtctaatttgtatacacttcagttaaatttccctaaaacttgaaaggggaccttgtagaaattaaaatatatacttagtctaa

SEQ ID NO: 361791 - DNA, 6045 bp, Homo sapiens
gcggccgcctactactactactactgctcgaattcaagcttctaacgatgtacggggacatgtgacaggaagatatcgtgaaataggaccatttacaaccacagaaaaacctctgtatcatggtcctataatggatattattcagaccttagtacagcaagacactctggccaccataaaaaacgcagaaaagaaaaaaaggttaagcataaaaagaaagggaaaaagcagaaacactgcagaagacacaaacaaacaaagaagagaaggattcttataccgtctgacatagaatcctcaaaatcttccactcgaagaatgaaatcctcttgtgatagagaaaggagttctcgttcttcctcattgtcatctcatcactcatcaaagagagactggtctaaatctgataaggatgtccagagctctttaacccattccagcagagactcatacagatcaaaatctcactcacagtcttattctagaggaagctcaagatcaaggactgcgtcaaagtcctcatcacattctcgaagtagatcaaagtccagatctagttccaagtctgggcaccgaaagagagcatcaaaatcaccaagaaaaacagcttctcagttaagtgaaaataaaccagttaaaacagaacctttaagagcaaccatggcacaaaatgaaaatgtagtagtacaaccagttgtagcagaaaatattcctgtaataccactgagtgacagtccccccccttcaagatggaagcctggacagaaaccttggaagccctcttatgagcgaattcaggaaatgaaagctaaaacaacccatttgctacccatccaaagcacttacagtttagcaaatattaaagagactggtagctcatcatcctaccataaaagagaaaaaaattcggaaagtgatcagagcacttattcaaaatacagtgatagaagttcagaaagctcaccaaggtcaaggagcagatcttctaggagtagatcttattccagatcatatacaagatcacgtagtctagctagttcacattcaaggtctaggtctccatcatctagatctcattcacgaaataaatacagtgatcattcacagtgtagtagatcatcttcatatacttctattagcagtgatgatggaaggcgagctaagaggagacttagatccagtgggaaaaaaaatagcgtttcacataaaaagcatagcagcagctctgaaaagacacttcacagtaaatatgtcaaaggtagagacaggtcttcatgtgtgagaaagtatagcgagagcagatcatctttagattattcttcagacagtgagcagtcaagtgttcaggccacacagtcagcccaggaaaaagagaagcagggccaaatggaaagaacacataataaacaagaaaaaaacagaggtgaagaaaaatccaagtctgaacgggaatgccctcattcaaaaaaaagaactttgaaagagaatctttctgatcaccttagaaatggcagtaagcccaaaaggaagaattatgctggtagtaaatgggactctgagtcaaattcagaacgagatgtcactaaaaacagtaaaaatgactcccatccatcctctgacaaggaagaaggtgaggccacatccgattctgaatcagaggttagtgaaattcacatcaaagtcaaacccacaaccaagtcgtccacaaatacttcactgcctgatgataatggtgcttggaaatcaagcaaacagcgcacatcaacttctgactctgaggggtcctgttccaattcggaaaacaataggggaaagccacaaaagcacaaacatgggtcaaaggaaaatcttaaaagagaacacaccaaaaaagtgaaagagaaattgaaagggaaaaaagacaaaaagcataaggctccaaaacgaaagcaagcatttcactggcagcctccactagaatttggtgaagaggaggaggaggagattgatgacaagcaagttactcaggaatcaaaagagaaaaaagtttctgaaaacaatgaaaccataaaagataatattctaaaaactgagaaatccagtgaagaggacctttcaggtaaacatgatacagtgactgtttcatcagatcttgatcagtttactaaagatgatagtaaactcagtatttctcccacagctttaaatactgaggaaaatgtggcctgtttacaaaacattcagcacgttgaagaaagtgttcccaatggagtggaagatgtgcttcaaacagatgacaacatggagatctgcactcctgataggagttccccagcaaaagtagaggagacttcccctctaggaaatgcacggcttgataccccagatataaacattgttttgaagcaggatatggcaacggaacatcctcaagcagaggtagtaaaacaggaaagcagcatgtccgaaagtaaagtgttgggtgaagtggggaaacaggacagcagctctgctagcttggctagtgctggagaaagtaccgggaagaaggaggtggctgagaagagccagatcaacctcattgataagaaatggaagcccctgcaaggtgtggggaacctggcagcacctaatgctgccacatccagtgctgtggaagttaaggtgttgaccactgtgcctgaaatgaaaccacaaggcttgagaatagaaattaaaagcaaaaataaagttcggcctgggtctctctttgatgaagtaagaaagacagcacgcttaaaccgtagaccaagaaatcaggagagttcaagtgatgagcagacgcctagtcgggatgatgatagccagtccaggagtccaagtagatctcgaagtaaatctgaaaccaaatcaagacacagaacaaggtctgtctcctatagtcactcaagaagtcgatcgagaagttccacatcatcttatcgatcaagaagctactctagaagtcggagcagaggatggtacagcagaggccgaaccagaagccggagcagttcctaccggagttacaaaagtcacaggacgtccagcaggagcagatccaggagcagctcatatgatccccacagtcgatccaggtcctacacctacgatagctactatagcaggagtcggagtcgaagtagaagccagagaagtgacagttaccaccgaggcagaagttataatcggcggtccaggagttgtagatcttatggctctgacagtgaaagtgaccgaagttactctcatcaccggagccccagtgagagcagcagatacagttgaaaacgtccggatacaaattatatcttatttgtaaatatctggcaacttagcttaagaaatgtaatgacagtctgttgttctatttcaatatcagaggtgaatttcaaaaatagacacttcttaattgttactggttcatttacatgtggggagaagaatttaaaatacagatatgtctcctaaaaatatttttatgccacattttacagtagccaactatggaaatgaatttcattttcttgaatcaagaaatcgtgaaatttatctatgtataatttgcaatattattttaagtctatttcactctatcttacgtatcccttagaatacagattctttttgcctgtttttccagttttagcatatatgctgccaagcatagaactgtgaaggagaactgttaaaggcggccaaatatttatatactgattacatagagtcttgtacatatgtgctctaaaaacaaaccacccagaattgatactgttggtaaccaggagtataaggcagtggctctggggttcttaattcattcctaacttctttgatacttcacaggattaggaaagtggtcatcatacatcccacacagtctgtattacttcaggcttgtgggcaaggttaggaagaatcaatcagccttaactataaatacctgcactgtctctgaggacttactattttatgttctttttaatcaataccgatcagaagtttaggttataaaaacaattctacttcatgctttggtgcttggtaatttttggtgcgtctttaagcattactcttatatatcatatattaaaataccataaaaatgaaattcagacaaaatcactggcaccaaaaatggtttattctgagctgtcttcactttgactatttggggggcttctctcaagtacagatgtgggttggggtcccctggagcaggcaggattggcagtaagagatattggccactcaagtctactgtgtgtgtgtgcctctggaagagtgaagaatggacttcaaaagtaacatcaaaaatctaactgccaccatcctggagacattttgcagggctttcctttcaagtctttcaagtacaggatattaccacaacagcagctgaactgttgtaaccagcatgtttttcctatttccactgtgacctgcagctgactcaaagccttgcgtgacctgacccaggtgcaagagacaggggaagagggatagagggtatagcataaattacatattttcatggctttgggtggttcctccaaaaataattggacctgtaaaaactagtgtgtgtgtgtgtgtgtgtgtgtgtgtgtgtgtggtttttttttttaatctttactttgaatttgttccccaagtgtacttaatcaccttagtgccagtttaatccagttatgcagaagaaattcatattggttgcctgatgtagagctcagcaccaccctaccacaggccttgtctggtgtatttgggaagtggaaaagagccctcagttggagggagctgacaacccttggtggagggagggtgcccttgaatgtattaaaactatcacccaaagaaggtatgaaaacagggtaaggtggtcagttgtttgccaggtcaatagacagaaagtacattagaaaacaggacttaggccaaacaaacaatactggatactgaatacaaaacagtatgatttatattaaaggtttccaaaggttgcctgcaaaggagaatattactactagtcagcaggaaaaaaatgcattcagaacccaagcagaaactgccaaatgtaattaggttaagaaaagttacccttgggcagtgtattagttttctattgctgtgtgacaaattaccccaaatttagcagtttaaaaaacaatacccatagcagttctgtagctcatgagtctggcacagtgtggctggattctctgctcagggtcttaaaggctgaaataagggttggcaggacaacattccttcatggaggctctggggaagaatctgcttctaagttcattcaggttgttggcggaattcagttctttgctggctctcagctggaggcccctctctcacctcaaggctgcctgcattccttcttatgtggtcccctccagcttcaaaccagccttcctgctctttctcatgcttcatatctctctcccgtcctcctgttttaggggcatatgattagctcaagcccacagatatattttaaggttgattgtgcgatagaacataattgcaggagtactgtctcatctcatcatattcacgggttctggagattagctcattgaaagtgggaggggcattttcaaattctgcctaccacaggcaataactgcccatctcagctgtaggtggaatttttacccagaaaagataggccctagaagcctcatttcttttctccatggaaaaggacagccctctgctgcagcgttcaacttgtgtgtttactgacagagtgaactacagaaatagcttttcttcctaaaggggattgttctacattttgaagttattttttaataaaattgaattatgttgtgtattgtgcttcttaataggaaatgcattattggactgtttttgtaacatcctgtttattgcaaatagctagtatcgttcaaaaactgtataaaatacttttgtacatattagcaatgtctaatttgtatacacttcagttaaatttccctaaaacttgaaaggggaccttgtagaaattaaaatatatacttagtctaa

SEQ ID NO: 361792 - DNA, 7146 bp, Homo sapiens
ggtttttttttttaagtgttttgttttgttgttttggagttgagagtaactttaatttttatgtgtattcatgctgtgtatttatggctacaagtcaaactgatttcatatgtatgcatacatatagtctaatagagatgattgtaattcattataatcttgagttttttaaattagtaagatggctactattgctgttttggggtttttaaggttagatatatatcatgtttaactttttcccctatctttttatctttacttctttgttctctacatgctgtgtttaaacctttctgctctcttcacctgaacacatcgtgtttgacatcatctttgtgttgatgtttattacatagtaccacaaagcctgctccacacctggatggggtgcatgtagtctttggactggttatttctggttttgaagtaatcgaacaaattgaaaatctgaagaccgatgctgcaagcagaccatatgcagatgtgcgagttattgactgtggagtacttgccacaaaatcaataaaagatgtttttgagaaaaaaaggaagaaaccaactcattcagaaggctcggattcctcttccaattcctcctcttcttcagaatcatcttcagaaagtgaacttgaacatgagagaagcagaaggaggaaacataagaggaggccaaaagttaaacgttctaaaaagaggcgaaaggaagcaagcagttcagaagagccaaggaataaacatgcaatgaacccaaaaggtcactctgagaggagtgataccaatgaaaaaaggtcagttgattccagtgctaaaagggaaaaacctgtggtccgcccagaagagattcctccagtgcctgagaaccgatttttactgagaagagatatgcctgttgttactgcagaacctgaaccgaagattcctgatgttgcacccattgtaagtgatcagaaaccatctgtatcaaagtctggacggaagattaaaggaaggggcacaattcgctatcacacacctccaagatcaagatcctgttctgagtcagatgatgatgacagcagtgaaactcctcctcactggaaagaggaaatgcagagattaagagcatatagaccacctagtggagaaaaatggagtaaaggagataagttaagtgacccctgttcaagccgatgggatgaaagaagcttgtctcagagatccagatcatggtcctataatggatattattcagaccttagtacagcaagacactctggccaccataaaaaacgcagaaaagaaaaaaaggttaagcataaaaagaaagggaaaaagcagaaacactgcagaagacacaaacaaacaaagaagagaaggattcttataccgtctgacatagaatcctcaaaatcttccactcgaagaatgaaatcctcttgtgatagagaaaggagttctcgttcttcctcattgtcatctcatcactcatcaaagagagactggtctaaatctgataaggatgtccagagctctttaacccattccagcagagactcatacagatcaaaatctcactcacagtcttattctagaggaagctcaagatcaaggactgcgtcaaagtcctcatcacattctcgaagtagatcaaagtccagatctagttccaagtctgggcaccgaaagagagcatcaaaatcaccaagaaaaacagcttctcagttaagtgaaaataaaccagttaaaacagaacctttaagagcaaccatggcacaaaatgaaaatgtagtagtacaaccagttgtagcagaaaatattcctgtaataccactgagtgacagtccccccccttcaagatggaagcctggacagaaaccttggaagccctcttatgagcgaattcaggaaatgaaagctaaaacaacccatttgctacccatccaaagcacttacagtttagcaaatattaaagagactggtagctcatcatcctaccataaaagagaaaaaaattcggaaagtgatcagagcacttattcaaaatacagtgatagaagttcagaaagctcaccaaggtcaaggagcagatcttctaggagtagatcttattccagatcatatacaagatcacgtagtctagctagttcacattcaaggtctaggtctccatcatctagatctcattcacgaaataaatacagtgatcattcacagtgtagtagatcatcttcatatacttctattagcagtgatgatggaaggcgagctaagaggagacttagatccagtgggaaaaaaaatagcgtttcacataaaaagcatagcagcagctctgaaaagacacttcacagtaaatatgtcaaaggtagagacaggtcttcatgtgtgagaaagtatagcgagagcagatcatctttagattattcttcagacagtgagcagtcaagtgttcaggccacacagtcagcccaggaaaaagagaagcagggccaaatggaaagaacacataataaacaagaaaaaaacagaggtgaagaaaaatccaagtctgaacgggaatgccctcattcaaaaaaaagaactttgaaagagaatctttctgatcaccttagaaatggcagtaagcccaaaaggaagaattatgctggtagtaaatgggactctgagtcaaattcagaacgagatgtcactaaaaacagtaaaaatgactcccatccatcctctgacaaggaagaaggtgaggccacatccgattctgaatcagaggttagtgaaattcacatcaaagtcaaacccacaaccaagtcgtccacaaatacttcactgcctgatgataatggtgcttggaaatcaagcaaacagcgcacatcaacttctgactctgaggggtcctgttccaattcggaaaacaataggggaaagccacaaaagcacaaacatgggtcaaaggaaaatcttaaaagagaacacaccaaaaaagtgaaagagaaattgaaagggaaaaaagacaaaaagcataaggctccaaaacgaaagcaagcatttcactggcagcctccactagaatttggtgaagaggaggaggaggagattgatgacaagcaagttactcaggaatcaaaagagaaaaaagtttctgaaaacaatgaaaccataaaagataatattctaaaaactgagaaatccagtgaagaggacctttcaggtaaacatgatacagtgactgtttcatcagatcttgatcagtttactaaagatgatagtaaactcagtatttctcccacagctttaaatactgaggaaaatgtggcctgtttacaaaacattcagcacgttgaagaaagtgttcccaatggagtggaagatgtgcttcaaacagatgacaacatggagatctgcactcctgataggagttccccagcaaaagtagaggagacttcccctctaggaaatgcacggcttgataccccagatataaacattgttttgaagcaggatatggcaacggaacatcctcaagcagaggtagtaaaacaggaaagcagcatgtccgaaagtaaagtgttgggtgaagtggggaaacaggacagcagctctgctagcttggctagtgctggagaaagtaccgggaagaaggaggtggctgagaagagccagatcaacctcattgataagaaatggaagcccctgcaaggtgtggggaacctggcagcacctaatgctgccacatccagtgctgtggaagttaaggtgttgaccactgtgcctgaaatgaaaccacaaggcttgagaatagaaattaaaagcaaaaataaagttcggcctgggtctctctttgatgaagtaagaaagacagcacgcttaaaccgtagaccaagaaatcaggagagttcaagtgatgagcagacgcctagtcgggatgatgatagccagtccaggagtccaagtagatctcgaagtaaatctgaaaccaaatcaagacacagaacaaggtctgtctcctatagtcactcaagaagtcgatcgagaagttccacatcatcttatcgatcaagaagctactctagaagtcggagcagaggatggtacagcagaggccgaaccagaagccggagcagttcctaccggagttacaaaagtcacaggacgtccagcaggagcagatccaggagcagctcatatgatccccacagtcgatccaggtcctacacctacgatagctactatagcaggagtcggagtcgaagtagaagccagagaagtgacagttaccaccgaggcagaagttataatcggcggtccaggagttgtagatcttatggctctgacagtgaaagtgaccgaagttactctcatcaccggagccccagtgagagcagcagatacagttgaaaacgtccggatacaaattatatcttatttgtaaatatctggcaacttagcttaagaaatgtaatgacagtctgttgttctatttcaatatcagaggtgaatttcaaaaatagacacttcttaattgttactggttcatttacatgtggggagaagaatttaaaatacagatatgtctcctaaaaatatttttatgccacattttacagtagccaactatggaaatgaatttcattttcttgaatcaagaaatcgtgaaatttatctatgtataatttgcaatattattttaagtctatttcactctatcttacgtatcccttagaatacagattctttttgcctgtttttccagttttagcatatatgctgccaagcatagaactgtgaaggagaactgttaaaggcggccaaatatttatatactgattacatagagtcttgtacatatgtgctctaaaaacaaaccacccagaattgatactgttggtaaccaggagtataaggcagtggctctggggttcttaattcattcctaacttctttgatacttcacaggattaggaaagtggtcatcatacatcccacacagtctgtattacttcaggcttgtgggcaaggttaggaagaatcaatcagccttaactataaatacctgcactgtctctgaggacttactattttatgttctttttaatcaataccgatcagaagtttaggttataaaaacaattctacttcatgctttggtgcttggtaatttttggtgcgtctttaagcattactcttatatatcatatattaaaataccataaaaatgaaattcagacaaaatcactggcaccaaaaatggtttattctgagctgtcttcactttgactatttggggggcttctctcaagtacagatgtgggttggggtcccctggagcaggcaggattggcagtaagagatattggccactcaagtctactgtgtgtgtgtgcctctggaagagtgaagaatggacttcaaaagtaacatcaaaaatctaactgccaccatcctggagacattttgcagggctttcctttcaagtctttcaagtacaggatattaccacaacagcagctgaactgttgtaaccagcatgtttttcctatttccactgtgacctgcagctgactcaaagccttgcgtgacctgacccaggtgcaagagacaggggaagagggatagagggtatagcataaattacatattttcatggctttgggtggttcctccaaaaataattggacctgtaaaaactagtgtgtgtgtgtgtgtgtgtgtgtgtgtgtgtgtggtttttttttttaatctttactttgaatttgttccccaagtgtacttaatcaccttagtgccagtttaatccagttatgcagaagaaattcatattggttgcctgatgtagagctcagcaccaccctaccacaggccttgtctggtgtatttgggaagtggaaaagagccctcagttggagggagctgacaacccttggtggagggagggtgcccttgaatgtattaaaactatcacccaaagaaggtatgaaaacagggtaaggtggtcagttgtttgccaggtcaatagacagaaagtacattagaaaacaggacttaggccaaacaaacaatactggatactgaatacaaaacagtatgatttatattaaaggtttccaaaggttgcctgcaaaggagaatattactactagtcagcaggaaaaaaatgcattcagaacccaagcagaaactgccaaatgtaattaggttaagaaaagttacccttgggcagtgtattagttttctattgctgtgtgacaaattaccccaaatttagcagtttaaaaaacaatacccatagcagttctgtagctcatgagtctggcacagtgtggctggattctctgctcagggtcttaaaggctgaaataagggttggcaggacaacattccttcatggaggctctggaagagtgaagaatggacttcaaaagtaacatcaaaaatctaactgccaccatcctggagacattttgcagggctttcctttcaagtctttcaagtacaggatattaccacaacagcagctgaactgttgtaaccagcatgtttttcctatttccactgtgacctgcagctgactcaaagccttgcgtgacctgttttaggggcatatgattagctcaagcccacagatatattttaaggttgattgtgcgatagaacataattgcaggagtactgtctcatctcatcatattcacgggttctggagattagctcattgaaagtgggaggggcattttcaaattctgcctaccacaggcaataactgcccatctcagctgtaggtggaatttttacccagaaaagataggccctagaagcctcatttcttttctccatggaaaaggacagccctctgctgcagcgttcaacttgtgtgtttactgacagagtgaactacagaaatagcttttcttcctaaaggggattgttctacattttgaagttattttttaataaaattgaattatgttgtgtattgtgcttcttaataggaaatgcattattggactgtttttgtaacatcctgtttattgcaaatagctagtatcgttcaaaaactgtataaaatacttttgtacatattagcaatgtctaatttgtatacacttcagttaaatttccctaaaacttgaaaggggaccttgtagaaattaaaatatatacttagtctaa

SEQ ID NO: 361793 - DNA, 3336 bp, Homo sapiens
atcagagattggcagaagcaggaagcagcagaagcaggaagcggcagaagcaggaagcaagcagaagcaggaagcaggcagaagcaggaagcaggcagaagcaggaagcaaggccagtccaggagtccaagtagatctcgaagtaaatctgaaaccaaatcaagacacagaacaaggtctgtctcctatagtcactcaagaagtcgatcgagaagttccacatcatcttatcgatcaagaagctactctagaagtcggagcagaggatggtacagcagaggccgaaccagaagccggagcagttcctaccggagttacaaaagtcacaggacgtccagcaggagcagatccaggagcagctcatatgatccccacagtcgatccaggtcctacacctacgatagctactatagcaggagtcggagtcgaagtagaagccagagaagtgacagttaccaccgaggcagaagttataatcggcggtccaggagttgtagatcttatggctctgacagtgaaagtgaccgaagttactctcatcaccggagccccagtgagagcagcagatacagttgaaaacgtccggatacaaattatatcttatttgtaaatatctggcaacttagcttaagaaatgtaatgacagtctgttgttctatttcaatatcagaggtgaatttcaaaaatagacacttcttaattgttactggttcatttacatgtggggagaagaatttaaaatacagatatgtctcctaaaaatatttttatgccacattttacagtagccaactatggaaatgaatttcattttcttgaatcaagaaatcgtgaaatttatctatgtataatttgcaatattattttaagtctatttcactctatcttacgtatcccttagaatacagattctttttgcctgtttttccagttttagcatatatgctgccaagcatagaactgtgaaggagaactgttaaaggcggccaaatatttatatactgattacatagagtcttgtacatatgtgctctaaaaacaaaccacccagaattgatactgttggtaaccaggagtataaggcagtggctctggggttcttaattcattcctaacttctttgatacttcacaggattaggaaagtggtcatcatacatcccacacagtctgtattacttcaggcttgtgggcaaggttaggaagaatcaatcagccttaactataaatacctgcactgtctctgaggacttactattttatgttctttttaatcaataccgatcagaagtttaggttataaaaacaattctacttcatgctttggtgcttggtaatttttggtgcgtctttaagcattactcttatatatcatatattaaaataccataaaaatgaaattcagacaaaatcactggcaccaaaaatggtttattctgagctgtcttcactttgactatttggggggcttctctcaagtacagatgtgggttggggtcccctggagcaggcaggattggcagtaagagatattggccactcaagtctactgtgtgtgtgtgcctctggaagagtgaagaatggacttcaaaagtaacatcaaaaatctaactgccaccatcctggagacattttgcagggctttcctttcaagtctttcaagtacaggatattaccacaacagcagctgaactgttgtaaccagcatgtttttcctatttccactgtgacctgcagctgactcaaagccttgcgtgacctgacccaggtgcaagagacaggggaagagggatagagggtatagcataaattacatattttcatggctttgggtggttcctccaaaaataattggacctgtaaaaactagtgtgtgtgtgtgtgtgtgtgtgtgtgtgtgtgtggtttttttttttaatctttactttgaatttgttccccaagtgtacttaatcaccttagtgccagtttaatccagttatgcagaagaaattcatattggttgcctgatgtagagctcagcaccaccctaccacaggccttgtctggtgtatttgggaagtggaaaagagccctcagttggagggagctgacaacccttggtggagggagggtgcccttgaatgtattaaaactatcacccaaagaaggtatgaaaacagggtaaggtggtcagttgtttgccaggtcaatagacagaaagtacattagaaaacaggacttaggccaaacaaacaatactggatactgaatacaaaacagtatgatttatattaaaggtttccaaaggttgcctgcaaaggagaatattactactagtcagcaggaaaaaaatgcattcagaacccaagcagaaactgccaaatgtaattaggttaagaaaagttacccttgggcagtgtattagttttctattgctgtgtgacaaattaccccaaatttagcagtttaaaaaacaatacccatagcagttctgtagctcatgagtctggcacagtgtggctggattctctgctcagggtcttaaaggctgaaataagggttggcaggacaacattccttcatggaggctctggggaagaatctgcttctaagttcattcaggttgttggcggaattcagttctttgctggctctcagctggaggcccctctctcacctcaaggctgcctgcattccttcttatgtggtcccctccagcttcaaaccagccttcctgctctttctcatgcttcatatctctctcccgtcctcctgttttaggggcatatgattagctcaagcccacagatatattttaaggttgattgtgcgatagaacataattgcaggagtactgtctcatctcatcatattcacgggttctggagattagctcattgaaagtgggaggggcattttcaaattctgcctaccacaggcaataactgcccatctcagctgtaggtggaatttttacccagaaaagataggccctagaagcctcatttcttttctccatggaaaaggacagccctctgctgcagcgttcaacttgtgtgtttactgacagagtgaactacagaaatagcttttcttcctaaaggggattgttctacattttgaagttattttttaataaaattgaattatgttgtgtattgtgcttcttaataggaaatgcattattggactgtttttgtaacatcctgtttattgcaaatagctagtatcgttcaaaaactgtataaaatacttttgtacatattagcaatgtctaatttgtatacacttcagttaaatttccctaaaacttgaaaggggaccttgtagaaattaaaatatatacttagtctaa

SEQ ID NO: 361794 - DNA, 3119 bp, Homo sapiens
gtgggatttcactgtattttcaccttgatgggcaaataaatgtctagatatttggtatagcctgtcctgccctgatctataagatgatggtccttcatgtgattaatattaggacgtccagcaggagcagatccaggagcagctcatatgatccccacagtcgatccaggtcctacacctacgatagctactatagcaggagtcggagtcgaagtagaagccagagaagtgacagttaccaccgaggcagaagttataatcggcggtccaggagttgtagatcttatggctctgacagtgaaagtgaccgaagttactctcatcaccggagccccagtgagagcagcagatacagttgaaaacgtccggatacaaattatatcttatttgtaaatatctggcaacttagcttaagaaatgtaatgacagtctgttgttctatttcaatatcagaggtgaatttcaaaaatagacacttcttaattgttactggttcatttacatgtggggagaagaatttaaaatacagatatgtctcctaaaaatatttttatgccacattttacagtagccaactatggaaatgaatttcattttcttgaatcaagaaatcgtgaaatttatctatgtataatttgcaatattattttaagtctatttcactctatcttacgtatcccttagaatacagattctttttgcctgtttttccagttttagcatatatgctgccaagcatagaactgtgaaggagaactgttaaaggcggccaaatatttatatactgattacatagagtcttgtacatatgtgctctaaaaacaaaccacccagaattgatactgttggtaaccaggagtataaggcagtggctctggggttcttaattcattcctaacttctttgatacttcacaggattaggaaagtggtcatcatacatcccacacagtctgtattacttcaggcttgtgggcaaggttaggaagaatcaatcagccttaactataaatacctgcactgtctctgaggacttactattttatgttctttttaatcaataccgatcagaagtttaggttataaaaacaattctacttcatgctttggtgcttggtaatttttggtgcgtctttaagcattactcttatatatcatatattaaaataccataaaaatgaaattcagacaaaatcactggcaccaaaaatggtttattctgagctgtcttcactttgactatttggggggcttctctcaagtacagatgtgggttggggtcccctggagcaggcaggattggcagtaagagatattggccactcaagtctactgtgtgtgtgtgcctctggaagagtgaagaatggacttcaaaagtaacatcaaaaatctaactgccaccatcctggagacattttgcagggctttcctttcaagtctttcaagtacaggatattaccacaacagcagctgaactgttgtaaccagcatgtttttcctatttccactgtgacctgcagctgactcaaagccttgcgtgacctgacccaggtgcaagagacaggggaagagggatagagggtatagcataaattacatattttcatggctttgggtggttcctccaaaaataattggacctgtaaaaactagtgtgtgtgtgtgtgtgtgtgtgtgtgtgtgtgtggtttttttttttaatctttactttgaatttgttccccaagtgtacttaatcaccttagtgccagtttaatccagttatgcagaagaaattcatattggttgcctgatgtagagctcagcaccaccctaccacaggccttgtctggtgtatttgggaagtggaaaagagccctcagttggagggagctgacaacccttggtggagggagggtgcccttgaatgtattaaaactatcacccaaagaaggtatgaaaacagggtaaggtggtcagttgtttgccaggtcaatagacagaaagtacattagaaaacaggacttaggccaaacaaacaatactggatactgaatacaaaacagtatgatttatattaaaggtttccaaaggttgcctgcaaaggagaatattactactagtcagcaggaaaaaaatgcattcagaacccaagcagaaactgccaaatgtaattaggttaagaaaagttacccttgggcagtgtattagttttctattgctgtgtgacaaattaccccaaatttagcagtttaaaaaacaatacccatagcagttctgtagctcatgagtctggcacagtgtggctggattctctgctcagggtcttaaaggctgaaataagggttggcaggacaacattccttcatggaggctctggggaagaatctgcttctaagttcattcaggttgttggcggaattcagttctttgctggctctcagctggaggcccctctctcacctcaaggctgcctgcattccttcttatgtggtcccctccagcttcaaaccagccttcctgctctttctcatgcttcatatctctctcccgtcctcctgttttaggggcatatgattagctcaagcccacagatatattttaaggttgattgtgcgatagaacataattgcaggagtactgtctcatctcatcatattcacgggttctggagattagctcattgaaagtgggaggggcattttcaaattctgcctaccacaggcaataactgcccatctcagctgtaggtggaatttttacccagaaaagataggccctagaagcctcatttcttttctccatggaaaaggacagccctctgctgcagcgttcaacttgtgtgtttactgacagagtgaactacagaaatagcttttcttcctaaaggggattgttctacattttgaagttattttttaataaaattgaattatgttgtgtattgtgcttcttaataggaaatgcattattggactgtttttgtaacatcctgtttattgcaaatagctagtatcgttcaaaaactgtataaaatacttttgtacatattagcaatgtctaatttgtatacacttcagttaaatttccctaaaacttgaaaggggaccttgtagaaattaaaatatatacttagtctaa

SEQ ID NO: 361795 - DNA, 5853 bp, Homo sapiens
ggtttttttttttaagtgttttgttttgttgttttggagttgagagtaactttaatttttatgtgtattcatgctgtgtatttatggctacaagtcaaactgatttcatatgtatgcatacatatagtctaatagagatgattgtaattcattataatcttgagttttttaaattagtaagatggctactattgctgttttggggtttttaaggttagatatatatcatgtttaactttttcccctatctttttatctttacttctttgttctctacatgctgtgtttaaacctttctgctctcttcacctgaacacatcgtgtttgacatcatctttgtgttgatgtttattacatagtaccacaaagcctgctccacacctggatggggtgcatgtagtctttggactggttatttctggttttgaagtaatcgaacaaattgaaaatctgaagaccgatgctgcaagcagaccatatgcagatgtgcgagttattgactgtggagtacttgccacaaaatcaataaaagatgtttttgagaaaaaaaggaagaaaccaactcattcagaaggctcggattcctcttccaattcctcctcttcttcagaatcatcttcagaaagtgaacttgaacatgagagaagcagaaggaggaaacataagaggaggccaaaagttaaacgttctaaaaagaggcgaaaggaagcaagcagttcagaagagccaaggaataaacatgcaatgaacccaaaaggtcactctgagaggagtgataccaatgaaaaaaggtcagttgattccagtgctaaaagggaaaaacctgtggtccgcccagaagagattcctccagtgcctgagaaccgatttttactgagaagagatatgcctgttgttactgcagaacctgaaccgaagattcctgatgttgcacccattgtaagtgatcagaaaccatctgtatcaaagtctggacggaagattaaaggaaggggcacaattcgctatcacacacctccaagatcaagatcctgttctgagtcagatgatgatgacagcagtgaaactcctcctcactggaaagaggaaatgcagagattaagagcatatagaccacctagtggagaaaaatggagtaaaggagataagttaagtgacccctgttcaagccgatgggatgaaagaagcttgtctcagagatccagatcatggtcctataatggatattattcagaccttagtacagcaagacactctggccaccataaaaaacgcagaaaagaaaaaaaggttaagcataaaaagaaagggaaaaagcagaaacactgcagaagacacaaacaaacaaagaagagaaggattcttataccgtctgacatagaatcctcaaaatcttccactcgaagaatgaaatcctcttgtgatagagaaaggagttctcgttcttcctcattgtcatctcatcactcatcaaagagagactggtctaaatctgataaggatgtccagagctctttaacccattccagcagagactcatacagatcaaaatctcactcacagtcttattctagaggaagctcaagatcaaggactgcgtcaaagtcctcatcacattctcgaagtagatcaaagtccagatctagttccaagtctgggcaccgaaagagagcatcaaaatcaccaagaaaaacagcttctcagttaagtgaaaataaaccagttaaaacagaacctttaagagcaaccatggcacaaaatgaaaatgtagtagtacaaccagttgtagcagaaaatattcctgtaataccactgagtgacagtccccccccttcaagatggaagcctggacagaaaccttggaagccctcttatgagcgaattcaggaaatgaaagctaaaacaacccatttgctacccatccaaagcacttacagtttagcaaatattaaagagactggtagctcatcatcctaccataaaagagaaaaaaattcggaaagtgatcagagcacttattcaaaatacagtgatagaagttcagaaagctcaccaaggtcaaggagcagatcttctaggagtagatcttattccagatcatatacaagatcacgtagtctagctagttcacattcaaggtctaggtctccatcatctagatctcattcacgaaataaatacagtgatcattcacagtgtagtagatcatcttcatatacttctattagcagtgatgatggaaggcgagctaagaggagacttagatccagtgggaaaaaaaatagcgtttcacataaaaagcatagcagcagctctgaaaagacacttcacagtaaatatgtcaaaggtagagacaggtcttcatgtgtgagaaagtatagcgagagcagatcatctttagattattcttcagacagtgagcagtcaagtgttcaggccacacagtcagcccaggaaaaagagaagcagggccaaatggaaagaacacataataaacaagaaaaaaacagaggtgaagaaaaatccaagtctgaacgggaatgccctcattcaaaaaaaagaactttgaaagagaatctttctgatcaccttagaaatggcagtaagcccaaaaggaagaattatgctggtagtaaatgggactctgagtcaaattcagaacgagatgtcactaaaaacagtaaaaatgactcccatccatcctctgacaaggaagaaggtgaggccacatccgattctgaatcagaggttagtgaaattcacatcaaagtcaaacccacaaccaagtcgtccacaaatacttcactgcctgatgataatggtgcttggaaatcaagcaaacagcgcacatcaacttctgactctgaggggtcctgttccaattcggaaaacaataggggaaagccacaaaagcacaaacatgggtcaaaggaaaatcttaaaagagaacacaccaaaaaagtgaaagagaaattgaaagggaaaaaagacaaaaagcataaggctccaaaacgaaagcaagcatttcactggcagcctccactagaatttggtgaagaggaggaggaggagattgatgacaagcaagttactcaggaatcaaaagagaaaaaagtttctgaaaacaatgaaaccataaaagataatattctaaaaactgagaaatccagtgaagaggacctttcaggtaaacatgatacagtgactgtttcatcagatcttgatcagtttactaaagatgatagtaaactcagtatttctcccacagctttaaatactgaggaaaatgtggcctgtttacaaaacattcagcacgttgaagaaagtgttcccaatggagtggaagatgtgcttcaaacagatgacaacatggagatctgcactcctgataggagttccccagcaaaagtagaggagacttcccctctaggaaatgcacggcttgataccccagatataaacattgttttgaagcaggatatggcaacggaacatcctcaagcagaggtagtaaaacaggaaagcagcatgtccgaaagtaaagtgttgggtgaagtggggaaacaggacagcagctctgctagcttggctagtgctggagaaagtaccgggaagaaggaggtggctgagaagagccagatcaacctcattgataagaaatggaagcccctgcaaggtgtggggaacctggcagcacctaatgctgccacatccagtgctgtggaagttaaggtgttgaccactgtgcctgaaatgaaaccacaaggcttgagaatagaaattaaaagcaaaaataaagttcggcctgggtctctctttgatgaagtaagaaagacagcacgcttaaaccgtagaccaagaaatcaggagagttcaagtgatgagcagacgcctagtcgggatgatgatagccagtccaggagtccaagtagatctcgaagtaaatctgaaaccaaatcaagacacagaacaaggtctgtctcctatagtcactcaagaagtcgatcgagaagttccacatcatcttatcgatcaagaagctactctagaagtcggagcagaggatggtacagcagaggccgaaccagaagccggagcagttcctaccggagttacaaaagtcacaggacgtccagcaggagcagatccaggagcagctcatatgatccccacagtcgatccaggtcctacacctacgatagctactatagcaggagtcggagtcgaagtagaagccagagaagtgacagttaccaccgaggcagaagttataatcggcggtccaggagttgtagatcttatggctctgacagtgaaagtgaccgaagttactctcatcaccggagccccagtgagagcagcagatacagttgaaaacgtccggatacaaattatatcttatttgtaaatatctggcaacttagcttaagaaatgtaatgacagtctgttgttctatttcaatatcagaggtgaatttcaaaaatagacacttcttaattgttactggttcatttacatgtggggagaagaatttaaaatacagatatgtctcctaaaaatatttttatgccacattttacagtagccaactatggaaatgaatttcattttcttgaatcaagaaatcgtgaaatttatctatgtataatttgcaatattattttaagtctatttcactctatcttacgtatcccttagaatacagattctttttgcctgtttttccagttttagcatatatgctgccaagcatagaactgtgaaggagaactgttaaaggcggccaaatatttatatactgattacatagagtcttgtacatatgtgctctaaaaacaaaccacccagaattgatactgttggtaaccaggagtataaggcagtggctctggggttcttaattcattcctaacttctttgatacttcacaggattaggaaagtggtcatcatacatcccacacagtctgtattacttcaggcttgtgggcaaggttaggaagaatcaatcagccttaactataaatacctgcactgtctctgaggacttactattttatgttctttttaatcaataccgatcagaagtttaggttataaaaacaattctacttcatgctttggtgcttggtaatttttggtgcgtctttaagcattactcttatatatcatatattaaaataccataaaaatgaaattcagacaaaatcactggcaccaaaaatggtttattctgagctgtcttcactttgactatttggggggcttctctcaagtacagatgtgggttggggtcccctggagcaggcaggattggcagtaagagatattggccactcaagtctactgtgtgtgtgtgcctctggaagagtgaagaatggacttcaaaagtaacatcaaaaatctaactgccaccatcctggagacattttgcagggctttcctttcaagtctttcaagtacaggatattaccacaacagcagctgaactgttgtaaccagcatgtttttcctatttccactgtgacctgcagctgactcaaagccttgcgtgacctgacccaggtgcaagagacaggggaagagggatagagggtatagcataaattacatattttcatggctttgggtggttcctccaaaaataattggacctgtaaaaactagtgtgtgtgtgtgtgtgtgtgtgtgtgtgtgtgtgtgtgtgtgtgcgtggattgtctgataggtgctccaatgtgatctgtggctccccctgtgtgatctaaacactatgcgaacagtggaacgcggattctgcgaaagatatgcatagtggggtgcctgatgtagaagactggcccgacgctacgg

SEQ ID NO: 361796 - DNA, 5704 bp, Homo sapiens
ggtttttttttttaagtgttttgttttgttgttttggagttgagagtaactttaatttttatgtgtattcatgctgtgtatttatggctacaagtcaaactgatttcatatgtatgcatacatatagtctaatagagatgattgtaattcattataatcttgagttttttaaattagtaagatggctactattgctgttttggggtttttaaggttagatatatatcatgtttaactttttcccctatctttttatctttacttctttgttctctacatgctgtgtttaaacctttctgctctcttcacctgaacacatcgtgtttgacatcatctttgtgttgatgtttattacatagtaccacaaagcctgctccacacctggatggggtgcatgtagtctttggactggttatttctggttttgaagtaatcgaacaaattgaaaatctgaagaccgatgctgcaagcagaccatatgcagatgtgcgagttattgactgtggagtacttgccacaaaatcaataaaagatgtttttgagaaaaaaaggaagaaaccaactcattcagaaggctcggattcctcttccaattcctcctcttcttcagaatcatcttcagaaagtgaacttgaacatgagagaagcagaaggaggaaacataagaggaggccaaaagttaaacgttctaaaaagaggcgaaaggaagcaagcagttcagaagagccaaggaataaacatgcaatgaacccaaaaggtcactctgagaggagtgataccaatgaaaaaaggtcagttgattccagtgctaaaagggaaaaacctgtggtccgcccagaagagattcctccagtgcctgagaaccgatttttactgagaagagatatgcctgttgttactgcagaacctgaaccgaagattcctgatgttgcacccattgtaagtgatcagaaaccatctgtatcaaagtctggacggaagattaaaggaaggggcacaattcgctatcacacacctccaagatcaagatcctgttctgagtcagatgatgatgacagcagtgaaactcctcctcactggaaagaggaaatgcagagattaagagcatatagaccacctagtggagaaaaatggagtaaaggagataagttaagtgacccctgttcaagccgatgggatgaaagaagcttgtctcagagatccagatcatggtcctataatggatattattcagaccttagtacagcaagacactctggccaccataaaaaacgcagaaaagaaaaaaaggttaagcataaaaagaaagggaaaaagcagaaacactgcagaagacacaaacaaacaaagaagagaaggattcttataccgtctgacatagaatcctcaaaatcttccactcgaagaatgaaatcctcttgtgatagagaaaggagttctcgttcttcctcattgtcatctcatcactcatcaaagagagactggtctaaatctgataaggatgtccagagctctttaacccattccagcagagactcatacagatcaaaatctcactcacagtcttattctagaggaagctcaagatcaaggactgcgtcaaagtcctcatcacattctcgaagtagatcaaagtccagatctagttccaagtctgggcaccgaaagagagcatcaaaatcaccaagaaaaacagcttctcagttaagtgaaaataaaccagttaaaacagaacctttaagagcaaccatggcacaaaatgaaaatgtagtagtacaaccagttgtagcagaaaatattcctgtaataccactgagtgacagtccccccccttcaagatggaagcctggacagaaaccttggaagccctcttatgagcgaattcaggaaatgaaagctaaaacaacccatttgctacccatccaaagcacttacagtttagcaaatattaaagagactggtagctcatcatcctaccataaaagagaaaaaaattcggaaagtgatcagagcacttattcaaaatacagtgatagaagttcagaaagctcaccaaggtcaaggagcagatcttctaggagtagatcttattccagatcatatacaagatcacgtagtctagctagttcacattcaaggtctaggtctccatcatctagatctcattcacgaaataaatacagtgatcattcacagtgtagtagatcatcttcatatacttctattagcagtgatgatggaaggcgagctaagaggagacttagatccagtgggaaaaaaaatagcgtttcacataaaaagcatagcagcagctctgaaaagacacttcacagtaaatatgtcaaaggtagagacaggtcttcatgtgtgagaaagtatagcgagagcagatcatctttagattattcttcagacagtgagcagtcaagtgttcaggccacacagtcagcccaggaaaaagagaagcagggccaaatggaaagaacacataataaacaagaaaaaaacagaggtgaagaaaaatccaagtctgaacgggaatgccctcattcaaaaaaaagaactttgaaagagaatctttctgatcaccttagaaatggcagtaagcccaaaaggaagaattatgctggtagtaaatgggactctgagtcaaattcagaacgagatgtcactaaaaacagtaaaaatgactcccatccatcctctgacaaggaagaaggtgaggccacatccgattctgaatcagaggttagtgaaattcacatcaaagtcaaacccacaaccaagtcgtccacaaatacttcactgcctgatgataatggtgcttggaaatcaagcaaacagcgcacatcaacttctgactctgaggggtcctgttccaattcggaaaacaataggggaaagccacaaaagcacaaacatgggtcaaaggaaaatcttaaaagagaacacaccaaaaaagtgaaagagaaattgaaagggaaaaaagacaaaaagcataaggctccaaaacgaaagcaagcatttcactggcagcctccactagaatttggtgaagaggaggaggaggagattgatgacaagcaagttactcaggaatcaaaagagaaaaaagtttctgaaaacaatgaaaccataaaagataatattctaaaaactgagaaatccagtgaagaggacctttcaggtaaacatgatacagtgactgtttcatcagatcttgatcagtttactaaagatgatagtaaactcagtatttctcccacagctttaaatactgaggaaaatgtggcctgtttacaaaacattcagcacgttgaagaaagtgttcccaatggagtggaagatgtgcttcaaacagatgacaacatggagatctgcactcctgataggagttccccagcaaaagtagaggagacttcccctctaggaaatgcacggcttgataccccagatataaacattgttttgaagcaggatatggcaacggaacatcctcaagcagaggtagtaaaacaggaaagcagcatgtccgaaagtaaagtgttgggtgaagtggggaaacaggacagcagctctgctagcttggctagtgctggagaaagtaccgggaagaaggaggtggctgagaagagccagatcaacctcattgataagaaatggaagcccctgcaaggtgtggggaacctggcagcacctaatgctgccacatccagtgctgtggaagttaaggtgttgaccactgtgcctgaaatgaaaccacaaggcttgagaatagaaattaaaagcaaaaataaagttcggcctgggtctctctttgatgaagtaagaaagacagcacgcttaaaccgtagaccaagaaatcaggagagttcaagtgatgagcagacgcctagtcgggatgatgatagccagtccaggagtccaagtagatctcgaagtaaatctgaaaccaaatcaagacacagaacaaggtctgtctcctatagtcactcaagaagtcgatcgagaagttccacatcatcttatcgatcaagaagctactctagaagtcggagcagaggatggtacagcagaggccgaaccagaagccggagcagttcctaccggagttacaaaagtcacaggacgtccagcaggagcagatccaggagcagctcatatgatccccacagtcgatccaggtcctacacctacgatagctactatagcaggagtcggagtcgaagtagaagccagagaagtgacagttaccaccgaggcagaagttataatcggcggtccaggagttgtagatcttatggctctgacagtgaaagtgaccgaagttactctcatcaccggagccccagtgagagcagcagatacagttgaaaacgtccggatacaaattatatcttatttgtaaatatctggcaacttagcttaagaaatgtaatgacagtctgttgttctatttcaatatcagaggtgaatttcaaaaatagacacttcttaattgttactggttcatttacatgtggggagaagaatttaaaatacagatatgtctcctaaaaatatttttatgccacattttacagtagccaactatggaaatgaatttcattttcttgaatcaagaaatcgtgaaatttatctatgtataatttgcaatattattttaagtctatttcactctatcttacgtatcccttagaatacagattctttttgcctgtttttccagttttagcatatatgctgccaagcatagaactgtgaaggagaactgttaaaggcggccaaatatttatatactgattacatagagtcttgtacatatgtgctctaaaaacaaaccacccagaattgatactgttggtaaccaggagtataaggcagtggctctggggttcttaattcattcctaacttctttgatacttcacaggattaggaaagtggtcatcatacatcccacacagtctgtattacttcaggcttgtgggcaaggttaggaagaatcaatcagccttaactataaatacctgcactgtctctgaggacttactattttatgttctttttaatcaataccgatcagaagtttaggttataaaaacaattctacttcatgctttggtgcttggtaatttttggtgcgtctttaagcattactcttatatatcatatattaaaataccataaaaatgaaattcagacaaaatcactggcaccaaaaatggtttattctgagctgtcttcactttgactatttggggggcttctctcaagtacagatgtgggttggggtcccctggagcaggcaggattggcagtaagagatattggccactcaagtctactgtgtgtgtgtgtgtgtgtggtttttttttttaatctttactttgaatttgttccccaagtgtacttaatcaccttagtgccagtttaatccagttatgcagaagaaattcatattggttgcctgatgtagagctcagcaccaccctaccacaggccttgtctggtgtatttgggaagtggaaaagagccctcagttggagggagctgacaacccttggtggagggagggtgcccttgaatgtattaaaactatcacccaaagaaggtatgaaaacagggtaaggtggtcagttgtttgccaggtgatcccaaccagttggctttattaaaggttccaagggtgcttgcaagagaaa

SEQ ID NO: 361797 - DNA, 5678 bp, Homo sapiens
  misc_feature (5665)..(5665): n is a, c, g, or t
ggtttttttttttaagtgttttgttttgttgttttggagttgagagtaactttaatttttatgtgtattcatgctgtgtatttatggctacaagtcaaactgatttcatatgtatgcatacatatagtctaatagagatgattgtaattcattataatcttgagttttttaaattagtaagatggctactattgctgttttggggtttttaaggttagatatatatcatgtttaactttttcccctatctttttatctttacttctttgttctctacatgctgtgtttaaacctttctgctctcttcacctgaacacatcgtgtttgacatcatctttgtgttgatgtttattacatagtaccacaaagcctgctccacacctggatggggtgcatgtagtctttggactggttatttctggttttgaagtaatcgaacaaattgaaaatctgaagaccgatgctgcaagcagaccatatgcagatgtgcgagttattgactgtggagtacttgccacaaaatcaataaaagatgtttttgagaaaaaaaggaagaaaccaactcattcagaaggctcggattcctcttccaattcctcctcttcttcagaatcatcttcagaaagtgaacttgaacatgagagaagcagaaggaggaaacataagaggaggccaaaagttaaacgttctaaaaagaggcgaaaggaagcaagcagttcagaagagccaaggaataaacatgcaatgaacccaaaaggtcactctgagaggagtgataccaatgaaaaaaggtcagttgattccagtgctaaaagggaaaaacctgtggtccgcccagaagagattcctccagtgcctgagaaccgatttttactgagaagagatatgcctgttgttactgcagaacctgaaccgaagattcctgatgttgcacccattgtaagtgatcagaaaccatctgtatcaaagtctggacggaagattaaaggaaggggcacaattcgctatcacacacctccaagatcaagatcctgttctgagtcagatgatgatgacagcagtgaaactcctcctcactggaaagaggaaatgcagagattaagagcatatagaccacctagtggagaaaaatggagtaaaggagataagttaagtgacccctgttcaagccgatgggatgaaagaagcttgtctcagagatccagatcatggtcctataatggatattattcagaccttagtacagcaagacactctggccaccataaaaaacgcagaaaagaaaaaaaggttaagcataaaaagaaagggaaaaagcagaaacactgcagaagacacaaacaaacaaagaagagaaggattcttataccgtctgacatagaatcctcaaaatcttccactcgaagaatgaaatcctcttgtgatagagaaaggagttctcgttcttcctcattgtcatctcatcactcatcaaagagagactggtctaaatctgataaggatgtccagagctctttaacccattccagcagagactcatacagatcaaaatctcactcacagtcttattctagaggaagctcaagatcaaggactgcgtcaaagtcctcatcacattctcgaagtagatcaaagtccagatctagttccaagtctgggcaccgaaagagagcatcaaaatcaccaagaaaaacagcttctcagttaagtgaaaataaaccagttaaaacagaacctttaagagcaaccatggcacaaaatgaaaatgtagtagtacaaccagttgtagcagaaaatattcctgtaataccactgagtgacagtccccccccttcaagatggaagcctggacagaaaccttggaagccctcttatgagcgaattcaggaaatgaaagctaaaacaacccatttgctacccatccaaagcacttacagtttagcaaatattaaagagactggtagctcatcatcctaccataaaagagaaaaaaattcggaaagtgatcagagcacttattcaaaatacagtgatagaagttcagaaagctcaccaaggtcaaggagcagatcttctaggagtagatcttattccagatcatatacaagatcacgtagtctagctagttcacattcaaggtctaggtctccatcatctagatctcattcacgaaataaatacagtgatcattcacagtgtagtagatcatcttcatatacttctattagcagtgatgatggaaggcgagctaagaggagacttagatccagtgggaaaaaaaatagcgtttcacataaaaagcatagcagcagctctgaaaagacacttcacagtaaatatgtcaaaggtagagacaggtcttcatgtgtgagaaagtatagcgagagcagatcatctttagattattcttcagacagtgagcagtcaagtgttcaggccacacagtcagcccaggaaaaagagaagcagggccaaatggaaagaacacataataaacaagaaaaaaacagaggtgaagaaaaatccaagtctgaacgggaatgccctcattcaaaaaaaagaactttgaaagagaatctttctgatcaccttagaaatggcagtaagcccaaaaggaagaattatgctggtagtaaatgggactctgagtcaaattcagaacgagatgtcactaaaaacagtaaaaatgactcccatccatcctctgacaaggaagaaggtgaggccacatccgattctgaatcagaggttagtgaaattcacatcaaagtcaaacccacaaccaagtcgtccacaaatacttcactgcctgatgataatggtgcttggaaatcaagcaaacagcgcacatcaacttctgactctgaggggtcctgttccaattcggaaaacaataggggaaagccacaaaagcacaaacatgggtcaaaggaaaatcttaaaagagaacacaccaaaaaagtgaaagagaaattgaaagggaaaaaagacaaaaagcataaggctccaaaacgaaagcaagcatttcactggcagcctccactagaatttggtgaagaggaggaggaggagattgatgacaagcaagttactcaggaatcaaaagagaaaaaagtttctgaaaacaatgaaaccataaaagataatattctaaaaactgagaaatccagtgaagaggacctttcaggtaaacatgatacagtgactgtttcatcagatcttgatcagtttactaaagatgatagtaaactcagtatttctcccacagctttaaatactgaggaaaatgtggcctgtttacaaaacattcagcacgttgaagaaagtgttcccaatggagtggaagatgtgcttcaaacagatgacaacatggagatctgcactcctgataggagttccccagcaaaagtagaggagacttcccctctaggaaatgcacggcttgataccccagatataaacattgttttgaagcaggatatggcaacggaacatcctcaagcagaggtagtaaaacaggaaagcagcatgtccgaaagtaaagtgttgggtgaagtggggaaacaggacagcagctctgctagcttggctagtgctggagaaagtaccgggaagaaggaggtggctgagaagagccagatcaacctcattgataagaaatggaagcccctgcaaggtgtggggaacctggcagcacctaatgctgccacatccagtgctgtggaagttaaggtgttgaccactgtgcctgaaatgaaaccacaaggcttgagaatagaaattaaaagcaaaaataaagttcggcctgggtctctctttgatgaagtaagaaagacagcacgcttaaaccgtagaccaagaaatcaggagagttcaagtgatgagcagacgcctagtcgggatgatgatagccagtccaggagtccaagtagatctcgaagtaaatctgaaaccaaatcaagacacagaacaaggtctgtctcctatagtcactcaagaagtcgatcgagaagttccacatcatcttatcgatcaagaagctactctagaagtcggagcagaggatggtacagcagaggccgaaccagaagccggagcagttcctaccggagttacaaaagtcacaggacgtccagcaggagcagatccaggagcagctcatatgatccccacagtcgatccaggtcctacacctacgatagctactatagcaggagtcggagtcgaagtagaagccagagaagtgacagttaccaccgaggcagaagttataatcggcggtccaggagttgtagatcttatggctctgacagtgaaagtgaccgaagttactctcatcaccggagccccagtgagagcagcagatacagttgaaaacgtccggatacaaattatatcttatttgtaaatatctggcaacttagcttaagaaatgtaatgacagtctgttgttctatttcaatatcagaggtgaatttcaaaaatagacacttcttaattgttactggttcatttacatgtggggagaagaatttaaaatacagatatgtctcctaaaaatatttttatgccacattttacagtagccaactatggaaatgaatttcattttcttgaatcaagaaatcgtgaaatttatctatgtataatttgcaatattattttaagtctatttcactctatcttacgtatcccttagaatacagattctttttgcctgtttttccagttttagcatatatgctgccaagcatagaactgtgaaggagaactgttaaaggcggccaaatatttatatactgattacatagagtcttgtacatatgtgctctaaaaacaaaccacccagaattgatactgttggtaaccaggagtataaggcagtggctctggggttcttaattcattcctaacttctttgatacttcacaggattaggaaagtggtcatcatacatcccacacagtctgtattacttcaggcttgtgggcaaggttaggaagaatcaatcagccttaactataaatacctgcactgtctctgaggacttactattttatgttctttttaatcaataccgatcagaagtttaggttataaaaacaattctacttcatgctttggtgcttggtaatttttggtgcgtctttaagcattactcttatatatcatatattaaaataccataaaaatgaaattcagacaaaatcactggcaccaaatacagatgtgggttggggtcccctggagcaggcaggattggcagtaagagatattggccactcaagtctactgtgtgtgtgtccgtgtggttttttttttctatctttactttgaatctgctccccatgtgtgcttaagtcccttagcgctagtctaaccacttgatcacggcgacatcatattgccgcctggtgtcccgttcagctaccccctaccacatccctttgctgccgacatcgcactgggtacagagcccctacctctacccgtctcccacacctcatcgtgcgaagctccacccattccttaccctcctttccacaggcccactgacaccagttcccctctccatccctctgcacttcatcaccctgccagcccctttcattcctgtctttcccccctccttacctcctttcctcttcatgccttcttaccactnctcccccttgccc

SEQ ID NO: 361798 - DNA, 3972 bp, Homo sapiens
ggtttttttttttaagtgttttgttttgttgttttggagttgagagtaactttaatttttatgtgtattcatgctgtgtatttatggctacaagtcaaactgatttcatatgtatgcatacatatagtctaatagagatgattgtaattcattataatcttgagttttttaaattagtaagatggctactattgctgttttggggtttttaaggttagatatatatcatgtttaactttttcccctatctttttatctttacttctttgttctctacatgctgtgtttaaacctttctgctctcttcacctgaacacatcgtgtttgacatcatctttgtgttgatgtttattacatagtaccacaaagcctgctccacacctggatggggtgcatgtagtctttggactggttatttctggttttgaagtaatcgaacaaattgaaaatctgaagaccgatgctgcaagcagaccatatgcagatgtgcgagttattgactgtggagtacttgccacaaaatcaataaaagatgtttttgagaaaaaaaggaagaaaccaactcattcagaaggctcggattcctcttccaattcctcctcttcttcagaatcatcttcagaaagtgaacttgaacatgagagaagcagaaggaggaaacataagaggaggccaaaagttaaacgttctaaaaagaggcgaaaggaagcaagcagttcagaagagccaaggaataaacatgcaatgaacccaaaaggtcactctgagaggagtgataccaatgaaaaaaggtcagttgattccagtgctaaaagggaaaaacctgtggtccgcccagaagagattcctccagtgcctgagaaccgatttttactgagaagagatatgcctgttgttactgcagaacctgaaccgaagattcctgatgttgcacccattgtaagtgatcagaaaccatctgtatcaaagtctggacggaagattaaaggaaggggcacaattcgctatcacacacctccaagatcaagatcctgttctgagtcagatgatgatgacagcagtgaaactcctcctcactggaaagaggaaatgcagagattaagagcatatagaccacctagtggagaaaaatggagtaaaggagataagttaagtgacccctgttcaagccgatgggatgaaagaagcttgtctcagagatccagatcatggtcctataatggatattattcagaccttagtacagcaagacactctggccaccataaaaaacgcagaaaagaaaaaaaggttaagcataaaaagaaagggaaaaagcagaaacactgcagaagacacaaacaaacaaagaagagaaggattcttataccgtctgacatagaatcctcaaaatcttccactcgaagaatgaaatcctcttgtgatagagaaaggagttctcgttcttcctcattgtcatctcatcactcatcaaagagagactggtctaaatctgataaggatgtccagagctctttaacccattccagcagagactcatacagatcaaaatctcactcacagtcttattctagaggaagctcaagatcaaggactgcgtcaaagtcctcatcacattctcgaagtagatcaaagtccagatctagttccaagtctgggcaccgaaagagagcatcaaaatcaccaagaaaaacagcttctcagttaagtgaaaataaaccagttaaaacagaacctttaagagcaaccatggcacaaaatgaaaatgtagtagtacaaccagttgtagcagaaaatattcctgtaataccactgagtgacagtccccccccttcaagatggaagcctggacagaaaccttggaagccctcttatgagcgaattcaggaaatgaaagctaaaacaacccatttgctacccatccaaagcacttacagtttagcaaatattaaagagactggtagctcatcatcctaccataaaagagaaaaaaattcggaaagtgatcagagcacttattcaaaatacagtgatagaagttcagaaagctcaccaaggtcaaggagcagatcttctaggagtagatcttattccagatcatatacaagatcacgtagtctagctagttcacattcaaggtctaggtctccatcatctagatctcattcacgaaataaatacagtgatcattcacagtgtagtagatcatcttcatatacttctattagcagtgatgatggaaggcgagctaagaggagacttagatccagtgggaaaaaaaatagcgtttcacataaaaagcatagcagcagctctgaaaagacacttcacagtaaatatgtcaaaggtagagacaggtcttcatgtgtgagaaagtatagcgagagcagatcatctttagattattcttcagacagtgagcagtcaagtgttcaggccacacagtcagcccaggaaaaagagaagcagggccaaatggaaagaacacataataaacaagaaaaaaacagaggtgaagaaaaatccaagtctgaacgggaatgccctcattcaaaaaaaagaactttgaaagagaatctttctgatcaccttagaaatggcagtaagcccaaaaggaagaattatgctggtagtaaatgggactctgagtcaaattcagaacgagatgtcactaaaaacagtaaaaatgactcccatccatcctctgacaaggaagaaggtgaggccacatccgattctgaatcagaggttagtgaaattcacatcaaagtcaaacccacaaccaagtcgtccacaaatacttcactgcctgatgataatggtgcttggaaatcaagcaaacagcgcacatcaacttctgactctgaggggtcctgttccaattcggaaaacaataggggaaagccacaaaagcacaaacatgggtcaaaggaaaatcttaaaagagaacacaccaaaaaagtgaaagagaaattgaaagggaaaaaagacaaaaagcataaggctccaaaacgaaagcaagcatttcactggcagcctccactagaatttggtgaagaggaggaggaggagattgatgacaagcaagttactcaggaatcaaaagagaaaaaagtttctgaaaacaatgaaaccataaaagataatattctaaaaactgagaaatccagtgaagaggacctttcaggtaaacatgatacagtgactgtttcatcagatcttgatcagtttactaaagatgatagtaaactcagtatttctcccacagctttaaatactgaggaaaatgtggcctgtttacaaaacattcagcacgttgaagaaagtgttcccaatggagtggaagatgtgcttcaaacagatgacaacatggagatctgcactcctgataggagttccccagcaaaagtagaggagacttcccctctaggaaatgcacggcttgataccccagatataaacattgttttgaagcaggatatggcaacggaacatcctcaagcagaggtagtaaaacaggaaagcagcatgtccgaaagtaaagtgttgggtgaagtggggaaacaggacagcagctctgctagcttggctagtgctggagaaagtaccgggaagaaggaggtggctgagaagagccagatcaacctcattgataagaaatggaagcccctgcaaggtgtggggaacctggcagcacctaatgctgccacatccagtgctgtggaagttaaggtgttgaccactgtgcctgaaatgaaaccacaaggcttgagaatagaaattaaaagcaaaaataaagttcggcctgggtcttctcaaccacctccttcttcccggtactttctccagcactacccaagcttacagagctctggtcctgtttccccactcacccacactttactttcgacatctgctttcctgtttactacctctgcttgagatgttccgtccatatcccgcataactcgc

SEQ ID NO: 361799 - DNA, 1081 bp, Homo sapiens
gtactctcgcggtatttgtcccgactctcgcggggtttagcgtggcattgggaggcccggcctgggggaggagacggcgttccgttagcggcgttggggtttggctgcagtggcagtgctttctcttctgctcacggggacccgctcaggctggaggccagccagctcttgccgccacctcggtcgcgatgggggcgcaggaccggccgcagtgccacttcgacatcgagatcaaccgggagccggttggtcgcattatgtttcagctcttctcagacatatgtccaaaaacatgcaaaaacttcctttgcttgtgctcaggagagaaaggccttgggaaaacaactgggaagaagttatgttataaaggttctacgttccatcgtgtggttaaaaactttatgattcagggtggggacttcagtgaaggtaatggaaaaggtggagaatcaatttatggtggatattttaaaggtaaggcttaatattttacggtcttttgtttcagttctgatattaaagcaagtttgatcatatacttttaatgagaagaggtttacttatagttcactttttgcatgaaactaatgctgcatgaaaatactttatttgcatgaatttggggataaattatattgtaatatataatttttaattgacaagattaattaaggctaactttatggttaaacatgactttcagcatggaggttaggcaactatatacatgaaactcctatcttcctgcctaaaactgtcaacatattcttttgtttatagagaatgtggtcttttgcaaaatgaaaaggtaagagaacgaagctcagtaacacaaactccaattctgttcccttgcacccttcctaataaatttatggacagtctgggtcaggttgtggctggatttctatattgcttgaagacttggaaaattctgtgtattatttcatacatgcttctgtatcttttttcatttcccaatgggttattaatttcacatcagagaaaagagtctagttgtggggttttttttcccctaaaccaagcaatttctttgaataaaagttgaaatttcgttttt

SEQ ID NO: 361800 - DNA, 382 bp, Homo sapiens
aagctattgcaaaatggcatgtatctttgaattaatagcttaacataatgtgttttcattattaaaaattctagcttctttgcttatttttaattttcatcacaatcttcttttcctaggaagattcctgatgttgcacccattgtaagtgatcagaaaccatctgtatcaaagtctggacggaagattaaaggaaggggcacaattgtatgtgtgataagactttttttgatattatgtatctaataaaaaatttttacctattttcaaagtcctagcgttaattttagatataatacaaaatctgttcaaggaactaattgtattttccatggttatgggaaggtattgctgttagatcaaagtatactgctgtgtttga

SEQ ID NO: 361801 - DNA, 364 bp, Homo sapiens
atggtgttcttgttcataggtatcacccagttaaatgctttcccattacatcttttaaaaaattaaaatgaattacaaaaatagactttctaatttgttagccctgtttctttctcccatttaaatgtgatatatttaacttgcttactatttttttcctatgtattttatttcagttggtcgcattatgtttcagctcttctcagacatatgtccaaaaacatgcaaaaacttcctttgcttgtgctcaggtaagtgaattattatttccaatgagaagctgtggcttacagttttaccttgctgaacagaatagatattttcctggaagaataatggactcgtgaaattagttttgtgaatt

SEQ ID NO: 361802 - DNA, 470 bp, Homo sapiens
gtgggatttcactgtattttcaccttgatgggcaaataaatgtctagatatttggtatagcctgtcctgccctgatctataagatgatggtccttcatgtgattaatattaggacgtccagcaggagcagatccaggagcagctcatatgatccccacagtcgatccaggtatgaacagggattgggaaaccaccagtggggcagaactgaaagatcttgttttgtaaactgtttgttcaaagtggtattttattgagtaactaaatgcatatatttgtctcctgaaaccataccttttctaaatgaggtctgttcgacaagttttatctgttggcccattgtactccagtgtcaaaaatgacaatatcaaattgtaatggcaggtgtttattgaatataattgcctacagagatccaccaggttcaaactaactcgttaactttgtgatatttttcaatgcagaaaaga

SEQ ID NO: 361803 - DNA, 7337 bp, Homo sapiens
gtactctcgcggtatttgtcccgactctcgcggggtttagcgtggcattgggaggcccggcctgggggaggagacggcgttccgttagcggcgttggggtttggctgcagtggcagtgctttctcttctgctcacggggacccgctcaggctggaggccagccagctcttgccgccacctcggtcgcgatgggggcgcaggaccggccgcagtgccacttcgacatcgagatcaaccgggagccggttggtcgcattatgtttcagctcttctcagacatatgtccaaaaacatgcaaaaacttcctttgcttgtgctcaggagagaaaggccttgggaaaacaactgggaagaagttatgttataaaggttctacgttccatcgtgtggttaaaaactttatgattcagggtggggacttcagtgaaggtaatggaaaaggtggagaatcaatttatggtggatattttaaagatgaaaactttattctcaaacatgacagagcgttccttttatcaatggcaaatcgagggaaacataccaatggttcccagtttttcattaccacaaagcctgctccacacctggatggggtgcatgtagtctttggactggttatttctggttttgaagtaatcgaacaaattgaaaatctgaagaccgatgctgcaagcagaccatatgcagatgtgcgagttattgactgtggagtacttgccacaaaatcaataaaagatgtttttgagaaaaaaaggaagaaaccaactcattcagaaggctcggattcctcttccaattcctcctcttcttcagaatcatcttcagaaagtgaacttgaacatgagagaagcagaaggaggaaacataagaggaggccaaaagttaaacgttctaaaaagaggcgaaaggaagcaagcagttcagaagagccaaggaataaacatgcaatgaacccaaaaggtcactctgagaggagtgataccaatgaaaaaaggtcagttgattccagtgctaaaagggaaaaacctgtggtccgcccagaagagattcctccagtgcctgagaaccgatttttactgagaagagatatgcctgttgttactgcagaacctgaaccgaagattcctgatgttgcacccattgtaagtgatcagaaaccatctgtatcaaagtctggacggaagattaaaggaaggggcacaattcgctatcacacacctccaagatcaagatcctgttctgagtcagatgatgatgacagcagtgaaactcctcctcactggaaagaggaaatgcagagattaagagcatatagaccacctagtggagaaaaatggagtaaaggagataagttaagtgacccctgttcaagccgatgggatgaaagaagcttgtctcagagatccagatcatggtcctataatggatattattcagaccttagtacagcaagacactctggccaccataaaaaacgcagaaaagaaaaaaaggttaagcataaaaagaaagggaaaaagcagaaacactgcagaagacacaaacaaacaaagaagagaaggattcttataccgtctgacatagaatcctcaaaatcttccactcgaagaatgaaatcctcttgtgatagagaaaggagttctcgttcttcctcattgtcatctcatcactcatcaaagagagactggtctaaatctgataaggatgtccagagctctttaacccattccagcagagactcatacagatcaaaatctcactcacagtcttattctagaggaagctcaagatcaaggactgcgtcaaagtcctcatcacattctcgaagtagatcaaagtccagatctagttccaagtctgggcaccgaaagagagcatcaaaatcaccaagaaaaacagcttctcagttaagtgaaaataaaccagttaaaacagaacctttaagagcaaccatggcacaaaatgaaaatgtagtagtacaaccagttgtagcagaaaatattcctgtaataccactgagtgacagtccccccccttcaagatggaagcctggacagaaaccttggaagccctcttatgagcgaattcaggaaatgaaagctaaaacaacccatttgctacccatccaaagcacttacagtttagcaaatattaaagagactggtagctcatcatcctaccataaaagagaaaaaaattcggaaagtgatcagagcacttattcaaaatacagtgatagaagttcagaaagctcaccaaggtcaaggagcagatcttctaggagtagatcttattccagatcatatacaagatcacgtagtctagctagttcacattcaaggtctaggtctccatcatctagatctcattcacgaaataaatacagtgatcattcacagtgtagtagatcatcttcatatacttctattagcagtgatgatggaaggcgagctaagaggagacttagatccagtgggaaaaaaaatagcgtttcacataaaaagcatagcagcagctctgaaaagacacttcacagtaaatatgtcaaaggtagagacaggtcttcatgtgtgagaaagtatagcgagagcagatcatctttagattattcttcagacagtgagcagtcaagtgttcaggccacacagtcagcccaggaaaaagagaagcagggccaaatggaaagaacacataataaacaagaaaaaaacagaggtgaagaaaaatccaagtctgaacgggaatgccctcattcaaaaaaaagaactttgaaagagaatctttctgatcaccttagaaatggcagtaagcccaaaaggaagaattatgctggtagtaaatgggactctgagtcaaattcagaacgagatgtcactaaaaacagtaaaaatgactcccatccatcctctgacaaggaagaaggtgaggccacatccgattctgaatcagaggttagtgaaattcacatcaaagtcaaacccacaaccaagtcgtccacaaatacttcactgcctgatgataatggtgcttggaaatcaagcaaacagcgcacatcaacttctgactctgaggggtcctgttccaattcggaaaacaataggggaaagccacaaaagcacaaacatgggtcaaaggaaaatcttaaaagagaacacaccaaaaaagtgaaagagaaattgaaagggaaaaaagacaaaaagcataaggctccaaaacgaaagcaagcatttcactggcagcctccactagaatttggtgaagaggaggaggaggagattgatgacaagcaagttactcaggaatcaaaagagaaaaaagtttctgaaaacaatgaaaccataaaagataatattctaaaaactgagaaatccagtgaagaggacctttcaggtaaacatgatacagtgactgtttcatcagatcttgatcagtttactaaagatgatagtaaactcagtatttctcccacagctttaaatactgaggaaaatgtggcctgtttacaaaacattcagcacgttgaagaaagtgttcccaatggagtggaagatgtgcttcaaacagatgacaacatggagatctgcactcctgataggagttccccagcaaaagtagaggagacttcccctctaggaaatgcacggcttgataccccagatataaacattgttttgaagcaggatatggcaacggaacatcctcaagcagaggtagtaaaacaggaaagcagcatgtccgaaagtaaagtgttgggtgaagtggggaaacaggacagcagctctgctagcttggctagtgctggagaaagtaccgggaagaaggaggtggctgagaagagccagatcaacctcattgataagaaatggaagcccctgcaaggtgtggggaacctggcagcacctaatgctgccacatccagtgctgtggaagttaaggtgttgaccactgtgcctgaaatgaaaccacaaggcttgagaatagaaattaaaagcaaaaataaagttcggcctgggtctctctttgatgaagtaagaaagacagcacgcttaaaccgtagaccaagaaatcaggagagttcaagtgatgagcagacgcctagtcgggatgatgatagccagtccaggagtccaagtagatctcgaagtaaatctgaaaccaaatcaagacacagaacaaggtctgtctcctatagtcactcaagaagtcgatcgagaagttccacatcatcttatcgatcaagaagctactctagaagtcggagcagaggatggtacagcagaggccgaaccagaagccggagcagttcctaccggagttacaaaagtcacaggacgtccagcaggagcagatccaggagcagctcatatgatccccacagtcgatccaggtcctacacctacgatagctactatagcaggagtcggagtcgaagtagaagccagagaagtgacagttaccaccgaggcagaagttataatcggcggtccaggagttgtagatcttatggctctgacagtgaaagtgaccgaagttactctcatcaccggagccccagtgagagcagcagatacagttgaaaacgtccggatacaaattatatcttatttgtaaatatctggcaacttagcttaagaaatgtaatgacagtctgttgttctatttcaatatcagaggtgaatttcaaaaatagacacttcttaattgttactggttcatttacatgtggggagaagaatttaaaatacagatatgtctcctaaaaatatttttatgccacattttacagtagccaactatggaaatgaatttcattttcttgaatcaagaaatcgtgaaatttatctatgtataatttgcaatattattttaagtctatttcactctatcttacgtatcccttagaatacagattctttttgcctgtttttccagttttagcatatatgctgccaagcatagaactgtgaaggagaactgttaaaggcggccaaatatttatatactgattacatagagtcttgtacatatgtgctctaaaaacaaaccacccagaattgatactgttggtaaccaggagtataaggcagtggctctggggttcttaattcattcctaacttctttgatacttcacaggattaggaaagtggtcatcatacatcccacacagtctgtattacttcaggcttgtgggcaaggttaggaagaatcaatcagccttaactataaatacctgcactgtctctgaggacttactattttatgttctttttaatcaataccgatcagaagtttaggttataaaaacaattctacttcatgctttggtgcttggtaatttttggtgcgtctttaagcattactcttatatatcatatattaaaataccataaaaatgaaattcagacaaaatcactggcaccaaaaatggtttattctgagctgtcttcactttgactatttggggggcttctctcaagtacagatgtgggttggggtcccctggagcaggcaggattggcagtaagagatattggccactcaagtctactgtgtgtgtgtgcctctggaagagtgaagaatggacttcaaaagtaacatcaaaaatctaactgccaccatcctggagacattttgcagggctttcctttcaagtctttcaagtacaggatattaccacaacagcagctgaactgttgtaaccagcatgtttttcctatttccactgtgacctgcagctgactcaaagccttgcgtgacctgacccaggtgcaagagacaggggaagagggatagagggtatagcataaattacatattttcatggctttgggtggttcctccaaaaataattggacctgtaaaaactagtgtgtgtgtgtgtgtgtgtgtgtgtgtgtgtgtggtttttttttttaatctttactttgaatttgttccccaagtgtacttaatcaccttagtgccagtttaatccagttatgcagaagaaattcatattggttgcctgatgtagagctcagcaccaccctaccacaggccttgtctggtgtatttgggaagtggaaaagagccctcagttggagggagctgacaacccttggtggagggagggtgcccttgaatgtattaaaactatcacccaaagaaggtatgaaaacagggtaaggtggtcagttgtttgccaggtcaatagacagaaagtacattagaaaacaggacttaggccaaacaaacaatactggatactgaatacaaaacagtatgatttatattaaaggtttccaaaggttgcctgcaaaggagaatattactactagtcagcaggaaaaaaatgcattcagaacccaagcagaaactgccaaatgtaattaggttaagaaaagttacccttgggcagtgtattagttttctattgctgtgtgacaaattaccccaaatttagcagtttaaaaaacaatacccatagcagttctgtagctcatgagtctggcacagtgtggctggattctctgctcagggtcttaaaggctgaaataagggttggcaggacaacattccttcatggaggctctggggaagaatctgcttctaagttcattcaggttgttggcggaattcagttctttgctggctctcagctggaggcccctctctcacctcaaggctgcctgcattccttcttatgtggtcccctccagcttcaaaccagccttcctgctctttctcatgcttcatatctctctcccgtcctcctgttttaggggcatatgattagctcaagcccacagatatattttaaggttgattgtgcgatagaacataattgcaggagtactgtctcatctcatcatattcacgggttctggagattagctcattgaaagtgggaggggcattttcaaattctgcctaccacaggcaataactgcccatctcagctgtaggtggaatttttacccagaaaagataggccctagaagcctcatttcttttctccatggaaaaggacagccctctgctgcagcgttcaacttgtgtgtttactgacagagtgaactacagaaatagcttttcttcctaaaggggattgttctacattttgaagttattttttaataaaattgaattatgttgtgtattgtgcttcttaataggaaatgcattattggactgtttttgtaacatcctgtttattgcaaatagctagtatcgttcaaaaactgtataaaatacttttgtacatattagcaatgtctaatttgtatacacttcagttaaatttccctaaaacttgaaaggggaccttgtagaaattaaaatatatacttagtctaa

SEQ ID NO: 361804 - DNA, 7618 bp, Homo sapiens
gtactctcgcggtatttgtcccgactctcgcggggtttagcgtggcattgggaggcccggcctgggggaggagacggcgttccgttagcggcgttggggtttggctgcagtggcagtgctttctcttctgctcacggggacccgctcaggctggaggccagccagctcttgccgccacctcggtcgcgatgggggcgcaggaccggccgcagtgccacttcgacatcgagatcaaccgggagccggttggtcgcattatgtttcagctcttctcagacatatgtccaaaaacatgcaaaaacttcctttgcttgtgctcaggagagaaaggccttgggaaaacaactgggaagaagttatgttataaaggttctacgttccatcgtgtggttaaaaactttatgattcagggtggggacttcagtgaaggtaatggaaaaggtggagaatcaatttatggtggatattttaaagatgaaaactttattctcaaacatgacagagcgttccttttatcaatggcaaatcgagggaaacataccaatggttcccagtttttcattaccacaaagcctgctccacacctggatggggtgcatgtagtctttggactggttatttctggttttgaagtaatcgaacaaattgaaaatctgaagaccgatgctgcaagcagaccatatgcagatgtgcgagttattgactgtggagtacttgccacaaaatcaataaaagatgtttttgagaaaaaaaggaagaaaccaactcattcagaaggctcggattcctcttccaattcctcctcttcttcagaatcatcttcagaaagtgaacttgaacatgagagaagcagaaggaggaaacataagaggaggccaaaagttaaacgttctaaaaagaggcgaaaggaagcaagcagttcagaagagccaaggaataaacatgcaatgaacccaaaaggtcactctgagaggagtgataccaatgaaaaaaggtcagttgattccagtgctaaaagggaaaaacctgtggtccgcccagaagagattcctccagtgcctgagaaccgatttttactgagaagagatatgcctgttgttactgcagaacctgaaccgaagattcctgatgttgcacccattgtaagtgatcagaaaccatctgtatcaaagtctggacggaagattaaaggaaggggcacaattcgctatcacacacctccaagatcaagatcctgttctgagtcagatgatgatgacagcagtgaaactcctcctcactggaaagaggaaatgcagagattaagagcatatagaccacctagtggagaaaaatggagtaaaggagataagttaagtgacccctgttcaagccgatgggatgaaagaagcttgtctcagagatccagatcatggtcctataatggatattattcagaccttagtacagcaagacactctggccaccataaaaaacgcagaaaagaaaaaaaggttaagcataaaaagaaagggaaaaagcagaaacactgcagaagacacaaacaaacaaagaagagaaggattcttataccgtctgacatagaatcctcaaaatcttccactcgaagaatgaaatcctcttgtgatagagaaaggagttctcgttcttcctcattgtcatctcatcactcatcaaagagagactggtctaaatctgataaggatgtccagagctctttaacccattccagcagagactcatacagatcaaaatctcactcacagtcttattctagaggaagctcaagatcaaggactgcgtcaaagtcctcatcacattctcgaagtagatcaaagtccagatctagttccaagtctgggcaccgaaagagagcatcaaaatcaccaagaaaaacagcttctcagttaagtgaaaataaaccagttaaaacagaacctttaagagcaaccatggcacaaaatgaaaatgtagtagtacaaccagttgtagcagaaaatattcctgtaataccactgagtgacagtccccccccttcaagatggaagcctggacagaaaccttggaagccctcttatgagcgaattcaggaaatgaaagctaaaacaacccatttgctacccatccaaagcacttacagtttagcaaatattaaagagactggtagctcatcatcctaccataaaagagaaaaaaattcggaaagtgatcagagcacttattcaaaatacagtgatagaagttcagaaagctcaccaaggtcaaggagcagatcttctaggagtagatcttattccagatcatatacaagatcacgtagtctagctagttcacattcaaggtctaggtctccatcatctagatctcattcacgaaataaatacagtgatcattcacagtgtagtagatcatcttcatatacttctattagcagtgatgatggaaggcgagctaagaggagacttagatccagtgggaaaaaaaatagcgtttcacataaaaagcatagcagcagctctgaaaagacacttcacagtaaatatgtcaaaggtagagacaggtcttcatgtgtgagaaagtatagcgagagcagatcatctttagattattcttcagacagtgagcagtcaagtgttcaggccacacagtcagcccaggaaaaagagaagcagggccaaatggaaagaacacataataaacaagaaaaaaacagaggtgaagaaaaatccaagtctgaacgggaatgccctcattcaaaaaaaagaactttgaaagagaatctttctgatcaccttagaaatggcagtaagcccaaaaggaagaattatgctggtagtaaatgggactctgagtcaaattcagaacgagatgtcactaaaaacagtaaaaatgactcccatccatcctctgacaaggaagaaggtgaggccacatccgattctgaatcagaggttagtgaaattcacatcaaagtcaaacccacaaccaagtcgtccacaaatacttcactgcctgatgataatggtgcttggaaatcaagcaaacagcgcacatcaacttctgactctgaggggtcctgttccaattcggaaaacaataggggaaagccacaaaagcacaaacatgggtcaaaggaaaatcttaaaagagaacacaccaaaaaagtgaaagagaaattgaaagggaaaaaagacaaaaagcataaggctccaaaacgaaagcaagcatttcactggcagcctccactagaatttggtgaagaggaggaggaggagattgatgacaagcaagttactcaggaatcaaaagagaaaaaagtttctgaaaacaatgaaaccataaaagataatattctaaaaactgagaaatccagtgaagaggacctttcaggtaaacatgatacagtgactgtttcatcagatcttgatcagtttactaaagatgatagtaaactcagtatttctcccacagctttaaatactgaggaaaatgtggcctgtttacaaaacattcagcacgttgaagaaagtgttcccaatggagtggaagatgtgcttcaaacagatgacaacatggagatctgcactcctgataggagttccccagcaaaagtagaggagacttcccctctaggaaatgcacggcttgataccccagatataaacattgttttgaagcaggatatggcaacggaacatcctcaagcagaggtagtaaaacaggaaagcagcatgtccgaaagtaaagtgttgggtgaagtggggaaacaggacagcagctctgctagcttggctagtgctggagaaagtaccgggaagaaggaggtggctgagaagagccagatcaacctcattgataagaaatggaagcccctgcaaggtgtggggaacctggcagcacctaatgctgccacatccagtgctgtggaagttaaggtgttgaccactgtgcctgaaatgaaaccacaaggcttgagaatagaaattaaaagcaaaaataaagttcggcctgggtctctctttgatgaagtaagaaagacagcacgcttaaaccgtagaccaagaaatcaggagagttcaagtgatgagcagacgcctagtcgggatgatgatagccagtccaggagtccaagtagatctcgaagtaaatctgaaaccaaatcaagacacagaacaaggtctgtctcctatagtcactcaagaagtcgatcgagaagttccacatcatcttatcgatcaagaagctactctagaagtcggagcagaggatggtacagcagaggccgaaccagaagccggagcagttcctaccggagttacaaaagtcacaggacgtccagcaggagcagatccaggagcagctcatatgatccccacagtcgatccaggtcctacacctacgatagctactatagcaggagtcggagtcgaagtagaagccagagaagtgacagttaccaccgaggcagaagttataatcggcggtccaggagttgtagatcttatggctctgacagtgaaagtgaccgaagttactctcatcaccggagccccagtgagagcagcagatacagttgaaaacgtccggatacaaattatatcttatttgtaaatatctggcaacttagcttaagaaatgtaatgacagtctgttgttctatttcaatatcagaggtgaatttcaaaaatagacacttcttaattgttactggttcatttacatgtggggagaagaatttaaaatacagatatgtctcctaaaaatatttttatgccacattttacagtagccaactatggaaatgaatttcattttcttgaatcaagaaatcgtgaaatttatctatgtataatttgcaatattattttaagtctatttcactctatcttacgtatcccttagaatacagattctttttgcctgtttttccagttttagcatatatgctgccaagcatagaactgtgaaggagaactgttaaaggcggccaaatatttatatactgattacatagagtcttgtacatatgtgctctaaaaacaaaccacccagaattgatactgttggtaaccaggagtataaggcagtggctctggggttcttaattcattcctaacttctttgatacttcacaggattaggaaagtggtcatcatacatcccacacagtctgtattacttcaggcttgtgggcaaggttaggaagaatcaatcagccttaactataaatacctgcactgtctctgaggacttactattttatgttctttttaatcaataccgatcagaagtttaggttataaaaacaattctacttcatgctttggtgcttggtaatttttggtgcgtctttaagcattactcttatatatcatatattaaaataccataaaaatgaaattcagacaaaatcactggcaccaaaaatggtttattctgagctgtcttcactttgactatttggggggcttctctcaagtacagatgtgggttggggtcccctggagcaggcaggattggcagtaagagatattggccactcaagtctactgtgtgtgtgtgcctctggaagagtgaagaatggacttcaaaagtaacatcaaaaatctaactgccaccatcctggagacattttgcagggctttcctttcaagtctttcaagtacaggatattaccacaacagcagctgaactgttgtaaccagcatgtttttcctatttccactgtgacctgcagctgactcaaagccttgcgtgacctgacccaggtgcaagagacaggggaagagggatagagggtatagcataaattacatattttcatggctttgggtggttcctccaaaaataattggacctgtaaaaactagtgtgtgtgtgtgtgtgtgtgtgtgtgtgtgtgtggtttttttttttaatctttactttgaatttgttccccaagtgtacttaatcaccttagtgccagtttaatccagttatgcagaagaaattcatattggttgcctgatgtagagctcagcaccaccctaccacaggccttgtctggtgtatttgggaagtggaaaagagccctcagttggagggagctgacaacccttggtggagggagggtgcccttgaatgtattaaaactatcacccaaagaaggtatgaaaacagggtaaggtggtcagttgtttgccaggtcaatagacagaaagtacattagaaaacaggacttaggccaaacaaacaatactggatactgaatacaaaacagtatgatttatattaaaggtttccaaaggttgcctgcaaaggagaatattactactagtcagcaggaaaaaaatgcattcagaacccaagcagaaactgccaaatgtaattaggttaagaaaagttacccttgggcagtgtattagttttctattgctgtgtgacaaattaccccaaatttagcagtttaaaaaacaatacccatagcagttctgtagctcatgagtctggcacagtgtggctggattctctgctcagggtcttaaaggctgaaataagggttggcaggacaacattccttcatggaggctctggggaagaatctgcttctaagttcattcaggttgttggcggaattcagttctttgctggctctcagctggaggcccctctctcacctcaaggctgcctgcattccttcttatgtggtcccctccagcttcaaaccagccttcctgctctttctcatgcttcatatctctctcccgtcctcctgttttaggggcatatgattagctcaagcccacagatatattttaaggttgattgtgcgatagaacataattgcaggagtactgtctcatctcatcatattcacgggttctggagattagctcattgaaagtgggaggggcattttcaaattctgcctaccacaggcaataactgcccatctcagctgtaggtggaatttttacccagaaaagataggccctagaagcctcatttcttttctccatggaaaaggacagccctctgctgcagcgttcaacttgtgtgtttactgacagagtgaactacagaaatagcttttcttcctaaaggggattgttctacattttgaagttattttttaataaaattgaattatgttgtgtattgtgcttcttaataggaaatgcattattggactgtttttgtaacatcctgtttattgcaaatagctagtatcgttcaaaaactgtataaaatacttttgtacatattagcaatgtctaatttgtatacacttcagttaaatttccctaaaacttgaaaggggaccttgtagaaattaaaatatatacttagtctaagtctgagtctgttcatgttttatctttctgctgacccagccagtgaagacacctcatctcctttggcagctccttttcttctcctagctgagtgttagtggtgggtgtaggaggtggagctagagagaatgtcaggcagagattttaacctacacaggtaagcattaatgatgtttggtcttcctcccctggaaaatccagatttcctctacactttgttgtcatctagttaaaatgacctgcataaagatgtctttgctgagggaggaatatgtcacatc

SEQ ID NO: 361805 - DNA, 7315 bp, Homo sapiens
taaaaattaaacacctaaaaagattattgaacttcttccatgtatagcacattaggcaagctaattggaaatttggaggaagtaagctagagatttttctaaaattttattagttttccctgaaagttaataatttaaatatcatttagccaaagtatgttactactaaaagtgactgttctaaggctgtttgtgtgaagtattaaatatatgttcttttcctcaaggctttaattagtatcttttggcctttttatgcttttgttatttgattagcttaaatttttcttttctgagtgttcagtcaagttatctgtactgaccagaagaggaatttcatcttttgctttctatttattacttgaacattactttaaagtgacttataattggagactgacaaatttgtgttttcttcaaacagatgaaaactttattctcaaacatgacagagcgttccttttatcaatggcaaatcgagggaaacataccaatggttcccagtttttcataaagagtgttacaccgtgcgctccaaagtaccacaaagcctgctccacacctggatggggtgcatgtagtctttggactggttatttctggttttgaagtaatcgaacaaattgaaaatctgaagaccgatgctgcaagcagaccatatgcagatgtgcgagttattgactgtggagtacttgccacaaaatcaataaaagatgtttttgagaaaaaaaggaagaaaccaactcattcagaaggctcggattcctcttccaattcctcctcttcttcagaatcatcttcagaaagtgaacttgaacatgagagaagcagaaggaggaaacataagaggaggccaaaagttaaacgttctaaaaagaggcgaaaggaagcaagcagttcagaagagccaaggaataaacatgcaatgaacccaaaaggtcactctgagaggagtgataccaatgaaaaaaggtcagttgattccagtgctaaaagggaaaaacctgtggtccgcccagaagagattcctccagtgcctgagaaccgatttttactgagaagagatatgcctgttgttactgcagaacctgaaccgaagattcctgatgttgcacccattgtaagtgatcagaaaccatctgtatcaaagtctggacggaagattaaaggaaggggcacaattcgctatcacacacctccaagatcaagatcctgttctgagtcagatgatgatgacagcagtgaaactcctcctcactggaaagaggaaatgcagagattaagagcatatagaccacctagtggagaaaaatggagtaaaggagataagttaagtgacccctgttcaagccgatgggatgaaagaagcttgtctcagagatccagatcatggtcctataatggatattattcagaccttagtacagcaagacactctggccaccataaaaaacgcagaaaagaaaaaaaggttaagcataaaaagaaagggaaaaagcagaaacactgcagaagacacaaacaaacaaagaagagaaggattcttataccgtctgacatagaatcctcaaaatcttccactcgaagaatgaaatcctcttgtgatagagaaaggagttctcgttcttcctcattgtcatctcatcactcatcaaagagagactggtctaaatctgataaggatgtccagagctctttaacccattccagcagagactcatacagatcaaaatctcactcacagtcttattctagaggaagctcaagatcaaggactgcgtcaaagtcctcatcacattctcgaagtagatcaaagtccagatctagttccaagtctgggcaccgaaagagagcatcaaaatcaccaagaaaaacagcttctcagttaagtgaaaataaaccagttaaaacagaacctttaagagcaaccatggcacaaaatgaaaatgtagtagtacaaccagttgtagcagaaaatattcctgtaataccactgagtgacagtccccccccttcaagatggaagcctggacagaaaccttggaagccctcttatgagcgaattcaggaaatgaaagctaaaacaacccatttgctacccatccaaagcacttacagtttagcaaatattaaagagactggtagctcatcatcctaccataaaagagaaaaaaattcggaaagtgatcagagcacttattcaaaatacagtgatagaagttcagaaagctcaccaaggtcaaggagcagatcttctaggagtagatcttattccagatcatatacaagatcacgtagtctagctagttcacattcaaggtctaggtctccatcatctagatctcattcacgaaataaatacagtgatcattcacagtgtagtagatcatcttcatatacttctattagcagtgatgatggaaggcgagctaagaggagacttagatccagtgggaaaaaaaatagcgtttcacataaaaagcatagcagcagctctgaaaagacacttcacagtaaatatgtcaaaggtagagacaggtcttcatgtgtgagaaagtatagcgagagcagatcatctttagattattcttcagacagtgagcagtcaagtgttcaggccacacagtcagcccaggaaaaagagaagcagggccaaatggaaagaacacataataaacaagaaaaaaacagaggtgaagaaaaatccaagtctgaacgggaatgccctcattcaaaaaaaagaactttgaaagagaatctttctgatcaccttagaaatggcagtaagcccaaaaggaagaattatgctggtagtaaatgggactctgagtcaaattcagaacgagatgtcactaaaaacagtaaaaatgactcccatccatcctctgacaaggaagaaggtgaggccacatccgattctgaatcagaggttagtgaaattcacatcaaagtcaaacccacaaccaagtcgtccacaaatacttcactgcctgatgataatggtgcttggaaatcaagcaaacagcgcacatcaacttctgactctgaggggtcctgttccaattcggaaaacaataggggaaagccacaaaagcacaaacatgggtcaaaggaaaatcttaaaagagaacacaccaaaaaagtgaaagagaaattgaaagggaaaaaagacaaaaagcataaggctccaaaacgaaagcaagcatttcactggcagcctccactagaatttggtgaagaggaggaggaggagattgatgacaagcaagttactcaggaatcaaaagagaaaaaagtttctgaaaacaatgaaaccataaaagataatattctaaaaactgagaaatccagtgaagaggacctttcaggtaaacatgatacagtgactgtttcatcagatcttgatcagtttactaaagatgatagtaaactcagtatttctcccacagctttaaatactgaggaaaatgtggcctgtttacaaaacattcagcacgttgaagaaagtgttcccaatggagtggaagatgtgcttcaaacagatgacaacatggagatctgcactcctgataggagttccccagcaaaagtagaggagacttcccctctaggaaatgcacggcttgataccccagatataaacattgttttgaagcaggatatggcaacggaacatcctcaagcagaggtagtaaaacaggaaagcagcatgtccgaaagtaaagtgttgggtgaagtggggaaacaggacagcagctctgctagcttggctagtgctggagaaagtaccgggaagaaggaggtggctgagaagagccagatcaacctcattgataagaaatggaagcccctgcaaggtgtggggaacctggcagcacctaatgctgccacatccagtgctgtggaagttaaggtgttgaccactgtgcctgaaatgaaaccacaaggcttgagaatagaaattaaaagcaaaaataaagttcggcctgggtctctctttgatgaagtaagaaagacagcacgcttaaaccgtagaccaagaaatcaggagagttcaagtgatgagcagacgcctagtcgggatgatgatagccagtccaggagtccaagtagatctcgaagtaaatctgaaaccaaatcaagacacagaacaaggtctgtctcctatagtcactcaagaagtcgatcgagaagttccacatcatcttatcgatcaagaagctactctagaagtcggagcagaggatggtacagcagaggccgaaccagaagccggagcagttcctaccggagttacaaaagtcacaggacgtccagcaggagcagatccaggagcagctcatatgatccccacagtcgatccaggtcctacacctacgatagctactatagcaggagtcggagtcgaagtagaagccagagaagtgacagttaccaccgaggcagaagttataatcggcggtccaggagttgtagatcttatggctctgacagtgaaagtgaccgaagttactctcatcaccggagccccagtgagagcagcagatacagttgaaaacgtccggatacaaattatatcttatttgtaaatatctggcaacttagcttaagaaatgtaatgacagtctgttgttctatttcaatatcagaggtgaatttcaaaaatagacacttcttaattgttactggttcatttacatgtggggagaagaatttaaaatacagatatgtctcctaaaaatatttttatgccacattttacagtagccaactatggaaatgaatttcattttcttgaatcaagaaatcgtgaaatttatctatgtataatttgcaatattattttaagtctatttcactctatcttacgtatcccttagaatacagattctttttgcctgtttttccagttttagcatatatgctgccaagcatagaactgtgaaggagaactgttaaaggcggccaaatatttatatactgattacatagagtcttgtacatatgtgctctaaaaacaaaccacccagaattgatactgttggtaaccaggagtataaggcagtggctctggggttcttaattcattcctaacttctttgatacttcacaggattaggaaagtggtcatcatacatcccacacagtctgtattacttcaggcttgtgggcaaggttaggaagaatcaatcagccttaactataaatacctgcactgtctctgaggacttactattttatgttctttttaatcaataccgatcagaagtttaggttataaaaacaattctacttcatgctttggtgcttggtaatttttggtgcgtctttaagcattactcttatatatcatatattaaaataccataaaaatgaaattcagacaaaatcactggcaccaaaaatggtttattctgagctgtcttcactttgactatttggggggcttctctcaagtacagatgtgggttggggtcccctggagcaggcaggattggcagtaagagatattggccactcaagtctactgtgtgtgtgtgcctctggaagagtgaagaatggacttcaaaagtaacatcaaaaatctaactgccaccatcctggagacattttgcagggctttcctttcaagtctttcaagtacaggatattaccacaacagcagctgaactgttgtaaccagcatgtttttcctatttccactgtgacctgcagctgactcaaagccttgcgtgacctgacccaggtgcaagagacaggggaagagggatagagggtatagcataaattacatattttcatggctttgggtggttcctccaaaaataattggacctgtaaaaactagtgtgtgtgtgtgtgtgtgtgtgtgtgtgtgtgtggtttttttttttaatctttactttgaatttgttccccaagtgtacttaatcaccttagtgccagtttaatccagttatgcagaagaaattcatattggttgcctgatgtagagctcagcaccaccctaccacaggccttgtctggtgtatttgggaagtggaaaagagccctcagttggagggagctgacaacccttggtggagggagggtgcccttgaatgtattaaaactatcacccaaagaaggtatgaaaacagggtaaggtggtcagttgtttgccaggtcaatagacagaaagtacattagaaaacaggacttaggccaaacaaacaatactggatactgaatacaaaacagtatgatttatattaaaggtttccaaaggttgcctgcaaaggagaatattactactagtcagcaggaaaaaaatgcattcagaacccaagcagaaactgccaaatgtaattaggttaagaaaagttacccttgggcagtgtattagttttctattgctgtgtgacaaattaccccaaatttagcagtttaaaaaacaatacccatagcagttctgtagctcatgagtctggcacagtgtggctggattctctgctcagggtcttaaaggctgaaataagggttggcaggacaacattccttcatggaggctctggggaagaatctgcttctaagttcattcaggttgttggcggaattcagttctttgctggctctcagctggaggcccctctctcacctcaaggctgcctgcattccttcttatgtggtcccctccagcttcaaaccagccttcctgctctttctcatgcttcatatctctctcccgtcctcctgttttaggggcatatgattagctcaagcccacagatatattttaaggttgattgtgcgatagaacataattgcaggagtactgtctcatctcatcatattcacgggttctggagattagctcattgaaagtgggaggggcattttcaaattctgcctaccacaggcaataactgcccatctcagctgtaggtggaatttttacccagaaaagataggccctagaagcctcatttcttttctccatggaaaaggacagccctctgctgcagcgttcaacttgtgtgtttactgacagagtgaactacagaaatagcttttcttcctaaaggggattgttctacattttgaagttattttttaataaaattgaattatgttgtgtattgtgcttcttaataggaaatgcattattggactgtttttgtaacatcctgtttattgcaaatagctagtatcgttcaaaaactgtataaaatacttttgtacatattagcaatgtctaatttgtatacacttcagttaaatttccctaaaacttgaaaggggaccttgtagaaattaaaatatatacttagtctaa

SEQ ID NO: 361806 - DNA, 7671 bp, Homo sapiens
gtactctcgcggtatttgtcccgactctcgcggggtttagcgtggcattgggaggcccggcctgggggaggagacggcgttccgttagcggcgttggggtttggctgcagtggcagtgctttctcttctgctcacggggacccgctcaggctggaggccagccagctcttgccgccacctcggtcgcgatgggggcgcaggaccggccgcagtgccacttcgacatcgagatcaaccgggagccggttggtcgcattatgtttcagctcttctcagacatatgtccaaaaacatgcaaaaacttcctttgcttgtgctcaggagagaaaggccttgggaaaacaactgggaagaagttatgttataaaggttctacgttccatcgtgtggttaaaaactttatgattcagggtggggacttcagtgaaggtaatggaaaaggtggagaatcaatttatggtggatattttaaaggtaaggcttaatattttacggtcttttgtttcagttctgatattaaagcaagtttgatcatatacttttaatgagaagaggtttacttatagttcactttttgcatgaaactaatgctgcatgaaaatactttatttgcatgaatttggggataaattatattgtaatatataatttttaattgacaagattaattaaggctaactttatggttaaacatgactttcagcatggaggttaggcaactatatacatgaaactcctatcttcctgcctaaaactgtcaacatattcttttgtttatagagaatgtggtcttttgcaaaatgaaaagatgaaaactttattctcaaacatgacagagcgttccttttatcaatggcaaatcgagggaaacataccaatggttcccagtttttcattaccacaaagcctgctccacacctggatggggtgcatgtagtctttggactggttatttctggttttgaagtaatcgaacaaattgaaaatctgaagaccgatgctgcaagcagaccatatgcagatgtgcgagttattgactgtggagtacttgccacaaaatcaataaaagatgtttttgagaaaaaaaggaagaaaccaactcattcagaaggctcggattcctcttccaattcctcctcttcttcagaatcatcttcagaaagtgaacttgaacatgagagaagcagaaggaggaaacataagaggaggccaaaagttaaacgttctaaaaagaggcgaaaggaagcaagcagttcagaagagccaaggaataaacatgcaatgaacccaaaaggtcactctgagaggagtgataccaatgaaaaaaggtcagttgattccagtgctaaaagggaaaaacctgtggtccgcccagaagagattcctccagtgcctgagaaccgatttttactgagaagagatatgcctgttgttactgcagaacctgaaccgaagattcctgatgttgcacccattgtaagtgatcagaaaccatctgtatcaaagtctggacggaagattaaaggaaggggcacaattcgctatcacacacctccaagatcaagatcctgttctgagtcagatgatgatgacagcagtgaaactcctcctcactggaaagaggaaatgcagagattaagagcatatagaccacctagtggagaaaaatggagtaaaggagataagttaagtgacccctgttcaagccgatgggatgaaagaagcttgtctcagagatccagatcatggtcctataatggatattattcagaccttagtacagcaagacactctggccaccataaaaaacgcagaaaagaaaaaaaggttaagcataaaaagaaagggaaaaagcagaaacactgcagaagacacaaacaaacaaagaagagaaggattcttataccgtctgacatagaatcctcaaaatcttccactcgaagaatgaaatcctcttgtgatagagaaaggagttctcgttcttcctcattgtcatctcatcactcatcaaagagagactggtctaaatctgataaggatgtccagagctctttaacccattccagcagagactcatacagatcaaaatctcactcacagtcttattctagaggaagctcaagatcaaggactgcgtcaaagtcctcatcacattctcgaagtagatcaaagtccagatctagttccaagtctgggcaccgaaagagagcatcaaaatcaccaagaaaaacagcttctcagttaagtgaaaataaaccagttaaaacagaacctttaagagcaaccatggcacaaaatgaaaatgtagtagtacaaccagttgtagcagaaaatattcctgtaataccactgagtgacagtccccccccttcaagatggaagcctggacagaaaccttggaagccctcttatgagcgaattcaggaaatgaaagctaaaacaacccatttgctacccatccaaagcacttacagtttagcaaatattaaagagactggtagctcatcatcctaccataaaagagaaaaaaattcggaaagtgatcagagcacttattcaaaatacagtgatagaagttcagaaagctcaccaaggtcaaggagcagatcttctaggagtagatcttattccagatcatatacaagatcacgtagtctagctagttcacattcaaggtctaggtctccatcatctagatctcattcacgaaataaatacagtgatcattcacagtgtagtagatcatcttcatatacttctattagcagtgatgatggaaggcgagctaagaggagacttagatccagtgggaaaaaaaatagcgtttcacataaaaagcatagcagcagctctgaaaagacacttcacagtaaatatgtcaaaggtagagacaggtcttcatgtgtgagaaagtatagcgagagcagatcatctttagattattcttcagacagtgagcagtcaagtgttcaggccacacagtcagcccaggaaaaagagaagcagggccaaatggaaagaacacataataaacaagaaaaaaacagaggtgaagaaaaatccaagtctgaacgggaatgccctcattcaaaaaaaagaactttgaaagagaatctttctgatcaccttagaaatggcagtaagcccaaaaggaagaattatgctggtagtaaatgggactctgagtcaaattcagaacgagatgtcactaaaaacagtaaaaatgactcccatccatcctctgacaaggaagaaggtgaggccacatccgattctgaatcagaggttagtgaaattcacatcaaagtcaaacccacaaccaagtcgtccacaaatacttcactgcctgatgataatggtgcttggaaatcaagcaaacagcgcacatcaacttctgactctgaggggtcctgttccaattcggaaaacaataggggaaagccacaaaagcacaaacatgggtcaaaggaaaatcttaaaagagaacacaccaaaaaagtgaaagagaaattgaaagggaaaaaagacaaaaagcataaggctccaaaacgaaagcaagcatttcactggcagcctccactagaatttggtgaagaggaggaggaggagattgatgacaagcaagttactcaggaatcaaaagagaaaaaagtttctgaaaacaatgaaaccataaaagataatattctaaaaactgagaaatccagtgaagaggacctttcaggtaaacatgatacagtgactgtttcatcagatcttgatcagtttactaaagatgatagtaaactcagtatttctcccacagctttaaatactgaggaaaatgtggcctgtttacaaaacattcagcacgttgaagaaagtgttcccaatggagtggaagatgtgcttcaaacagatgacaacatggagatctgcactcctgataggagttccccagcaaaagtagaggagacttcccctctaggaaatgcacggcttgataccccagatataaacattgttttgaagcaggatatggcaacggaacatcctcaagcagaggtagtaaaacaggaaagcagcatgtccgaaagtaaagtgttgggtgaagtggggaaacaggacagcagctctgctagcttggctagtgctggagaaagtaccgggaagaaggaggtggctgagaagagccagatcaacctcattgataagaaatggaagcccctgcaaggtgtggggaacctggcagcacctaatgctgccacatccagtgctgtggaagttaaggtgttgaccactgtgcctgaaatgaaaccacaaggcttgagaatagaaattaaaagcaaaaataaagttcggcctgggtctctctttgatgaagtaagaaagacagcacgcttaaaccgtagaccaagaaatcaggagagttcaagtgatgagcagacgcctagtcgggatgatgatagccagtccaggagtccaagtagatctcgaagtaaatctgaaaccaaatcaagacacagaacaaggtctgtctcctatagtcactcaagaagtcgatcgagaagttccacatcatcttatcgatcaagaagctactctagaagtcggagcagaggatggtacagcagaggccgaaccagaagccggagcagttcctaccggagttacaaaagtcacaggacgtccagcaggagcagatccaggagcagctcatatgatccccacagtcgatccaggtcctacacctacgatagctactatagcaggagtcggagtcgaagtagaagccagagaagtgacagttaccaccgaggcagaagttataatcggcggtccaggagttgtagatcttatggctctgacagtgaaagtgaccgaagttactctcatcaccggagccccagtgagagcagcagatacagttgaaaacgtccggatacaaattatatcttatttgtaaatatctggcaacttagcttaagaaatgtaatgacagtctgttgttctatttcaatatcagaggtgaatttcaaaaatagacacttcttaattgttactggttcatttacatgtggggagaagaatttaaaatacagatatgtctcctaaaaatatttttatgccacattttacagtagccaactatggaaatgaatttcattttcttgaatcaagaaatcgtgaaatttatctatgtataatttgcaatattattttaagtctatttcactctatcttacgtatcccttagaatacagattctttttgcctgtttttccagttttagcatatatgctgccaagcatagaactgtgaaggagaactgttaaaggcggccaaatatttatatactgattacatagagtcttgtacatatgtgctctaaaaacaaaccacccagaattgatactgttggtaaccaggagtataaggcagtggctctggggttcttaattcattcctaacttctttgatacttcacaggattaggaaagtggtcatcatacatcccacacagtctgtattacttcaggcttgtgggcaaggttaggaagaatcaatcagccttaactataaatacctgcactgtctctgaggacttactattttatgttctttttaatcaataccgatcagaagtttaggttataaaaacaattctacttcatgctttggtgcttggtaatttttggtgcgtctttaagcattactcttatatatcatatattaaaataccataaaaatgaaattcagacaaaatcactggcaccaaaaatggtttattctgagctgtcttcactttgactatttggggggcttctctcaagtacagatgtgggttggggtcccctggagcaggcaggattggcagtaagagatattggccactcaagtctactgtgtgtgtgtgcctctggaagagtgaagaatggacttcaaaagtaacatcaaaaatctaactgccaccatcctggagacattttgcagggctttcctttcaagtctttcaagtacaggatattaccacaacagcagctgaactgttgtaaccagcatgtttttcctatttccactgtgacctgcagctgactcaaagccttgcgtgacctgacccaggtgcaagagacaggggaagagggatagagggtatagcataaattacatattttcatggctttgggtggttcctccaaaaataattggacctgtaaaaactagtgtgtgtgtgtgtgtgtgtgtgtgtgtgtgtgtggtttttttttttaatctttactttgaatttgttccccaagtgtacttaatcaccttagtgccagtttaatccagttatgcagaagaaattcatattggttgcctgatgtagagctcagcaccaccctaccacaggccttgtctggtgtatttgggaagtggaaaagagccctcagttggagggagctgacaacccttggtggagggagggtgcccttgaatgtattaaaactatcacccaaagaaggtatgaaaacagggtaaggtggtcagttgtttgccaggtcaatagacagaaagtacattagaaaacaggacttaggccaaacaaacaatactggatactgaatacaaaacagtatgatttatattaaaggtttccaaaggttgcctgcaaaggagaatattactactagtcagcaggaaaaaaatgcattcagaacccaagcagaaactgccaaatgtaattaggttaagaaaagttacccttgggcagtgtattagttttctattgctgtgtgacaaattaccccaaatttagcagtttaaaaaacaatacccatagcagttctgtagctcatgagtctggcacagtgtggctggattctctgctcagggtcttaaaggctgaaataagggttggcaggacaacattccttcatggaggctctggggaagaatctgcttctaagttcattcaggttgttggcggaattcagttctttgctggctctcagctggaggcccctctctcacctcaaggctgcctgcattccttcttatgtggtcccctccagcttcaaaccagccttcctgctctttctcatgcttcatatctctctcccgtcctcctgttttaggggcatatgattagctcaagcccacagatatattttaaggttgattgtgcgatagaacataattgcaggagtactgtctcatctcatcatattcacgggttctggagattagctcattgaaagtgggaggggcattttcaaattctgcctaccacaggcaataactgcccatctcagctgtaggtggaatttttacccagaaaagataggccctagaagcctcatttcttttctccatggaaaaggacagccctctgctgcagcgttcaacttgtgtgtttactgacagagtgaactacagaaatagcttttcttcctaaaggggattgttctacattttgaagttattttttaataaaattgaattatgttgtgtattgtgcttcttaataggaaatgcattattggactgtttttgtaacatcctgtttattgcaaatagctagtatcgttcaaaaactgtataaaatacttttgtacatattagcaatgtctaatttgtatacacttcagttaaatttccctaaaacttgaaaggggaccttgtagaaattaaaatatatacttagtctaa

SEQ ID NO: 361807 - DNA, 6746 bp, Homo sapiens
ggtttttttttttaagtgttttgttttgttgttttggagttgagagtaactttaatttttatgtgtattcatgctgtgtatttatggctacaagtcaaactgatttcatatgtatgcatacatatagtctaatagagatgattgtaattcattataatcttgagttttttaaattagtaagatggctactattgctgttttggggtttttaaggttagatatatatcatgtttaactttttcccctatctttttatctttacttctttgttctctacatgctgtgtttaaacctttctgctctcttcacctgaacacatcgtgtttgacatcatctttgtgttgatgtttattacatagtaccacaaagcctgctccacacctggatggggtgcatgtagtctttggactggttatttctggttttgaagtaatcgaacaaattgaaaatctgaagaccgatgctgcaagcagaccatatgcagatgtgcgagttattgactgtggagtacttgccacaaaatcaataaaagatgtttttgagaaaaaaaggaagaaaccaactcattcagaaggctcggattcctcttccaattcctcctcttcttcagaatcatcttcagaaagtgaacttgaacatgagagaagcagaaggaggaaacataagaggaggccaaaagttaaacgttctaaaaagaggcgaaaggaagcaagcagttcagaagagccaaggaataaacatgcaatgaacccaaaaggtcactctgagaggagtgataccaatgaaaaaaggtcagttgattccagtgctaaaagggaaaaacctgtggtccgcccagaagagattcctccagtgcctgagaaccgatttttactgagaagagatatgcctgttgttactgcagaacctgaaccgaagattcctgatgttgcacccattgtaagtgatcagaaaccatctgtatcaaagtctggacggaagattaaaggaaggggcacaattcgctatcacacacctccaagatcaagatcctgttctgagtcagatgatgatgacagcagtgaaactcctcctcactggaaagaggaaatgcagagattaagagcatatagaccacctagtggagaaaaatggagtaaaggagataagttaagtgacccctgttcaagccgatgggatgaaagaagcttgtctcagagatccagatcatggtcctataatggatattattcagaccttagtacagcaagacactctggccaccataaaaaacgcagaaaagaaaaaaaggttaagcataaaaagaaagggaaaaagcagaaacactgcagaagacacaaacaaacaaagaagagaaggattcttataccgtctgacatagaatcctcaaaatcttccactcgaagaatgaaatcctcttgtgatagagaaaggagttctcgttcttcctcattgtcatctcatcactcatcaaagagagactggtctaaatctgataaggatgtccagagctctttaacccattccagcagagactcatacagatcaaaatctcactcacagtcttattctagaggaagctcaagatcaaggactgcgtcaaagtcctcatcacattctcgaagtagatcaaagtccagatctagttccaagtctgggcaccgaaagagagcatcaaaatcaccaagaaaaacagcttctcagttaagtgaaaataaaccagttaaaacagaacctttaagagcaaccatggcacaaaatgaaaatgtagtagtacaaccagttgtagcagaaaatattcctgtaataccactgagtgacagtccccccccttcaagatggaagcctggacagaaaccttggaagccctcttatgagcgaattcaggaaatgaaagctaaaacaacccatttgctacccatccaaagcacttacagtttagcaaatattaaagagactggtagctcatcatcctaccataaaagagaaaaaaattcggaaagtgatcagagcacttattcaaaatacagtgatagaagttcagaaagctcaccaaggtcaaggagcagatcttctaggagtagatcttattccagatcatatacaagatcacgtagtctagctagttcacattcaaggtctaggtctccatcatctagatctcattcacgaaataaatacagtgatcattcacagtgtagtagatcatcttcatatacttctattagcagtgatgatggaaggcgagctaagaggagacttagatccagtgggaaaaaaaatagcgtttcacataaaaagcatagcagcagctctgaaaagacacttcacagtaaatatgtcaaaggtagagacaggtcttcatgtgtgagaaagtatagcgagagcagatcatctttagattattcttcagacagtgagcagtcaagtgttcaggccacacagtcagcccaggaaaaagagaagcagggccaaatggaaagaacacataataaacaagaaaaaaacagaggtgaagaaaaatccaagtctgaacgggaatgccctcattcaaaaaaaagaactttgaaagagaatctttctgatcaccttagaaatggcagtaagcccaaaaggaagaattatgctggtagtaaatgggactctgagtcaaattcagaacgagatgtcactaaaaacagtaaaaatgactcccatccatcctctgacaaggaagaaggtgaggccacatccgattctgaatcagaggttagtgaaattcacatcaaagtcaaacccacaaccaagtcgtccacaaatacttcactgcctgatgataatggtgcttggaaatcaagcaaacagcgcacatcaacttctgactctgaggggtcctgttccaattcggaaaacaataggggaaagccacaaaagcacaaacatgggtcaaaggaaaatcttaaaagagaacacaccaaaaaagtgaaagagaaattgaaagggaaaaaagacaaaaagcataaggctccaaaacgaaagcaagcatttcactggcagcctccactagaatttggtgaagaggaggaggaggagattgatgacaagcaagttactcaggaatcaaaagagaaaaaagtttctgaaaacaatgaaaccataaaagataatattctaaaaactgagaaatccagtgaagaggacctttcaggtaaacatgatacagtgactgtttcatcagatcttgatcagtttactaaagatgatagtaaactcagtatttctcccacagctttaaatactgaggaaaatgtggcctgtttacaaaacattcagcacgttgaagaaagtgttcccaatggagtggaagatgtgcttcaaacagatgacaacatggagatctgcactcctgataggagttccccagcaaaagtagaggagacttcccctctaggaaatgcacggcttgataccccagatataaacattgttttgaagcaggatatggcaacggaacatcctcaagcagaggtagtaaaacaggaaagcagcatgtccgaaagtaaagtgttgggtgaagtggggaaacaggacagcagctctgctagcttggctagtgctggagaaagtaccgggaagaaggaggtggctgagaagagccagatcaacctcattgataagaaatggaagcccctgcaaggtgtggggaacctggcagcacctaatgctgccacatccagtgctgtggaagttaaggtgttgaccactgtgcctgaaatgaaaccacaaggcttgagaatagaaattaaaagcaaaaataaagttcggcctgggtctctctttgatgaagtaagaaagacagcacgcttaaaccgtagaccaagaaatcaggagagttcaagtgatgagcagacgcctagtcgggatgatgatagccagtccaggagtccaagtagatctcgaagtaaatctgaaaccaaatcaagacacagaacaaggtctgtctcctatagtcactcaagaagtcgatcgagaagttccacatcatcttatcgatcaagaagctactctagaagtcggagcagaggatggtacagcagaggccgaaccagaagccggagcagttcctaccggagttacaaaagtcacaggacgtccagcaggagcagatccaggagcagctcatatgatccccacagtcgatccaggtcctacacctacgatagctactatagcaggagtcggagtcgaagtagaagccagagaagtgacagttaccaccgaggcagaagttataatcggcggtccaggagttgtagatcttatggctctgacagtgaaagtgaccgaagttactctcatcaccggagccccagtgagagcagcagatacagttgaaaacgtccggatacaaattatatcttatttgtaaatatctggcaacttagcttaagaaatgtaatgacagtctgttgttctatttcaatatcagaggtgaatttcaaaaatagacacttcttaattgttactggttcatttacatgtggggagaagaatttaaaatacagatatgtctcctaaaaatatttttatgccacattttacagtagccaactatggaaatgaatttcattttcttgaatcaagaaatcgtgaaatttatctatgtataatttgcaatattattttaagtctatttcactctatcttacgtatcccttagaatacagattctttttgcctgtttttccagttttagcatatatgctgccaagcatagaactgtgaaggagaactgttaaaggcggccaaatatttatatactgattacatagagtcttgtacatatgtgctctaaaaacaaaccacccagaattgatactgttggtaaccaggagtataaggcagtggctctggggttcttaattcattcctaacttctttgatacttcacaggattaggaaagtggtcatcatacatcccacacagtctgtattacttcaggcttgtgggcaaggttaggaagaatcaatcagccttaactataaatacctgcactgtctctgaggacttactattttatgttctttttaatcaataccgatcagaagtttaggttataaaaacaattctacttcatgctttggtgcttggtaatttttggtgcgtctttaagcattactcttatatatcatatattaaaataccataaaaatgaaattcagacaaaatcactggcaccaaatacagatgtgggttggggtcccctggagcaggcaggattggcagtaagagatattggccactcaagtctactgtgtgtgtgtgtgtgtgtggtttttttttttaatctttactttgaatttgttccccaagtgtacttaatcaccttagtgccagtttaatccagttatgcagaagaaattcatattggttgcctgatgtagagctcagcaccaccctaccacaggccttgtctggtgtatttgggaagtggaaaagagccctcagttggagggagctgacaacccttggtggagggagggtgcccttgaatgtattaaaactatcacccaaagaaggtatgaaaacagggtaaggtggtcagttgtttgccaggtcaatagacagaaagtacattagaaaacaggacttaggccaaacaaacaatactggatactgaatacaaaacagtatgatttatattaaaggtttccaaaggttgcctgcaaaggagaatattactactagtcagcaggaaaaaaatgcattcagaacccaagcagaaactgccaaatgtaattaggttaagaaaagttacccttgggcagtgtattagttttctattgctgtgtgacaaattaccccaaatttagcagtttaaaaaacaatacccatagcagttctgtagctcatgagtctggcacagtgtggctggattctctgctcagggtcttaaaggctgaaataagggttggcaggacaacattccttcatggaggctctggggaagaatctgcttctaagttcattcaggttgttggcggaattcagttctttgctggctctcagctggaggcccctctctcacctcaaggctgcctgcattccttcttatgtggtcccctccagcttcaaaccagccttcctgctctttctcatgcttcatatctctctcccgtcctcctgttttaggggcatatgattagctcaagcccacagatatattttaaggttgattgtgcgatagaacataattgcaggagtactgtctcatctcatcatattcacgggttctggagattagctcattgaaagtgggaggggcattttcaaattctgcctaccacaggcaataactgcccatctcagctgtaggtggaatttttacccagaaaagataggccctagaagcctcatttcttttctccatggaaaaggacagccctctgctgcagcgttcaacttgtgtgtttactgacagagtgaactacagaaatagcttttcttcctaaaggggattgttctacattttgaagttattttttaataaaattgaattatgttgtgtattgtgcttcttaataggaaatgcattattggactgtttttgtaacatcctgtttattgcaaatagctagtatcgttcaaaaactgtataaaatacttttgtacatattagcaatgtctaatttgtatacacttcagttaaatttccctaaaacttgaaaggggaccttgtagaaattaaaatatatacttagtctaa

SEQ ID NO: 361808 - DNA, 7393 bp, Homo sapiens
gtactctcgcggtatttgtcccgactctcgcggggtttagcgtggcattgggaggcccggcctgggggaggagacggcgttccgttagcggcgttggggtttggctgcagtggcagtgctttctcttctgctcacggggacccgctcaggctggaggccagccagctcttgccgccacctcggtcgcgatgggggcgcaggaccggccgcagtgccacttcgacatcgagatcaaccgggagccggttggtcgcattatgtttcagctcttctcagacatatgtccaaaaacatgcaaaaacttcctttgcttgtgctcaggagagaaaggccttgggaaaacaactgggaagaagttatgttataaaggttctacgttccatcgtgtggttaaaaactttatgattcagggtggggacttcagtgaaggtaatggaaaaggtggagaatcaatttatggtggatattttaaagagaatgtggtcttttgcaaaatgaaaagatgaaaactttattctcaaacatgacagagcgttccttttatcaatggcaaatcgagggaaacataccaatggttcccagtttttcataaagagtgttacaccgtgcgctccaaagtaccacaaagcctgctccacacctggatggggtgcatgtagtctttggactggttatttctggttttgaagtaatcgaacaaattgaaaatctgaagaccgatgctgcaagcagaccatatgcagatgtgcgagttattgactgtggagtacttgccacaaaatcaataaaagatgtttttgagaaaaaaaggaagaaaccaactcattcagaaggctcggattcctcttccaattcctcctcttcttcagaatcatcttcagaaagtgaacttgaacatgagagaagcagaaggaggaaacataagaggaggccaaaagttaaacgttctaaaaagaggcgaaaggaagcaagcagttcagaagagccaaggaataaacatgcaatgaacccaaaaggtcactctgagaggagtgataccaatgaaaaaaggtcagttgattccagtgctaaaagggaaaaacctgtggtccgcccagaagagattcctccagtgcctgagaaccgatttttactgagaagagatatgcctgttgttactgcagaacctgaaccgaagattcctgatgttgcacccattgtaagtgatcagaaaccatctgtatcaaagtctggacggaagattaaaggaaggggcacaattcgctatcacacacctccaagatcaagatcctgttctgagtcagatgatgatgacagcagtgaaactcctcctcactggaaagaggaaatgcagagattaagagcatatagaccacctagtggagaaaaatggagtaaaggagataagttaagtgacccctgttcaagccgatgggatgaaagaagcttgtctcagagatccagatcatggtcctataatggatattattcagaccttagtacagcaagacactctggccaccataaaaaacgcagaaaagaaaaaaaggttaagcataaaaagaaagggaaaaagcagaaacactgcagaagacacaaacaaacaaagaagagaaggattcttataccgtctgacatagaatcctcaaaatcttccactcgaagaatgaaatcctcttgtgatagagaaaggagttctcgttcttcctcattgtcatctcatcactcatcaaagagagactggtctaaatctgataaggatgtccagagctctttaacccattccagcagagactcatacagatcaaaatctcactcacagtcttattctagaggaagctcaagatcaaggactgcgtcaaagtcctcatcacattctcgaagtagatcaaagtccagatctagttccaagtctgggcaccgaaagagagcatcaaaatcaccaagaaaaacagcttctcagttaagtgaaaataaaccagttaaaacagaacctttaagagcaaccatggcacaaaatgaaaatgtagtagtacaaccagttgtagcagaaaatattcctgtaataccactgagtgacagtccccccccttcaagatggaagcctggacagaaaccttggaagccctcttatgagcgaattcaggaaatgaaagctaaaacaacccatttgctacccatccaaagcacttacagtttagcaaatattaaagagactggtagctcatcatcctaccataaaagagaaaaaaattcggaaagtgatcagagcacttattcaaaatacagtgatagaagttcagaaagctcaccaaggtcaaggagcagatcttctaggagtagatcttattccagatcatatacaagatcacgtagtctagctagttcacattcaaggtctaggtctccatcatctagatctcattcacgaaataaatacagtgatcattcacagtgtagtagatcatcttcatatacttctattagcagtgatgatggaaggcgagctaagaggagacttagatccagtgggaaaaaaaatagcgtttcacataaaaagcatagcagcagctctgaaaagacacttcacagtaaatatgtcaaaggtagagacaggtcttcatgtgtgagaaagtatagcgagagcagatcatctttagattattcttcagacagtgagcagtcaagtgttcaggccacacagtcagcccaggaaaaagagaagcagggccaaatggaaagaacacataataaacaagaaaaaaacagaggtgaagaaaaatccaagtctgaacgggaatgccctcattcaaaaaaaagaactttgaaagagaatctttctgatcaccttagaaatggcagtaagcccaaaaggaagaattatgctggtagtaaatgggactctgagtcaaattcagaacgagatgtcactaaaaacagtaaaaatgactcccatccatcctctgacaaggaagaaggtgaggccacatccgattctgaatcagaggttagtgaaattcacatcaaagtcaaacccacaaccaagtcgtccacaaatacttcactgcctgatgataatggtgcttggaaatcaagcaaacagcgcacatcaacttctgactctgaggggtcctgttccaattcggaaaacaataggggaaagccacaaaagcacaaacatgggtcaaaggaaaatcttaaaagagaacacaccaaaaaagtgaaagagaaattgaaagggaaaaaagacaaaaagcataaggctccaaaacgaaagcaagcatttcactggcagcctccactagaatttggtgaagaggaggaggaggagattgatgacaagcaagttactcaggaatcaaaagagaaaaaagtttctgaaaacaatgaaaccataaaagataatattctaaaaactgagaaatccagtgaagaggacctttcaggtaaacatgatacagtgactgtttcatcagatcttgatcagtttactaaagatgatagtaaactcagtatttctcccacagctttaaatactgaggaaaatgtggcctgtttacaaaacattcagcacgttgaagaaagtgttcccaatggagtggaagatgtgcttcaaacagatgacaacatggagatctgcactcctgataggagttccccagcaaaagtagaggagacttcccctctaggaaatgcacggcttgataccccagatataaacattgttttgaagcaggatatggcaacggaacatcctcaagcagaggtagtaaaacaggaaagcagcatgtccgaaagtaaagtgttgggtgaagtggggaaacaggacagcagctctgctagcttggctagtgctggagaaagtaccgggaagaaggaggtggctgagaagagccagatcaacctcattgataagaaatggaagcccctgcaaggtgtggggaacctggcagcacctaatgctgccacatccagtgctgtggaagttaaggtgttgaccactgtgcctgaaatgaaaccacaaggcttgagaatagaaattaaaagcaaaaataaagttcggcctgggtctctctttgatgaagtaagaaagacagcacgcttaaaccgtagaccaagaaatcaggagagttcaagtgatgagcagacgcctagtcgggatgatgatagccagtccaggagtccaagtagatctcgaagtaaatctgaaaccaaatcaagacacagaacaaggtctgtctcctatagtcactcaagaagtcgatcgagaagttccacatcatcttatcgatcaagaagctactctagaagtcggagcagaggatggtacagcagaggccgaaccagaagccggagcagttcctaccggagttacaaaagtcacaggacgtccagcaggagcagatccaggagcagctcatatgatccccacagtcgatccaggtcctacacctacgatagctactatagcaggagtcggagtcgaagtagaagccagagaagtgacagttaccaccgaggcagaagttataatcggcggtccaggagttgtagatcttatggctctgacagtgaaagtgaccgaagttactctcatcaccggagccccagtgagagcagcagatacagttgaaaacgtccggatacaaattatatcttatttgtaaatatctggcaacttagcttaagaaatgtaatgacagtctgttgttctatttcaatatcagaggtgaatttcaaaaatagacacttcttaattgttactggttcatttacatgtggggagaagaatttaaaatacagatatgtctcctaaaaatatttttatgccacattttacagtagccaactatggaaatgaatttcattttcttgaatcaagaaatcgtgaaatttatctatgtataatttgcaatattattttaagtctatttcactctatcttacgtatcccttagaatacagattctttttgcctgtttttccagttttagcatatatgctgccaagcatagaactgtgaaggagaactgttaaaggcggccaaatatttatatactgattacatagagtcttgtacatatgtgctctaaaaacaaaccacccagaattgatactgttggtaaccaggagtataaggcagtggctctggggttcttaattcattcctaacttctttgatacttcacaggattaggaaagtggtcatcatacatcccacacagtctgtattacttcaggcttgtgggcaaggttaggaagaatcaatcagccttaactataaatacctgcactgtctctgaggacttactattttatgttctttttaatcaataccgatcagaagtttaggttataaaaacaattctacttcatgctttggtgcttggtaatttttggtgcgtctttaagcattactcttatatatcatatattaaaataccataaaaatgaaattcagacaaaatcactggcaccaaaaatggtttattctgagctgtcttcactttgactatttggggggcttctctcaagtacagatgtgggttggggtcccctggagcaggcaggattggcagtaagagatattggccactcaagtctactgtgtgtgtgtgcctctggaagagtgaagaatggacttcaaaagtaacatcaaaaatctaactgccaccatcctggagacattttgcagggctttcctttcaagtctttcaagtacaggatattaccacaacagcagctgaactgttgtaaccagcatgtttttcctatttccactgtgacctgcagctgactcaaagccttgcgtgacctgacccaggtgcaagagacaggggaagagggatagagggtatagcataaattacatattttcatggctttgggtggttcctccaaaaataattggacctgtaaaaactagtgtgtgtgtgtgtgtgtgtgtgtgtgtgtgtgtggtttttttttttaatctttactttgaatttgttccccaagtgtacttaatcaccttagtgccagtttaatccagttatgcagaagaaattcatattggttgcctgatgtagagctcagcaccaccctaccacaggccttgtctggtgtatttgggaagtggaaaagagccctcagttggagggagctgacaacccttggtggagggagggtgcccttgaatgtattaaaactatcacccaaagaaggtatgaaaacagggtaaggtggtcagttgtttgccaggtcaatagacagaaagtacattagaaaacaggacttaggccaaacaaacaatactggatactgaatacaaaacagtatgatttatattaaaggtttccaaaggttgcctgcaaaggagaatattactactagtcagcaggaaaaaaatgcattcagaacccaagcagaaactgccaaatgtaattaggttaagaaaagttacccttgggcagtgtattagttttctattgctgtgtgacaaattaccccaaatttagcagtttaaaaaacaatacccatagcagttctgtagctcatgagtctggcacagtgtggctggattctctgctcagggtcttaaaggctgaaataagggttggcaggacaacattccttcatggaggctctggggaagaatctgcttctaagttcattcaggttgttggcggaattcagttctttgctggctctcagctggaggcccctctctcacctcaaggctgcctgcattccttcttatgtggtcccctccagcttcaaaccagccttcctgctctttctcatgcttcatatctctctcccgtcctcctgttttaggggcatatgattagctcaagcccacagatatattttaaggttgattgtgcgatagaacataattgcaggagtactgtctcatctcatcatattcacgggttctggagattagctcattgaaagtgggaggggcattttcaaattctgcctaccacaggcaataactgcccatctcagctgtaggtggaatttttacccagaaaagataggccctagaagcctcatttcttttctccatggaaaaggacagccctctgctgcagcgttcaacttgtgtgtttactgacagagtgaactacagaaatagcttttcttcctaaaggggattgttctacattttgaagttattttttaataaaattgaattatgttgtgtattgtgcttcttaataggaaatgcattattggactgtttttgtaacatcctgtttattgcaaatagctagtatcgttcaaaaactgtataaaatacttttgtacatattagcaatgtctaatttgtatacacttcagttaaatttccctaaaacttgaaaggggaccttgtagaaattaaaatatatacttagtctaa

SEQ ID NO: 361809 - DNA, 7153 bp, Homo sapiens
gtcaatctgtgctcatggatgggcttctcagcaatataattctttttattttttatttttctcttcagttttccaaaatgggtcggatagtaagcagtacaatatcatgtgtccctgtaaggaaggttcccaagtaccaagcgaaatctgaatgttaccagactctttaccctaaaatggttaagaaccattgttttaaaggcagaaaactgaggcccagtttgcataatcgtttccttttatgaagcagatttcaagttctcattccattctagttgcttcatacaacaaacagtttggttttattttcaggtctgtggacatgtcattgattacagttaattgtcttgattactgtttatagcttaattatcaaaccagttgtttcttgaatttgtattatgacagggtgcatgtagtctttggactggttatttctggttttgaagtaatcgaacaaattgaaaatctgaagaccgatgctgcaagcagaccatatgcagatgtgcgagttattgactgtggagtacttgccacaaaatcaataaaagatgtttttgagaaaaaaaggaagaaaccaactcattcagaaggctcggattcctcttccaattcctcctcttcttcagaatcatcttcagaaagtgaacttgaacatgagagaagcagaaggaggaaacataagaggaggccaaaagttaaacgttctaaaaagaggcgaaaggaagcaagcagttcagaagagccaaggaataaacatgcaatgaacccaaaaggtcactctgagaggagtgataccaatgaaaaaaggtcagttgattccagtgctaaaagggaaaaacctgtggtccgcccagaagagattcctccagtgcctgagaaccgatttttactgagaagagatatgcctgttgttactgcagaacctgaaccgaagattcctgatgttgcacccattgtaagtgatcagaaaccatctgtatcaaagtctggacggaagattaaaggaaggggcacaattcgctatcacacacctccaagatcaagatcctgttctgagtcagatgatgatgacagcagtgaaactcctcctcactggaaagaggaaatgcagagattaagagcatatagaccacctagtggagaaaaatggagtaaaggagataagttaagtgacccctgttcaagccgatgggatgaaagaagcttgtctcagagatccagatcatggtcctataatggatattattcagaccttagtacagcaagacactctggccaccataaaaaacgcagaaaagaaaaaaaggttaagcataaaaagaaagggaaaaagcagaaacactgcagaagacacaaacaaacaaagaagagaaggattcttataccgtctgacatagaatcctcaaaatcttccactcgaagaatgaaatcctcttgtgatagagaaaggagttctcgttcttcctcattgtcatctcatcactcatcaaagagagactggtctaaatctgataaggatgtccagagctctttaacccattccagcagagactcatacagatcaaaatctcactcacagtcttattctagaggaagctcaagatcaaggactgcgtcaaagtcctcatcacattctcgaagtagatcaaagtccagatctagttccaagtctgggcaccgaaagagagcatcaaaatcaccaagaaaaacagcttctcagttaagtgaaaataaaccagttaaaacagaacctttaagagcaaccatggcacaaaatgaaaatgtagtagtacaaccagttgtagcagaaaatattcctgtaataccactgagtgacagtccccccccttcaagatggaagcctggacagaaaccttggaagccctcttatgagcgaattcaggaaatgaaagctaaaacaacccatttgctacccatccaaagcacttacagtttagcaaatattaaagagactggtagctcatcatcctaccataaaagagaaaaaaattcggaaagtgatcagagcacttattcaaaatacagtgatagaagttcagaaagctcaccaaggtcaaggagcagatcttctaggagtagatcttattccagatcatatacaagatcacgtagtctagctagttcacattcaaggtctaggtctccatcatctagatctcattcacgaaataaatacagtgatcattcacagtgtagtagatcatcttcatatacttctattagcagtgatgatggaaggcgagctaagaggagacttagatccagtgggaaaaaaaatagcgtttcacataaaaagcatagcagcagctctgaaaagacacttcacagtaaatatgtcaaaggtagagacaggtcttcatgtgtgagaaagtatagcgagagcagatcatctttagattattcttcagacagtgagcagtcaagtgttcaggccacacagtcagcccaggaaaaagagaagcagggccaaatggaaagaacacataataaacaagaaaaaaacagaggtgaagaaaaatccaagtctgaacgggaatgccctcattcaaaaaaaagaactttgaaagagaatctttctgatcaccttagaaatggcagtaagcccaaaaggaagaattatgctggtagtaaatgggactctgagtcaaattcagaacgagatgtcactaaaaacagtaaaaatgactcccatccatcctctgacaaggaagaaggtgaggccacatccgattctgaatcagaggttagtgaaattcacatcaaagtcaaacccacaaccaagtcgtccacaaatacttcactgcctgatgataatggtgcttggaaatcaagcaaacagcgcacatcaacttctgactctgaggggtcctgttccaattcggaaaacaataggggaaagccacaaaagcacaaacatgggtcaaaggaaaatcttaaaagagaacacaccaaaaaagtgaaagagaaattgaaagggaaaaaagacaaaaagcataaggctccaaaacgaaagcaagcatttcactggcagcctccactagaatttggtgaagaggaggaggaggagattgatgacaagcaagttactcaggaatcaaaagagaaaaaagtttctgaaaacaatgaaaccataaaagataatattctaaaaactgagaaatccagtgaagaggacctttcaggtaaacatgatacagtgactgtttcatcagatcttgatcagtttactaaagatgatagtaaactcagtatttctcccacagctttaaatactgaggaaaatgtggcctgtttacaaaacattcagcacgttgaagaaagtgttcccaatggagtggaagatgtgcttcaaacagatgacaacatggagatctgcactcctgataggagttccccagcaaaagtagaggagacttcccctctaggaaatgcacggcttgataccccagatataaacattgttttgaagcaggatatggcaacggaacatcctcaagcagaggtagtaaaacaggaaagcagcatgtccgaaagtaaagtgttgggtgaagtggggaaacaggacagcagctctgctagcttggctagtgctggagaaagtaccgggaagaaggaggtggctgagaagagccagatcaacctcattgataagaaatggaagcccctgcaaggtgtggggaacctggcagcacctaatgctgccacatccagtgctgtggaagttaaggtgttgaccactgtgcctgaaatgaaaccacaaggcttgagaatagaaattaaaagcaaaaataaagttcggcctgggtctctctttgatgaagtaagaaagacagcacgcttaaaccgtagaccaagaaatcaggagagttcaagtgatgagcagacgcctagtcgggatgatgatagccagtccaggagtccaagtagatctcgaagtaaatctgaaaccaaatcaagacacagaacaaggtctgtctcctatagtcactcaagaagtcgatcgagaagttccacatcatcttatcgatcaagaagctactctagaagtcggagcagaggatggtacagcagaggccgaaccagaagccggagcagttcctaccggagttacaaaagtcacaggacgtccagcaggagcagatccaggagcagctcatatgatccccacagtcgatccaggtcctacacctacgatagctactatagcaggagtcggagtcgaagtagaagccagagaagtgacagttaccaccgaggcagaagttataatcggcggtccaggagttgtagatcttatggctctgacagtgaaagtgaccgaagttactctcatcaccggagccccagtgagagcagcagatacagttgaaaacgtccggatacaaattatatcttatttgtaaatatctggcaacttagcttaagaaatgtaatgacagtctgttgttctatttcaatatcagaggtgaatttcaaaaatagacacttcttaattgttactggttcatttacatgtggggagaagaatttaaaatacagatatgtctcctaaaaatatttttatgccacattttacagtagccaactatggaaatgaatttcattttcttgaatcaagaaatcgtgaaatttatctatgtataatttgcaatattattttaagtctatttcactctatcttacgtatcccttagaatacagattctttttgcctgtttttccagttttagcatatatgctgccaagcatagaactgtgaaggagaactgttaaaggcggccaaatatttatatactgattacatagagtcttgtacatatgtgctctaaaaacaaaccacccagaattgatactgttggtaaccaggagtataaggcagtggctctggggttcttaattcattcctaacttctttgatacttcacaggattaggaaagtggtcatcatacatcccacacagtctgtattacttcaggcttgtgggcaaggttaggaagaatcaatcagccttaactataaatacctgcactgtctctgaggacttactattttatgttctttttaatcaataccgatcagaagtttaggttataaaaacaattctacttcatgctttggtgcttggtaatttttggtgcgtctttaagcattactcttatatatcatatattaaaataccataaaaatgaaattcagacaaaatcactggcaccaaaaatggtttattctgagctgtcttcactttgactatttggggggcttctctcaagtacagatgtgggttggggtcccctggagcaggcaggattggcagtaagagatattggccactcaagtctactgtgtgtgtgtgcctctggaagagtgaagaatggacttcaaaagtaacatcaaaaatctaactgccaccatcctggagacattttgcagggctttcctttcaagtctttcaagtacaggatattaccacaacagcagctgaactgttgtaaccagcatgtttttcctatttccactgtgacctgcagctgactcaaagccttgcgtgacctgacccaggtgcaagagacaggggaagagggatagagggtatagcataaattacatattttcatggctttgggtggttcctccaaaaataattggacctgtaaaaactagtgtgtgtgtgtgtgtgtgtgtgtgtgtgtgtgtggtttttttttttaatctttactttgaatttgttccccaagtgtacttaatcaccttagtgccagtttaatccagttatgcagaagaaattcatattggttgcctgatgtagagctcagcaccaccctaccacaggccttgtctggtgtatttgggaagtggaaaagagccctcagttggagggagctgacaacccttggtggagggagggtgcccttgaatgtattaaaactatcacccaaagaaggtatgaaaacagggtaaggtggtcagttgtttgccaggtcaatagacagaaagtacattagaaaacaggacttaggccaaacaaacaatactggatactgaatacaaaacagtatgatttatattaaaggtttccaaaggttgcctgcaaaggagaatattactactagtcagcaggaaaaaaatgcattcagaacccaagcagaaactgccaaatgtaattaggttaagaaaagttacccttgggcagtgtattagttttctattgctgtgtgacaaattaccccaaatttagcagtttaaaaaacaatacccatagcagttctgtagctcatgagtctggcacagtgtggctggattctctgctcagggtcttaaaggctgaaataagggttggcaggacaacattccttcatggaggctctggggaagaatctgcttctaagttcattcaggttgttggcggaattcagttctttgctggctctcagctggaggcccctctctcacctcaaggctgcctgcattccttcttatgtggtcccctccagcttcaaaccagccttcctgctctttctcatgcttcatatctctctcccgtcctcctgttttaggggcatatgattagctcaagcccacagatatattttaaggttgattgtgcgatagaacataattgcaggagtactgtctcatctcatcatattcacgggttctggagattagctcattgaaagtgggaggggcattttcaaattctgcctaccacaggcaataactgcccatctcagctgtaggtggaatttttacccagaaaagataggccctagaagcctcatttcttttctccatggaaaaggacagccctctgctgcagcgttcaacttgtgtgtttactgacagagtgaactacagaaatagcttttcttcctaaaggggattgttctacattttgaagttattttttaataaaattgaattatgttgtgtattgtgcttcttaataggaaatgcattattggactgtttttgtaacatcctgtttattgcaaatagctagtatcgttcaaaaactgtataaaatacttttgtacatattagcaatgtctaatttgtatacacttcagttaaatttccctaaaacttgaaaggggaccttgtagaaattaaaatatatacttagtctaa

SEQ ID NO: 361810 - DNA, 7080 bp, Homo sapiens
ggtttttttttttaagtgttttgttttgttgttttggagttgagagtaactttaatttttatgtgtattcatgctgtgtatttatggctacaagtcaaactgatttcatatgtatgcatacatatagtctaatagagatgattgtaattcattataatcttgagttttttaaattagtaagatggctactattgctgttttggggtttttaaggttagatatatatcatgtttaactttttcccctatctttttatctttacttctttgttctctacatgctgtgtttaaacctttctgctctcttcacctgaacacatcgtgtttgacatcatctttgtgttgatgtttattacatagtaccacaaagcctgctccacacctggatggggtgcatgtagtctttggactggttatttctggttttgaagtaatcgaacaaattgaaaatctgaagaccgatgctgcaagcagaccatatgcagatgtgcgagttattgactgtggagtacttgccacaaaatcaataaaagatgtttttgagaaaaaaaggaagaaaccaactcattcagaaggctcggattcctcttccaattcctcctcttcttcagaatcatcttcagaaagtgaacttgaacatgagagaagcagaaggaggaaacataagaggaggccaaaagttaaacgttctaaaaagaggcgaaaggaagcaagcagttcagaagagccaaggaataaacatgcaatgaacccaaaaggtcactctgagaggagtgataccaatgaaaaaaggtcagttgattccagtgctaaaagggaaaaacctgtggtccgcccagaagagattcctccagtgcctgagaaccgatttttactgagaagagatatgcctgttgttactgcagaacctgaaccgaagattcctgatgttgcacccattgtaagtgatcagaaaccatctgtatcaaagtctggacggaagattaaaggaaggggcacaattcgctatcacacacctccaagatcaagatcctgttctgagtcagatgatgatgacagcagtgaaactcctcctcactggaaagaggaaatgcagagattaagagcatatagaccacctagtggagaaaaatggagtaaaggagataagttaagtgacccctgttcaagccgatgggatgaaagaagcttgtctcagagatccagatcatggtcctataatggatattattcagaccttagtacagcaagacactctggccaccataaaaaacgcagaaaagaaaaaaaggttaagcataaaaagaaagggaaaaagcagaaacactgcagaagacacaaacaaacaaagaagagaaggattcttataccgtctgacatagaatcctcaaaatcttccactcgaagaatgaaatcctcttgtgatagagaaaggagttctcgttcttcctcattgtcatctcatcactcatcaaagagagactggtctaaatctgataaggatgtccagagctctttaacccattccagcagagactcatacagatcaaaatctcactcacagtcttattctagaggaagctcaagatcaaggactgcgtcaaagtcctcatcacattctcgaagtagatcaaagtccagatctagttccaagtctgggcaccgaaagagagcatcaaaatcaccaagaaaaacagcttctcagttaagtgaaaataaaccagttaaaacagaacctttaagagcaaccatggcacaaaatgaaaatgtagtagtacaaccagttgtagcagaaaatattcctgtaataccactgagtgacagtccccccccttcaagatggaagcctggacagaaaccttggaagccctcttatgagcgaattcaggaaatgaaagctaaaacaacccatttgctacccatccaaagcacttacagtttagcaaatattaaagagactggtagctcatcatcctaccataaaagagaaaaaaattcggaaagtgatcagagcacttattcaaaatacagtgatagaagttcagaaagctcaccaaggtcaaggagcagatcttctaggagtagatcttattccagatcatatacaagatcacgtagtctagctagttcacattcaaggtctaggtctccatcatctagatctcattcacgaaataaatacagtgatcattcacagtgtagtagatcatcttcatatacttctattagcagtgatgatggaaggcgagctaagaggagacttagatccagtgggaaaaaaaatagcgtttcacataaaaagcatagcagcagctctgaaaagacacttcacagtaaatatgtcaaaggtagagacaggtcttcatgtgtgagaaagtatagcgagagcagatcatctttagattattcttcagacagtgagcagtcaagtgttcaggccacacagtcagcccaggaaaaagagaagcagggccaaatggaaagaacacataataaacaagaaaaaaacagaggtgaagaaaaatccaagtctgaacgggaatgccctcattcaaaaaaaagaactttgaaagagaatctttctgatcaccttagaaatggcagtaagcccaaaaggaagaattatgctggtagtaaatgggactctgagtcaaattcagaacgagatgtcactaaaaacagtaaaaatgactcccatccatcctctgacaaggaagaaggtgaggccacatccgattctgaatcagaggttagtgaaattcacatcaaagtcaaacccacaaccaagtcgtccacaaatacttcactgcctgatgataatggtgcttggaaatcaagcaaacagcgcacatcaacttctgactctgaggggtcctgttccaattcggaaaacaataggggaaagccacaaaagcacaaacatgggtcaaaggaaaatcttaaaagagaacacaccaaaaaagtgaaagagaaattgaaagggaaaaaagacaaaaagcataaggctccaaaacgaaagcaagcatttcactggcagcctccactagaatttggtgaagaggaggaggaggagattgatgacaagcaagttactcaggaatcaaaagagaaaaaagtttctgaaaacaatgaaaccataaaagataatattctaaaaactgagaaatccagtgaagaggacctttcaggtaaacatgatacagtgactgtttcatcagatcttgatcagtttactaaagatgatagtaaactcagtatttctcccacagctttaaatactgaggaaaatgtggcctgtttacaaaacattcagcacgttgaagaaagtgttcccaatggagtggaagatgtgcttcaaacagatgacaacatggagatctgcactcctgataggagttccccagcaaaagtagaggagacttcccctctaggaaatgcacggcttgataccccagatataaacattgttttgaagcaggatatggcaacggaacatcctcaagcagaggtagtaaaacaggaaagcagcatgtccgaaagtaaagtgttgggtgaagtggggaaacaggacagcagctctgctagcttggctagtgctggagaaagtaccgggaagaaggaggtggctgagaagagccagatcaacctcattgataagaaatggaagcccctgcaaggtgtggggaacctggcagcacctaatgctgccacatccagtgctgtggaagttaaggtgttgaccactgtgcctgaaatgaaaccacaaggcttgagaatagaaattaaaagcaaaaataaagttcggcctgggtctctctttgatgaagtaagaaagacagcacgcttaaaccgtagaccaagaaatcaggagagttcaagtgatgagcagacgcctagtcgggatgatgatagccagtccaggagtccaagtagatctcgaagtaaatctgaaaccaaatcaagacacagaacaaggtctgtctcctatagtcactcaagaagtcgatcgagaagttccacatcatcttatcgatcaagaagctactctagaagtcggagcagaggatggtacagcagaggccgaaccagaagccggagcagttcctaccggagttacaaaagtcacaggacgtccagcaggagcagatccaggagcagctcatatgatccccacagtcgatccaggtcctacacctacgatagctactatagcaggagtcggagtcgaagtagaagccagagaagtgacagttaccaccgaggcagaagttataatcggcggtccaggagttgtagatcttatggctctgacagtgaaagtgaccgaagttactctcatcaccggagccccagtgagagcagcagatacagttgaaaacgtccggatacaaattatatcttatttgtaaatatctggcaacttagcttaagaaatgtaatgacagtctgttgttctatttcaatatcagaggtgaatttcaaaaatagacacttcttaattgttactggttcatttacatgtggggagaagaatttaaaatacagatatgtctcctaaaaatatttttatgccacattttacagtagccaactatggaaatgaatttcattttcttgaatcaagaaatcgtgaaatttatctatgtataatttgcaatattattttaagtctatttcactctatcttacgtatcccttagaatacagattctttttgcctgtttttccagttttagcatatatgctgccaagcatagaactgtgaaggagaactgttaaaggcggccaaatatttatatactgattacatagagtcttgtacatatgtgctctaaaaacaaaccacccagaattgatactgttggtaaccaggagtataaggcagtggctctggggttcttaattcattcctaacttctttgatacttcacaggattaggaaagtggtcatcatacatcccacacagtctgtattacttcaggcttgtgggcaaggttaggaagaatcaatcagccttaactataaatacctgcactgtctctgaggacttactattttatgttctttttaatcaataccgatcagaagtttaggttataaaaacaattctacttcatgctttggtgcttggtaatttttggtgcgtctttaagcattactcttatatatcatatattaaaataccataaaaatgaaattcagacaaaatcactggcaccaaaaatggtttattctgagctgtcttcactttgactatttggggggcttctctcaagtacagatgtgggttggggtcccctggagcaggcaggattggcagtaagagatattggccactcaagtctactgtgtgtgtgtgcctctggaagagtgaagaatggacttcaaaagtaacatcaaaaatctaactgccaccatcctggagacattttgcagggctttcctttcaagtctttcaagtacaggatattaccacaacagcagctgaactgttgtaaccagcatgtttttcctatttccactgtgacctgcagctgactcaaagccttgcgtgacctgacccaggtgcaagagacaggggaagagggatagagggtatagcataaattacatattttcatggctttgggtggttcctccaaaaataattggacctgtaaaaactagtgtgtgtgtgtgtgtgtgtgtgtgtgtgtgtgtggtttttttttttaatctttactttgaatttgttccccaagtgtacttaatcaccttagtgccagtttaatccagttatgcagaagaaattcatattggttgcctgatgtagagctcagcaccaccctaccacaggccttgtctggtgtatttgggaagtggaaaagagccctcagttggagggagctgacaacccttggtggagggagggtgcccttgaatgtattaaaactatcacccaaagaaggtatgaaaacagggtaaggtggtcagttgtttgccaggtcaatagacagaaagtacattagaaaacaggacttaggccaaacaaacaatactggatactgaatacaaaacagtatgatttatattaaaggtttccaaaggttgcctgcaaaggagaatattactactagtcagcaggaaaaaaatgcattcagaacccaagcagaaactgccaaatgtaattaggttaagaaaagttacccttgggcagtgtattagttttctattgctgtgtgacaaattaccccaaatttagcagtttaaattctctgctcagggtcttaaaggctgaaataagggttggcaggacaacattccttcatggaggctctggggaagaatctgcttctaagttcattcaggttgttggcggaattcagttctttgctggctctcagctggaggcccctctctcacctcaaggctgcctgcattccttcttatgtggtcccctccagcttcaaaccagccttcctgctctttctcatgcttcatatctctctcccgtcctcctgttttaggggcatatgattagctcaagcccacagatatattttaaggttgattgtgcgatagaacataattgcaggagtactgtctcatctcatcatattcacgggttctggagattagctcattgaaagtgggaggggcattttcaaattctgcctaccacaggcaataactgcccatctcagctgtaggtggaatttttacccagaaaagataggccctagaagcctcatttcttttctccatggaaaaggacagccctctgctgcagcgttcaacttgtgtgtttactgacagagtgaactacagaaatagcttttcttcctaaaggggattgttctacattttgaagttattttttaataaaattgaattatgttgtgtattgtgcttcttaataggaaatgcattattggactgtttttgtaacatcctgtttattgcaaatagctagtatcgttcaaaaactgtataaaatacttttgtacatattagcaatgtctaatttgtatacacttcagttaaatttccctaaaacttgaaaggggaccttgtagaaattaaaatatatacttagtctaa

SEQ ID NO: 361811 - DNA, 5145 bp, Homo sapiens
tgttacccttgggacccggagggccgccggggccctggggtcccgaggggcctcgggcacccggggaagtcaaggagcagatcttctaggagtagatcttattccagatcatatacaagatcacgtagtctagctagttcacattcaaggtctaggtctccatcatctagatctcattcacgaaataaatacagtgatcattcacagtgtagtagatcatcttcatatacttctattagcagtgatgatggaaggcgagctaagaggagacttagatccagtgggaaaaaaaatagcgtttcacataaaaagcatagcagcagctctgaaaagacacttcacagtaaatatgtcaaaggtagagacaggtcttcatgtgtgagaaagtatagcgagagcagatcatctttagattattcttcagacagtgagcagtcaagtgttcaggccacacagtcagcccaggaaaaagagaagcagggccaaatggaaagaacacataataaacaagaaaaaaacagaggtgaagaaaaatccaagtctgaacgggaatgccctcattcaaaaaaaagaactttgaaagagaatctttctgatcaccttagaaatggcagtaagcccaaaaggaagaattatgctggtagtaaatgggactctgagtcaaattcagaacgagatgtcactaaaaacagtaaaaatgactcccatccatcctctgacaaggaagaaggtgaggccacatccgattctgaatcagaggttagtgaaattcacatcaaagtcaaacccacaaccaagtcgtccacaaatacttcactgcctgatgataatggtgcttggaaatcaagcaaacagcgcacatcaacttctgactctgaggggtcctgttccaattcggaaaacaataggggaaagccacaaaagcacaaacatgggtcaaaggaaaatcttaaaagagaacacaccaaaaaagtgaaagagaaattgaaagggaaaaaagacaaaaagcataaggctccaaaacgaaagcaagcatttcactggcagcctccactagaatttggtgaagaggaggaggaggagattgatgacaagcaagttactcaggaatcaaaagagaaaaaagtttctgaaaacaatgaaaccataaaagataatattctaaaaactgagaaatccagtgaagaggacctttcaggtaaacatgatacagtgactgtttcatcagatcttgatcagtttactaaagatgatagtaaactcagtatttctcccacagctttaaatactgaggaaaatgtggcctgtttacaaaacattcagcacgttgaagaaagtgttcccaatggagtggaagatgtgcttcaaacagatgacaacatggagatctgcactcctgataggagttccccagcaaaagtagaggagacttcccctctaggaaatgcacggcttgataccccagatataaacattgttttgaagcaggatatggcaacggaacatcctcaagcagaggtagtaaaacaggaaagcagcatgtccgaaagtaaagtgttgggtgaagtggggaaacaggacagcagctctgctagcttggctagtgctggagaaagtaccgggaagaaggaggtggctgagaagagccagatcaacctcattgataagaaatggaagcccctgcaaggtgtggggaacctggcagcacctaatgctgccacatccagtgctgtggaagttaaggtgttgaccactgtgcctgaaatgaaaccacaaggcttgagaatagaaattaaaagcaaaaataaagttcggcctgggtctctctttgatgaagtaagaaagacagcacgcttaaaccgtagaccaagaaatcaggagagttcaagtgatgagcagacgcctagtcgggatgatgatagccagtccaggagtccaagtagatctcgaagtaaatctgaaaccaaatcaagacacagaacaaggtctgtctcctatagtcactcaagaagtcgatcgagaagttccacatcatcttatcgatcaagaagctactctagaagtcggagcagaggatggtacagcagaggccgaaccagaagccggagcagttcctaccggagttacaaaagtcacaggacgtccagcaggagcagatccaggagcagctcatatgatccccacagtcgatccaggtcctacacctacgatagctactatagcaggagtcggagtcgaagtagaagccagagaagtgacagttaccaccgaggcagaagttataatcggcggtccaggagttgtagatcttatggctctgacagtgaaagtgaccgaagttactctcatcaccggagccccagtgagagcagcagatacagttgaaaacgtccggatacaaattatatcttatttgtaaatatctggcaacttagcttaagaaatgtaatgacagtctgttgttctatttcaatatcagaggtgaatttcaaaaatagacacttcttaattgttactggttcatttacatgtggggagaagaatttaaaatacagatatgtctcctaaaaatatttttatgccacattttacagtagccaactatggaaatgaatttcattttcttgaatcaagaaatcgtgaaatttatctatgtataatttgcaatattattttaagtctatttcactctatcttacgtatcccttagaatacagattctttttgcctgtttttccagttttagcatatatgctgccaagcatagaactgtgaaggagaactgttaaaggcggccaaatatttatatactgattacatagagtcttgtacatatgtgctctaaaaacaaaccacccagaattgatactgttggtaaccaggagtataaggcagtggctctggggttcttaattcattcctaacttctttgatacttcacaggattaggaaagtggtcatcatacatcccacacagtctgtattacttcaggcttgtgggcaaggttaggaagaatcaatcagccttaactataaatacctgcactgtctctgaggacttactattttatgttctttttaatcaataccgatcagaagtttaggttataaaaacaattctacttcatgctttggtgcttggtaatttttggtgcgtctttaagcattactcttatatatcatatattaaaataccataaaaatgaaattcagacaaaatcactggcaccaaaaatggtttattctgagctgtcttcactttgactatttggggggcttctctcaagtacagatgtgggttggggtcccctggagcaggcaggattggcagtaagagatattggccactcaagtctactgtgtgtgtgtgcctctggaagagtgaagaatggacttcaaaagtaacatcaaaaatctaactgccaccatcctggagacattttgcagggctttcctttcaagtctttcaagtacaggatattaccacaacagcagctgaactgttgtaaccagcatgtttttcctatttccactgtgacctgcagctgactcaaagccttgcgtgacctgacccaggtgcaagagacaggggaagagggatagagggtatagcataaattacatattttcatggctttgggtggttcctccaaaaataattggacctgtaaaaactagtgtgtgtgtgtgtgtgtgtgtgtgtgtgtgtgtggtttttttttttaatctttactttgaatttgttccccaagtgtacttaatcaccttagtgccagtttaatccagttatgcagaagaaattcatattggttgcctgatgtagagctcagcaccaccctaccacaggccttgtctggtgtatttgggaagtggaaaagagccctcagttggagggagctgacaacccttggtggagggagggtgcccttgaatgtattaaaactatcacccaaagaaggtatgaaaacagggtaaggtggtcagttgtttgccaggtcaatagacagaaagtacattagaaaacaggacttaggccaaacaaacaatactggatactgaatacaaaacagtatgatttatattaaaggtttccaaaggttgcctgcaaaggagaatattactactagtcagcaggaaaaaaatgcattcagaacccaagcagaaactgccaaatgtaattaggttaagaaaagttacccttgggcagtgtattagttttctattgctgtgtgacaaattaccccaaatttagcagtttaaaaaacaatacccatagcagttctgtagctcatgagtctggcacagtgtggctggattctctgctcagggtcttaaaggctgaaataagggttggcaggacaacattccttcatggaggctctggggaagaatctgcttctaagttcattcaggttgttggcggaattcagttctttgctggctctcagctggaggcccctctctcacctcaaggctgcctgcattccttcttatgtggtcccctccagcttcaaaccagccttcctgctctttctcatgcttcatatctctctcccgtcctcctgttttaggggcatatgattagctcaagcccacagatatattttaaggttgattgtgcgatagaacataattgcaggagtactgtctcatctcatcatattcacgggttctggagattagctcattgaaagtgggaggggcattttcaaattctgcctaccacaggcaataactgcccatctcagctgtaggtggaatttttacccagaaaagataggccctagaagcctcatttcttttctccatggaaaaggacagccctctgctgcagcgttcaacttgtgtgtttactgacagagtgaactacagaaatagcttttcttcctaaaggggattgttctacattttgaagttattttttaataaaattgaattatgttgtgtattgtgcttcttaataggaaatgcattattggactgtttttgtaacatcctgtttattgcaaatagctagtatcgttcaaaaactgtataaaatacttttgtacatattagcaatgtctaatttgtatacacttcagttaaatttccctaaaacttgaaaggggaccttgtagaaattaaaatatatacttagtctaa

SEQ ID NO: 361812 - DNA, 4930 bp, Homo sapiens
tctctctctctctctctctctctctctctctctctctctctctctctctctctctctctctctctctctctctctctctctcgtttcacataaaaagcatagcagcagctctgaaaagacacttcacagtaaatatgtcaaaggtagagacaggtcttcatgtgtgagaaagtatagcgagagcagatcatctttagattattcttcagacagtgagcagtcaagtgttcaggccacacagtcagcccaggaaaaagagaagcagggccaaatggaaagaacacataataaacaagaaaaaaacagaggtgaagaaaaatccaagtctgaacgggaatgccctcattcaaaaaaaagaactttgaaagagaatctttctgatcaccttagaaatggcagtaagcccaaaaggaagaattatgctggtagtaaatgggactctgagtcaaattcagaacgagatgtcactaaaaacagtaaaaatgactcccatccatcctctgacaaggaagaaggtgaggccacatccgattctgaatcagaggttagtgaaattcacatcaaagtcaaacccacaaccaagtcgtccacaaatacttcactgcctgatgataatggtgcttggaaatcaagcaaacagcgcacatcaacttctgactctgaggggtcctgttccaattcggaaaacaataggggaaagccacaaaagcacaaacatgggtcaaaggaaaatcttaaaagagaacacaccaaaaaagtgaaagagaaattgaaagggaaaaaagacaaaaagcataaggctccaaaacgaaagcaagcatttcactggcagcctccactagaatttggtgaagaggaggaggaggagattgatgacaagcaagttactcaggaatcaaaagagaaaaaagtttctgaaaacaatgaaaccataaaagataatattctaaaaactgagaaatccagtgaagaggacctttcaggtaaacatgatacagtgactgtttcatcagatcttgatcagtttactaaagatgatagtaaactcagtatttctcccacagctttaaatactgaggaaaatgtggcctgtttacaaaacattcagcacgttgaagaaagtgttcccaatggagtggaagatgtgcttcaaacagatgacaacatggagatctgcactcctgataggagttccccagcaaaagtagaggagacttcccctctaggaaatgcacggcttgataccccagatataaacattgttttgaagcaggatatggcaacggaacatcctcaagcagaggtagtaaaacaggaaagcagcatgtccgaaagtaaagtgttgggtgaagtggggaaacaggacagcagctctgctagcttggctagtgctggagaaagtaccgggaagaaggaggtggctgagaagagccagatcaacctcattgataagaaatggaagcccctgcaaggtgtggggaacctggcagcacctaatgctgccacatccagtgctgtggaagttaaggtgttgaccactgtgcctgaaatgaaaccacaaggcttgagaatagaaattaaaagcaaaaataaagttcggcctgggtctctctttgatgaagtaagaaagacagcacgcttaaaccgtagaccaagaaatcaggagagttcaagtgatgagcagacgcctagtcgggatgatgatagccagtccaggagtccaagtagatctcgaagtaaatctgaaaccaaatcaagacacagaacaaggtctgtctcctatagtcactcaagaagtcgatcgagaagttccacatcatcttatcgatcaagaagctactctagaagtcggagcagaggatggtacagcagaggccgaaccagaagccggagcagttcctaccggagttacaaaagtcacaggacgtccagcaggagcagatccaggagcagctcatatgatccccacagtcgatccaggtcctacacctacgatagctactatagcaggagtcggagtcgaagtagaagccagagaagtgacagttaccaccgaggcagaagttataatcggcggtccaggagttgtagatcttatggctctgacagtgaaagtgaccgaagttactctcatcaccggagccccagtgagagcagcagatacagttgaaaacgtccggatacaaattatatcttatttgtaaatatctggcaacttagcttaagaaatgtaatgacagtctgttgttctatttcaatatcagaggtgaatttcaaaaatagacacttcttaattgttactggttcatttacatgtggggagaagaatttaaaatacagatatgtctcctaaaaatatttttatgccacattttacagtagccaactatggaaatgaatttcattttcttgaatcaagaaatcgtgaaatttatctatgtataatttgcaatattattttaagtctatttcactctatcttacgtatcccttagaatacagattctttttgcctgtttttccagttttagcatatatgctgccaagcatagaactgtgaaggagaactgttaaaggcggccaaatatttatatactgattacatagagtcttgtacatatgtgctctaaaaacaaaccacccagaattgatactgttggtaaccaggagtataaggcagtggctctggggttcttaattcattcctaacttctttgatacttcacaggattaggaaagtggtcatcatacatcccacacagtctgtattacttcaggcttgtgggcaaggttaggaagaatcaatcagccttaactataaatacctgcactgtctctgaggacttactattttatgttctttttaatcaataccgatcagaagtttaggttataaaaacaattctacttcatgctttggtgcttggtaatttttggtgcgtctttaagcattactcttatatatcatatattaaaataccataaaaatgaaattcagacaaaatcactggcaccaaaaatggtttattctgagctgtcttcactttgactatttggggggcttctctcaagtacagatgtgggttggggtcccctggagcaggcaggattggcagtaagagatattggccactcaagtctactgtgtgtgtgtgcctctggaagagtgaagaatggacttcaaaagtaacatcaaaaatctaactgccaccatcctggagacattttgcagggctttcctttcaagtctttcaagtacaggatattaccacaacagcagctgaactgttgtaaccagcatgtttttcctatttccactgtgacctgcagctgactcaaagccttgcgtgacctgacccaggtgcaagagacaggggaagagggatagagggtatagcataaattacatattttcatggctttgggtggttcctccaaaaataattggacctgtaaaaactagtgtgtgtgtgtgtgtgtgtgtgtgtgtgtgtgtggtttttttttttaatctttactttgaatttgttccccaagtgtacttaatcaccttagtgccagtttaatccagttatgcagaagaaattcatattggttgcctgatgtagagctcagcaccaccctaccacaggccttgtctggtgtatttgggaagtggaaaagagccctcagttggagggagctgacaacccttggtggagggagggtgcccttgaatgtattaaaactatcacccaaagaaggtatgaaaacagggtaaggtggtcagttgtttgccaggtcaatagacagaaagtacattagaaaacaggacttaggccaaacaaacaatactggatactgaatacaaaacagtatgatttatattaaaggtttccaaaggttgcctgcaaaggagaatattactactagtcagcaggaaaaaaatgcattcagaacccaagcagaaactgccaaatgtaattaggttaagaaaagttacccttgggcagtgtattagttttctattgctgtgtgacaaattaccccaaatttagcagtttaaaaaacaatacccatagcagttctgtagctcatgagtctggcacagtgtggctggattctctgctcagggtcttaaaggctgaaataagggttggcaggacaacattccttcatggaggctctggggaagaatctgcttctaagttcattcaggttgttggcggaattcagttctttgctggctctcagctggaggcccctctctcacctcaaggctgcctgcattccttcttatgtggtcccctccagcttcaaaccagccttcctgctctttctcatgcttcatatctctctcccgtcctcctgttttaggggcatatgattagctcaagcccacagatatattttaaggttgattgtgcgatagaacataattgcaggagtactgtctcatctcatcatattcacgggttctggagattagctcattgaaagtgggaggggcattttcaaattctgcctaccacaggcaataactgcccatctcagctgtaggtggaatttttacccagaaaagataggccctagaagcctcatttcttttctccatggaaaaggacagccctctgctgcagcgttcaacttgtgtgtttactgacagagtgaactacagaaatagcttttcttcctaaaggggattgttctacattttgaagttattttttaataaaattgaattatgttgtgtattgtgcttcttaataggaaatgcattattggactgtttttgtaacatcctgtttattgcaaatagctagtatcgttcaaaaactgtataaaatacttttgtacatattagcaatgtctaatttgtatacacttcagttaaatttccctaaaacttgaaaggggaccttgtagaaattaaaatatatacttagtctaa

SEQ ID NO: 361813 - DNA, 2178 bp, Homo sapiens
gtactctcgcggtatttgtcccgactctcgcggggtttagcgtggcattgggaggcccggcctgggggaggagacggcgttccgttagcggcgttggggtttggctgcagtggcagtgctttctcttctgctcacggggacccgctcaggctggaggccagccagctcttgccgccacctcggtcgcgatgggggcgcaggaccggccgcagtgccacttcgacatcgagatcaaccgggagccggttggtcgcattatgtttcagctcttctcagacatatgtccaaaaacatgcaaaaacttcctttgcttgtgctcaggagagaaaggccttgggaaaacaactgggaagaagttatgttataaaggttctacgttccatcgtgtggttaaaaactttatgattcagggtggggacttcagtgaaggtaatggaaaaggtggagaatcaatttatggtggatattttaaaggtaaggcttaatattttacggtcttttgtttcagttctgatattaaagcaagtttgatcatatacttttaatgagaagaggtttacttatagttcactttttgcatgaaactaatgctgcatgaaaatactttatttgcatgaatttggggaagagggatagagggtatagcataaattacatattttcatggctttgggtggttcctccaaaaataattggacctgtaaaaactagtgtgtgtgtgtgtgtgtgtgtgtgtgtgtgtgtggtttttttttttaatctttactttgaatttgttccccaagtgtacttaatcaccttagtgccagtttaatccagttatgcagaagaaattcatattggttgcctgatgtagagctcagcaccaccctaccacaggccttgtctggtgtatttgggaagtggaaaagagccctcagttggagggagctgacaacccttggtggagggagggtgcccttgaatgtattaaaactatcacccaaagaaggtatgaaaacagggtaaggtggtcagttgtttgccaggtcaatagacagaaagtacattagaaaacaggacttaggccaaacaaacaatactggatactgaatacaaaacagtatgatttatattaaaggtttccaaaggttgcctgcaaaggagaatattactactagtcagcaggaaaaaaatgcattcagaacccaagcagaaactgccaaatgtaattaggttaagaaaagttacccttgggcagtgtattagttttctattgctgtgtgacaaattaccccaaatttagcagtttaaaaaacaatacccatagcagttctgtagctcatgagtctggcacagtgtggctggattctctgctcagggtcttaaaggctgaaataagggttggcaggacaacattccttcatggaggctctggggaagaatctgcttctaagttcattcaggttgttggcggaattcagttctttgctggctctcagctggaggcccctctctcacctcaaggctgcctgcattccttcttatgtggtcccctccagcttcaaaccagccttcctgctctttctcatgcttcatatctctctcccgtcctcctgttttaggggcatatgattagctcaagcccacagatatattttaaggttgattgtgcgatagaacataattgcaggagtactgtctcatctcatcatattcacgggttctggagattagctcattgaaagtgggaggggcattttcaaattctgcctaccacaggcaataactgcccatctcagctgtaggtggaatttttacccagaaaagataggccctagaagcctcatttcttttctccatggaaaaggacagccctctgctgcagcgttcaacttgtgtgtttactgacagagtgaactacagaaatagcttttcttcctaaaggggattgttctacattttgaagttattttttaataaaattgaattatgttgtgtattgtgcttcttaataggaaatgcattattggactgtttttgtaacatcctgtttattgcaaatagctagtatcgttcaaaaactgtataaaatacttttgtacatattagcaatgtctaatttgtatacacttcagttaaatttccctaaaacttgaaaggggaccttgtagaaattaaaatatatacttagtctaa

SEQ ID NO: 361814 - DNA, 5714 bp, Homo sapiens
  misc_feature (5712)..(5712): n is a, c, g, or t
ggtttttttttttaagtgttttgttttgttgttttggagttgagagtaactttaatttttatgtgtattcatgctgtgtatttatggctacaagtcaaactgatttcatatgtatgcatacatatagtctaatagagatgattgtaattcattataatcttgagttttttaaattagtaagatggctactattgctgttttggggtttttaaggttagatatatatcatgtttaactttttcccctatctttttatctttacttctttgttctctacatgctgtgtttaaacctttctgctctcttcacctgaacacatcgtgtttgacatcatctttgtgttgatgtttattacatagtaccacaaagcctgctccacacctggatggggtgcatgtagtctttggactggttatttctggttttgaagtaatcgaacaaattgaaaatctgaagaccgatgctgcaagcagaccatatgcagatgtgcgagttattgactgtggagtacttgccacaaaatcaataaaagatgtttttgagaaaaaaaggaagaaaccaactcattcagaaggctcggattcctcttccaattcctcctcttcttcagaatcatcttcagaaagtgaacttgaacatgagagaagcagaaggaggaaacataagaggaggccaaaagttaaacgttctaaaaagaggcgaaaggaagcaagcagttcagaagagccaaggaataaacatgcaatgaacccaaaaggtcactctgagaggagtgataccaatgaaaaaaggtcagttgattccagtgctaaaagggaaaaacctgtggtccgcccagaagagattcctccagtgcctgagaaccgatttttactgagaagagatatgcctgttgttactgcagaacctgaaccgaagattcctgatgttgcacccattgtaagtgatcagaaaccatctgtatcaaagtctggacggaagattaaaggaaggggcacaattcgctatcacacacctccaagatcaagatcctgttctgagtcagatgatgatgacagcagtgaaactcctcctcactggaaagaggaaatgcagagattaagagcatatagaccacctagtggagaaaaatggagtaaaggagataagttaagtgacccctgttcaagccgatgggatgaaagaagcttgtctcagagatccagatcatggtcctataatggatattattcagaccttagtacagcaagacactctggccaccataaaaaacgcagaaaagaaaaaaaggttaagcataaaaagaaagggaaaaagcagaaacactgcagaagacacaaacaaacaaagaagagaaggattcttataccgtctgacatagaatcctcaaaatcttccactcgaagaatgaaatcctcttgtgatagagaaaggagttctcgttcttcctcattgtcatctcatcactcatcaaagagagactggtctaaatctgataaggatgtccagagctctttaacccattccagcagagactcatacagatcaaaatctcactcacagtcttattctagaggaagctcaagatcaaggactgcgtcaaagtcctcatcacattctcgaagtagatcaaagtccagatctagttccaagtctgggcaccgaaagagagcatcaaaatcaccaagaaaaacagcttctcagttaagtgaaaataaaccagttaaaacagaacctttaagagcaaccatggcacaaaatgaaaatgtagtagtacaaccagttgtagcagaaaatattcctgtaataccactgagtgacagtccccccccttcaagatggaagcctggacagaaaccttggaagccctcttatgagcgaattcaggaaatgaaagctaaaacaacccatttgctacccatccaaagcacttacagtttagcaaatattaaagagactggtagctcatcatcctaccataaaagagaaaaaaattcggaaagtgatcagagcacttattcaaaatacagtgatagaagttcagaaagctcaccaaggtcaaggagcagatcttctaggagtagatcttattccagatcatatacaagatcacgtagtctagctagttcacattcaaggtctaggtctccatcatctagatctcattcacgaaataaatacagtgatcattcacagtgtagtagatcatcttcatatacttctattagcagtgatgatggaaggcgagctaagaggagacttagatccagtgggaaaaaaaatagcgtttcacataaaaagcatagcagcagctctgaaaagacacttcacagtaaatatgtcaaaggtagagacaggtcttcatgtgtgagaaagtatagcgagagcagatcatctttagattattcttcagacagtgagcagtcaagtgttcaggccacacagtcagcccaggaaaaagagaagcagggccaaatggaaagaacacataataaacaagaaaaaaacagaggtgaagaaaaatccaagtctgaacgggaatgccctcattcaaaaaaaagaactttgaaagagaatctttctgatcaccttagaaatggcagtaagcccaaaaggaagaattatgctggtagtaaatgggactctgagtcaaattcagaacgagatgtcactaaaaacagtaaaaatgactcccatccatcctctgacaaggaagaaggtgaggccacatccgattctgaatcagaggttagtgaaattcacatcaaagtcaaacccacaaccaagtcgtccacaaatacttcactgcctgatgataatggtgcttggaaatcaagcaaacagcgcacatcaacttctgactctgaggggtcctgttccaattcggaaaacaataggggaaagccacaaaagcacaaacatgggtcaaaggaaaatcttaaaagagaacacaccaaaaaagtgaaagagaaattgaaagggaaaaaagacaaaaagcataaggctccaaaacgaaagcaagcatttcactggcagcctccactagaatttggtgaagaggaggaggaggagattgatgacaagcaagttactcaggaatcaaaagagaaaaaagtttctgaaaacaatgaaaccataaaagataatattctaaaaactgagaaatccagtgaagaggacctttcaggtaaacatgatacagtgactgtttcatcagatcttgatcagtttactaaagatgatagtaaactcagtatttctcccacagctttaaatactgaggaaaatgtggcctgtttacaaaacattcagcacgttgaagaaagtgttcccaatggagtggaagatgtgcttcaaacagatgacaacatggagatctgcactcctgataggagttccccagcaaaagtagaggagacttcccctctaggaaatgcacggcttgataccccagatataaacattgttttgaagcaggatatggcaacggaacatcctcaagcagaggtagtaaaacaggaaagcagcatgtccgaaagtaaagtgttgggtgaagtggggaaacaggacagcagctctgctagcttggctagtgctggagaaagtaccgggaagaaggaggtggctgagaagagccagatcaacctcattgataagaaatggaagcccctgcaaggtgtggggaacctggcagcacctaatgctgccacatccagtgctgtggaagttaaggtgttgaccactgtgcctgaaatgaaaccacaaggcttgagaatagaaattaaaagcaaaaataaagttcggcctgggtctctctttgatgaagtaagaaagacagcacgcttaaaccgtagaccaagaaatcaggagagttcaagtgatgagcagacgcctagtcgggatgatgatagccagtccaggagtccaagtagatctcgaagtaaatctgaaaccaaatcaagacacagaacaaggtctgtctcctatagtcactcaagaagtcgatcgagaagttccacatcatcttatcgatcaagaagctactctagaagtcggagcagaggatggtacagcagaggccgaaccagaagccggagcagttcctaccggagttacaaaagtcacaggacgtccagcaggagcagatccaggagcagctcatatgatccccacagtcgatccaggtcctacacctacgatagctactatagcaggagtcggagtcgaagtagaagccagagaagtgacagttaccaccgaggcagaagttataatcggcggtccaggagttgtagatcttatggctctgacagtgaaagtgaccgaagttactctcatcaccggagccccagtgagagcagcagatacagttgaaaacgtccggatacaaattatatcttatttgtaaatatctggcaacttagcttaagaaatgtaatgacagtctgttgttctatttcaatatcagaggtgaatttcaaaaatagacacttcttaattgttactggttcatttacatgtggggagaagaatttaaaatacagatatgtctcctaaaaatatttttatgccacattttacagtagccaactatggaaatgaatttcattttcttgaatcaagaaatcgtgaaatttatctatgtataatttgcaatattattttaagtctatttcactctatcttacgtatcccttagaatacagattctttttgcctgtttttccagttttagcatatatgctgccaagcatagaactgtgaaggagaactgttaaaggcggccaaatatttatatactgattacatagagtcttgtacatatgtgctctaaaaacaaaccacccagaattgatactgttggtaaccaggagtataaggcagtggctctggggttcttaattcattcctaacttctttgatacttcacaggattaggaaagtggtcatcatacatcccacacagtctgtattacttcaggcttgtgggcaaggttaggaagaatcaatcagccttaactataaatacctgcactgtctctgaggacttactattttatgttctttttaatcaataccgatcagaagtttaggttataaaaacaattctacttcatgctttggtgcttggtaatttttggtgcgtctttaagcattactcttatatatcatatattaaaataccataaaaatgaaattcagacaaaatcactggcaccaaaaatggtttattctgagctgtcttcactttgactatttggggggcttctctcaagtacagatgtgggttggggtcccctggagcaggcaggattggcagtaagagatattggccactcaagtctactgtgtgtgtgtgcctctggaagagtgaagaatggacttcaaaagtaacatcaaaaatctaactgccaccatcctggagacattttgcagggctttcctttcaagtctttcaagtacaggatattaccacaacagcagctgaactgttgtaaccagcatgtttttcctatttccactgtgacctgcagctgactcaaagccttgcgtgacctgacccaggtgcaagagacaggggaagagggatagagggtatagcataaattacatattttcatggctttgggtggttcctccaaaaataattggacctgtaaaaactagtgtgtgtgtgtgtgtgtgtgtgtgtaaaataaagataaacccttnta

SEQ ID NO: 361815 - DNA, 5723 bp, Homo sapiens
ggtttttttttttaagtgttttgttttgttgttttggagttgagagtaactttaatttttatgtgtattcatgctgtgtatttatggctacaagtcaaactgatttcatatgtatgcatacatatagtctaatagagatgattgtaattcattataatcttgagttttttaaattagtaagatggctactattgctgttttggggtttttaaggttagatatatatcatgtttaactttttcccctatctttttatctttacttctttgttctctacatgctgtgtttaaacctttctgctctcttcacctgaacacatcgtgtttgacatcatctttgtgttgatgtttattacatagtaccacaaagcctgctccacacctggatggggtgcatgtagtctttggactggttatttctggttttgaagtaatcgaacaaattgaaaatctgaagaccgatgctgcaagcagaccatatgcagatgtgcgagttattgactgtggagtacttgccacaaaatcaataaaagatgtttttgagaaaaaaaggaagaaaccaactcattcagaaggctcggattcctcttccaattcctcctcttcttcagaatcatcttcagaaagtgaacttgaacatgagagaagcagaaggaggaaacataagaggaggccaaaagttaaacgttctaaaaagaggcgaaaggaagcaagcagttcagaagagccaaggaataaacatgcaatgaacccaaaaggtcactctgagaggagtgataccaatgaaaaaaggtcagttgattccagtgctaaaagggaaaaacctgtggtccgcccagaagagattcctccagtgcctgagaaccgatttttactgagaagagatatgcctgttgttactgcagaacctgaaccgaagattcctgatgttgcacccattgtaagtgatcagaaaccatctgtatcaaagtctggacggaagattaaaggaaggggcacaattcgctatcacacacctccaagatcaagatcctgttctgagtcagatgatgatgacagcagtgaaactcctcctcactggaaagaggaaatgcagagattaagagcatatagaccacctagtggagaaaaatggagtaaaggagataagttaagtgacccctgttcaagccgatgggatgaaagaagcttgtctcagagatccagatcatggtcctataatggatattattcagaccttagtacagcaagacactctggccaccataaaaaacgcagaaaagaaaaaaaggttaagcataaaaagaaagggaaaaagcagaaacactgcagaagacacaaacaaacaaagaagagaaggattcttataccgtctgacatagaatcctcaaaatcttccactcgaagaatgaaatcctcttgtgatagagaaaggagttctcgttcttcctcattgtcatctcatcactcatcaaagagagactggtctaaatctgataaggatgtccagagctctttaacccattccagcagagactcatacagatcaaaatctcactcacagtcttattctagaggaagctcaagatcaaggactgcgtcaaagtcctcatcacattctcgaagtagatcaaagtccagatctagttccaagtctgggcaccgaaagagagcatcaaaatcaccaagaaaaacagcttctcagttaagtgaaaataaaccagttaaaacagaacctttaagagcaaccatggcacaaaatgaaaatgtagtagtacaaccagttgtagcagaaaatattcctgtaataccactgagtgacagtccccccccttcaagatggaagcctggacagaaaccttggaagccctcttatgagcgaattcaggaaatgaaagctaaaacaacccatttgctacccatccaaagcacttacagtttagcaaatattaaagagactggtagctcatcatcctaccataaaagagaaaaaaattcggaaagtgatcagagcacttattcaaaatacagtgatagaagttcagaaagctcaccaaggtcaaggagcagatcttctaggagtagatcttattccagatcatatacaagatcacgtagtctagctagttcacattcaaggtctaggtctccatcatctagatctcattcacgaaataaatacagtgatcattcacagtgtagtagatcatcttcatatacttctattagcagtgatgatggaaggcgagctaagaggagacttagatccagtgggaaaaaaaatagcgtttcacataaaaagcatagcagcagctctgaaaagacacttcacagtaaatatgtcaaaggtagagacaggtcttcatgtgtgagaaagtatagcgagagcagatcatctttagattattcttcagacagtgagcagtcaagtgttcaggccacacagtcagcccaggaaaaagagaagcagggccaaatggaaagaacacataataaacaagaaaaaaacagaggtgaagaaaaatccaagtctgaacgggaatgccctcattcaaaaaaaagaactttgaaagagaatctttctgatcaccttagaaatggcagtaagcccaaaaggaagaattatgctggtagtaaatgggactctgagtcaaattcagaacgagatgtcactaaaaacagtaaaaatgactcccatccatcctctgacaaggaagaaggtgaggccacatccgattctgaatcagaggttagtgaaattcacatcaaagtcaaacccacaaccaagtcgtccacaaatacttcactgcctgatgataatggtgcttggaaatcaagcaaacagcgcacatcaacttctgactctgaggggtcctgttccaattcggaaaacaataggggaaagccacaaaagcacaaacatgggtcaaaggaaaatcttaaaagagaacacaccaaaaaagtgaaagagaaattgaaagggaaaaaagacaaaaagcataaggctccaaaacgaaagcaagcatttcactggcagcctccactagaatttggtgaagaggaggaggaggagattgatgacaagcaagttactcaggaatcaaaagagaaaaaagtttctgaaaacaatgaaaccataaaagataatattctaaaaactgagaaatccagtgaagaggacctttcaggtaaacatgatacagtgactgtttcatcagatcttgatcagtttactaaagatgatagtaaactcagtatttctcccacagctttaaatactgaggaaaatgtggcctgtttacaaaacattcagcacgttgaagaaagtgttcccaatggagtggaagatgtgcttcaaacagatgacaacatggagatctgcactcctgataggagttccccagcaaaagtagaggagacttcccctctaggaaatgcacggcttgataccccagatataaacattgttttgaagcaggatatggcaacggaacatcctcaagcagaggtagtaaaacaggaaagcagcatgtccgaaagtaaagtgttgggtgaagtggggaaacaggacagcagctctgctagcttggctagtgctggagaaagtaccgggaagaaggaggtggctgagaagagccagatcaacctcattgataagaaatggaagcccctgcaaggtgtggggaacctggcagcacctaatgctgccacatccagtgctgtggaagttaaggtgttgaccactgtgcctgaaatgaaaccacaaggcttgagaatagaaattaaaagcaaaaataaagttcggcctgggtctctctttgatgaagtaagaaagacagcacgcttaaaccgtagaccaagaaatcaggagagttcaagtgatgagcagacgcctagtcgggatgatgatagccagtccaggagtccaagtagatctcgaagtaaatctgaaaccaaatcaagacacagaacaaggtctgtctcctatagtcactcaagaagtcgatcgagaagttccacatcatcttatcgatcaagaagctactctagaagtcggagcagaggatggtacagcagaggccgaaccagaagccggagcagttcctaccggagttacaaaagtcacaggacgtccagcaggagcagatccaggagcagctcatatgatccccacagtcgatccaggtcctacacctacgatagctactatagcaggagtcggagtcgaagtagaagccagagaagtgacagttaccaccgaggcagaagttataatcggcggtccaggagttgtagatcttatggctctgacagtgaaagtgaccgaagttactctcatcaccggagccccagtgagagcagcagatacagttgaaaacgtccggatacaaattatatcttatttgtaaatatctggcaacttagcttaagaaatgtaatgacagtctgttgttctatttcaatatcagaggtgaatttcaaaaatagacacttcttaattgttactggttcatttacatgtggggagaagaatttaaaatacagatatgtctcctaaaaatatttttatgccacattttacagtagccaactatggaaatgaatttcattttcttgaatcaagaaatcgtgaaatttatctatgtataatttgcaatattattttaagtctatttcactctatcttacgtatcccttagaatacagattctttttgcctgtttttccagttttagcatatatgctgccaagcatagaactgtgaaggagaactgttaaaggcggccaaatatttatatactgattacatagagtcttgtacatatgtgctctaaaaacaaaccacccagaattgatactgttggtaaccaggagtataaggcagtggctctggggttcttaattcattcctaacttctttgatacttcacaggattaggaaagtggtcatcatacatcccacacagtctgtattacttcaggcttgtgggcaaggttaggaagaatcaatcagccttaactataaatacctgcactgtctctgaggacttactattttatgttctttttaatcaataccgatcagaagtttaggttataaaaacaattctacttcatgctttggtgcttggtaatttttggtgcgtctttaagcattactcttatatatcatatattaaaataccataaaaatgaaattcagacaaaatcactggcaccaaaaatggtttattctgagctgtcttcactttgactatttggggggcttctctcaagtacagatgtgggttggggtcccctggagcaggcaggattggcagtaagagatattggccactcaagtctactgtgtgtgtgtgtgagcgagtgtaagaacatgaccttgtactgtgaacatgttacctaggagtacttagtcaccttagtgtcacgttaatccagatatgctgaccaaattgatatagtatgcctgccgttcagctcatgactgcactacgagaggacttggatgctgtatgtgggatgtgcacaagagccctcaggttgaggaacgttgacaacaacttgctggaggcaagtgagcccctgtattgagtggctactatcacttaaagaacgccttgaaaacagggtaatgtggttcacttgtatgctggcaagtaatccaacgggtcttgtttaactatgactatagctcgactaaccattcttgcatatggaagc

SEQ ID NO: 361816 - DNA, 5604 bp, Homo sapiens
ggtttttttttttaagtgttttgttttgttgttttggagttgagagtaactttaatttttatgtgtattcatgctgtgtatttatggctacaagtcaaactgatttcatatgtatgcatacatatagtctaatagagatgattgtaattcattataatcttgagttttttaaattagtaagatggctactattgctgttttggggtttttaaggttagatatatatcatgtttaactttttcccctatctttttatctttacttctttgttctctacatgctgtgtttaaacctttctgctctcttcacctgaacacatcgtgtttgacatcatctttgtgttgatgtttattacatagtaccacaaagcctgctccacacctggatggggtgcatgtagtctttggactggttatttctggttttgaagtaatcgaacaaattgaaaatctgaagaccgatgctgcaagcagaccatatgcagatgtgcgagttattgactgtggagtacttgccacaaaatcaataaaagatgtttttgagaaaaaaaggaagaaaccaactcattcagaaggctcggattcctcttccaattcctcctcttcttcagaatcatcttcagaaagtgaacttgaacatgagagaagcagaaggaggaaacataagaggaggccaaaagttaaacgttctaaaaagaggcgaaaggaagcaagcagttcagaagagccaaggaataaacatgcaatgaacccaaaaggtcactctgagaggagtgataccaatgaaaaaaggtcagttgattccagtgctaaaagggaaaaacctgtggtccgcccagaagagattcctccagtgcctgagaaccgatttttactgagaagagatatgcctgttgttactgcagaacctgaaccgaagattcctgatgttgcacccattgtaagtgatcagaaaccatctgtatcaaagtctggacggaagattaaaggaaggggcacaattcgctatcacacacctccaagatcaagatcctgttctgagtcagatgatgatgacagcagtgaaactcctcctcactggaaagaggaaatgcagagattaagagcatatagaccacctagtggagaaaaatggagtaaaggagataagttaagtgacccctgttcaagccgatgggatgaaagaagcttgtctcagagatccagatcatggtcctataatggatattattcagaccttagtacagcaagacactctggccaccataaaaaacgcagaaaagaaaaaaaggttaagcataaaaagaaagggaaaaagcagaaacactgcagaagacacaaacaaacaaagaagagaaggattcttataccgtctgacatagaatcctcaaaatcttccactcgaagaatgaaatcctcttgtgatagagaaaggagttctcgttcttcctcattgtcatctcatcactcatcaaagagagactggtctaaatctgataaggatgtccagagctctttaacccattccagcagagactcatacagatcaaaatctcactcacagtcttattctagaggaagctcaagatcaaggactgcgtcaaagtcctcatcacattctcgaagtagatcaaagtccagatctagttccaagtctgggcaccgaaagagagcatcaaaatcaccaagaaaaacagcttctcagttaagtgaaaataaaccagttaaaacagaacctttaagagcaaccatggcacaaaatgaaaatgtagtagtacaaccagttgtagcagaaaatattcctgtaataccactgagtgacagtccccccccttcaagatggaagcctggacagaaaccttggaagccctcttatgagcgaattcaggaaatgaaagctaaaacaacccatttgctacccatccaaagcacttacagtttagcaaatattaaagagactggtagctcatcatcctaccataaaagagaaaaaaattcggaaagtgatcagagcacttattcaaaatacagtgatagaagttcagaaagctcaccaaggtcaaggagcagatcttctaggagtagatcttattccagatcatatacaagatcacgtagtctagctagttcacattcaaggtctaggtctccatcatctagatctcattcacgaaataaatacagtgatcattcacagtgtagtagatcatcttcatatacttctattagcagtgatgatggaaggcgagctaagaggagacttagatccagtgggaaaaaaaatagcgtttcacataaaaagcatagcagcagctctgaaaagacacttcacagtaaatatgtcaaaggtagagacaggtcttcatgtgtgagaaagtatagcgagagcagatcatctttagattattcttcagacagtgagcagtcaagtgttcaggccacacagtcagcccaggaaaaagagaagcagggccaaatggaaagaacacataataaacaagaaaaaaacagaggtgaagaaaaatccaagtctgaacgggaatgccctcattcaaaaaaaagaactttgaaagagaatctttctgatcaccttagaaatggcagtaagcccaaaaggaagaattatgctggtagtaaatgggactctgagtcaaattcagaacgagatgtcactaaaaacagtaaaaatgactcccatccatcctctgacaaggaagaaggtgaggccacatccgattctgaatcagaggttagtgaaattcacatcaaagtcaaacccacaaccaagtcgtccacaaatacttcactgcctgatgataatggtgcttggaaatcaagcaaacagcgcacatcaacttctgactctgaggggtcctgttccaattcggaaaacaataggggaaagccacaaaagcacaaacatgggtcaaaggaaaatcttaaaagagaacacaccaaaaaagtgaaagagaaattgaaagggaaaaaagacaaaaagcataaggctccaaaacgaaagcaagcatttcactggcagcctccactagaatttggtgaagaggaggaggaggagattgatgacaagcaagttactcaggaatcaaaagagaaaaaagtttctgaaaacaatgaaaccataaaagataatattctaaaaactgagaaatccagtgaagaggacctttcaggtaaacatgatacagtgactgtttcatcagatcttgatcagtttactaaagatgatagtaaactcagtatttctcccacagctttaaatactgaggaaaatgtggcctgtttacaaaacattcagcacgttgaagaaagtgttcccaatggagtggaagatgtgcttcaaacagatgacaacatggagatctgcactcctgataggagttccccagcaaaagtagaggagacttcccctctaggaaatgcacggcttgataccccagatataaacattgttttgaagcaggatatggcaacggaacatcctcaagcagaggtagtaaaacaggaaagcagcatgtccgaaagtaaagtgttgggtgaagtggggaaacaggacagcagctctgctagcttggctagtgctggagaaagtaccgggaagaaggaggtggctgagaagagccagatcaacctcattgataagaaatggaagcccctgcaaggtgtggggaacctggcagcacctaatgctgccacatccagtgctgtggaagttaaggtgttgaccactgtgcctgaaatgaaaccacaaggcttgagaatagaaattaaaagcaaaaataaagttcggcctgggtctctctttgatgaagtaagaaagacagcacgcttaaaccgtagaccaagaaatcaggagagttcaagtgatgagcagacgcctagtcgggatgatgatagccagtccaggagtccaagtagatctcgaagtaaatctgaaaccaaatcaagacacagaacaaggtctgtctcctatagtcactcaagaagtcgatcgagaagttccacatcatcttatcgatcaagaagctactctagaagtcggagcagaggatggtacagcagaggccgaaccagaagccggagcagttcctaccggagttacaaaagtcacaggacgtccagcaggagcagatccaggagcagctcatatgatccccacagtcgatccaggtcctacacctacgatagctactatagcaggagtcggagtcgaagtagaagccagagaagtgacagttaccaccgaggcagaagttataatcggcggtccaggagttgtagatcttatggctctgacagtgaaagtgaccgaagttactctcatcaccggagccccagtgagagcagcagatacagttgaaaacgtccggatacaaattatatcttatttgtaaatatctggcaacttagcttaagaaatgtaatgacagtctgttgttctatttcaatatcagaggtgaatttcaaaaatagacacttcttaattgttactggttcatttacatgtggggagaagaatttaaaatacagatatgtctcctaaaaatatttttatgccacattttacagtagccaactatggaaatgaatttcattttcttgaatcaagaaatcgtgaaatttatctatgtataatttgcaatattattttaagtctatttcactctatcttacgtatcccttagaatacagattctttttgcctgtttttccagttttagcatatatgctgccaagcatagaactgtgaaggagaactgttaaaggcggccaaatatttatatactgattacatagagtcttgtacatatgtgctctaaaaacaaaccacccagaattgatactgttggtaaccaggagtataaggcagtggctctggggttcttaattcattcctaacttctttgatacttcacaggattaggaaagtggtcatcatacatcccacacagtctgtattacttcaggcttgtgggcaaggttaggaagaatcaatcagccttaactataaatacctgcactgtctctgaggacttactattttatgttctttttaatcaataccgatcagaagtttaggttataaaaacaattctacttcatgctttggtgcttggtaatttttggtgcgtctttaagcattactcttatatatcatatattaaaataccataaaaatgaaattcagacaaaatcactggcaccaaaaatggtttattctgagctgtcttcactttgactatttggggggcttctctcaagtacagatgtgggttggggtcccctggagcaggcaggattggcagtaagagatattggccactcaagtctactgtgtgtgtgtgtgtgtgtggtttttttttttaatctttactttgaatttgttccccaagtgtacttaatcaccttagtgccagtttaatccagttatgcagaagaaattcatattggttgcctgatgtagagctcagcaccaccctaccacaggccttgtctggtgtatttttgaaaggggtgatgttttaaactattacccacagaaggttgaaacacggtaaggcgtcaagtttttgccggtaatataccatag

SEQ ID NO: 361817 - DNA, 5222 bp, Homo sapiens
ggtttttttttttaagtgttttgttttgttgttttggagttgagagtaactttaatttttatgtgtattcatgctgtgtatttatggctacaagtcaaactgatttcatatgtatgcatacatatagtctaatagagatgattgtaattcattataatcttgagttttttaaattagtaagatggctactattgctgttttggggtttttaaggttagatatatatcatgtttaactttttcccctatctttttatctttacttctttgttctctacatgctgtgtttaaacctttctgctctcttcacctgaacacatcgtgtttgacatcatctttgtgttgatgtttattacatagtaccacaaagcctgctccacacctggatggggtgcatgtagtctttggactggttatttctggttttgaagtaatcgaacaaattgaaaatctgaagaccgatgctgcaagcagaccatatgcagatgtgcgagttattgactgtggagtacttgccacaaaatcaataaaagatgtttttgagaaaaaaaggaagaaaccaactcattcagaaggctcggattcctcttccaattcctcctcttcttcagaatcatcttcagaaagtgaacttgaacatgagagaagcagaaggaggaaacataagaggaggccaaaagttaaacgttctaaaaagaggcgaaaggaagcaagcagttcagaagagccaaggaataaacatgcaatgaacccaaaaggtcactctgagaggagtgataccaatgaaaaaaggtcagttgattccagtgctaaaagggaaaaacctgtggtccgcccagaagagattcctccagtgcctgagaaccgatttttactgagaagagatatgcctgttgttactgcagaacctgaaccgaagattcctgatgttgcacccattgtaagtgatcagaaaccatctgtatcaaagtctggacggaagattaaaggaaggggcacaattcgctatcacacacctccaagatcaagatcctgttctgagtcagatgatgatgacagcagtgaaactcctcctcactggaaagaggaaatgcagagattaagagcatatagaccacctagtggagaaaaatggagtaaaggagataagttaagtgacccctgttcaagccgatgggatgaaagaagcttgtctcagagatccagatcatggtcctataatggatattattcagaccttagtacagcaagacactctggccaccataaaaaacgcagaaaagaaaaaaaggttaagcataaaaagaaagggaaaaagcagaaacactgcagaagacacaaacaaacaaagaagagaaggattcttataccgtctgacatagaatcctcaaaatcttccactcgaagaatgaaatcctcttgtgatagagaaaggagttctcgttcttcctcattgtcatctcatcactcatcaaagagagactggtctaaatctgataaggatgtccagagctctttaacccattccagcagagactcatacagatcaaaatctcactcacagtcttattctagaggaagctcaagatcaaggactgcgtcaaagtcctcatcacattctcgaagtagatcaaagtccagatctagttccaagtctgggcaccgaaagagagcatcaaaatcaccaagaaaaacagcttctcagttaagtgaaaataaaccagttaaaacagaacctttaagagcaaccatggcacaaaatgaaaatgtagtagtacaaccagttgtagcagaaaatattcctgtaataccactgagtgacagtccccccccttcaagatggaagcctggacagaaaccttggaagccctcttatgagcgaattcaggaaatgaaagctaaaacaacccatttgctacccatccaaagcacttacagtttagcaaatattaaagagactggtagctcatcatcctaccataaaagagaaaaaaattcggaaagtgatcagagcacttattcaaaatacagtgatagaagttcagaaagctcaccaaggtcaaggagcagatcttctaggagtagatcttattccagatcatatacaagatcacgtagtctagctagttcacattcaaggtctaggtctccatcatctagatctcattcacgaaataaatacagtgatcattcacagtgtagtagatcatcttcatatacttctattagcagtgatgatggaaggcgagctaagaggagacttagatccagtgggaaaaaaaatagcgtttcacataaaaagcatagcagcagctctgaaaagacacttcacagtaaatatgtcaaaggtagagacaggtcttcatgtgtgagaaagtatagcgagagcagatcatctttagattattcttcagacagtgagcagtcaagtgttcaggccacacagtcagcccaggaaaaagagaagcagggccaaatggaaagaacacataataaacaagaaaaaaacagaggtgaagaaaaatccaagtctgaacgggaatgccctcattcaaaaaaaagaactttgaaagagaatctttctgatcaccttagaaatggcagtaagcccaaaaggaagaattatgctggtagtaaatgggactctgagtcaaattcagaacgagatgtcactaaaaacagtaaaaatgactcccatccatcctctgacaaggaagaaggtgaggccacatccgattctgaatcagaggttagtgaaattcacatcaaagtcaaacccacaaccaagtcgtccacaaatacttcactgcctgatgataatggtgcttggaaatcaagcaaacagcgcacatcaacttctgactctgaggggtcctgttccaattcggaaaacaataggggaaagccacaaaagcacaaacatgggtcaaaggaaaatcttaaaagagaacacaccaaaaaagtgaaagagaaattgaaagggaaaaaagacaaaaagcataaggctccaaaacgaaagcaagcatttcactggcagcctccactagaatttggtgaagaggaggaggaggagattgatgacaagcaagttactcaggaatcaaaagagaaaaaagtttctgaaaacaatgaaaccataaaagataatattctaaaaactgagaaatccagtgaagaggacctttcaggtaaacatgatacagtgactgtttcatcagatcttgatcagtttactaaagatgatagtaaactcagtatttctcccacagctttaaatactgaggaaaatgtggcctgtttacaaaacattcagcacgttgaagaaagtgttcccaatggagtggaagatgtgcttcaaacagatgacaacatggagatctgcactcctgataggagttccccagcaaaagtagaggagacttcccctctaggaaatgcacggcttgataccccagatataaacattgttttgaagcaggatatggcaacggaacatcctcaagcagaggtagtaaaacaggaaagcagcatgtccgaaagtaaagtgttgggtgaagtggggaaacaggacagcagctctgctagcttggctagtgctggagaaagtaccgggaagaaggaggtggctgagaagagccagatcaacctcattgataagaaatggaagcccctgcaaggtgtggggaacctggcagcacctaatgctgccacatccagtgctgtggaagttaaggtgttgaccactgtgcctgaaatgaaaccacaaggcttgagaatagaaattaaaagcaaaaataaagttcggcctgggtctctctttgatgaagtaagaaagacagcacgcttaaaccgtagaccaagaaatcaggagagttcaagtgatgagcagacgcctagtcgggatgatgatagccagtccaggagtccaagtagatctcgaagtaaatctgaaaccaaatcaagacacagaacaaggtctgtctcctatagtcactcaagaagtcgatcgagaagttccacatcatcttatcgatcaagaagctactctagaagtcggagcagaggatggtacagcagaggccgaaccagaagccggagcagttcctaccggagttacaaaagtcacaggacgtccagcaggagcagatccaggagcagctcatatgatccccacagtcgatccaggtcctacacctacgatagctactatagcaggagtcggagtcgaagtagaagccagagaagtgacagttaccaccgaggcagaagttataatcggcggtccaggagttgtagatcttatggctctgacagtgaaagtgaccgaagttactctcatcaccggagccccagtgagagcagcagatacagttgaaaacgtccggatacaaattatatcttatttgtaaatatctggcaacttagcttaagaaatgtaatgacagtctgttgttctatttcaatatcagaggtgaatttcaaaaatagacacttcttaattgttactggttcatttacatgtggggagaagaatttaaaatacagatatgtctcctaaaaatatttttatgccacattttacagtagccaactatggaaatgaatttcattttcttgaatcaagaaatcgtgaaatttatctatgtataatttgcaatattattttaagtctatttcactctatcttacgtatcccttagaatacagattctttttgcctgtttttccagttttagcatatatgctgccaagcatagaactgtgaaggagaactgttaaaggcggccaaatatttatatactgattacatagagtcttgtacatatgtgctctaaaaacaaaccacccagaattgatactgttggtaaccaggagtataaggcagtggctctggggttcttaattcattcctaacttctttgatacttcacaggattaggaaagtggtcatcatacatcccacacagtctgtattacttcaggcttgtgggcaaggttaggaagaatcaatcagccttaactataaatacctgcactgtctctgaggacttactattttatgttctttttaatcaataccgatcagaagtttaggttataaaaacaattctacttcatgctttggtgcttggtaatttttggtgcgtctttaagcattactcttatatatcatatattaaaataccataaaaatgaaattcagacaaaatcactggcaccaaa

SEQ ID NO: 361818 - DNA, 440 bp, Homo sapiens
gtactctcgcggtatttgtcccgactctcgcggggtttagcgtggcattgggaggcccggcctgggggaggagacggcgttccgttagcggcgttggggtttggctgcagtggcagtgctttctcttctgctcacggggacccgctcaggctggaggccagccagctcttgccgccacctcggtcgcgatgggggcgcaggaccggccgcagtgccacttcgacatcgagatcaaccgggagccggttggtcgcattatgtttcagctcttctcagacatatgtccaaaaacatgcaaaaacttcctttgcttgtgctcaggtaagtgaattattatttccaatgagaagctgtggcttacagttttaccttgctgaacagaatagatattttcctggaagaataatggactcgtgaaattagttttgtgaattaaaaaa

SEQ ID NO: 361819 - DNA, 736 bp, Homo sapiens
acggcggccctgcctccaccacgtgacgcacggatggccgccgcttcctcttactgtcgtagttccgcgtctgagcgctcgacgctcctgggtgccattgcctgcctgagtcacgtgtcagggggaagctggaaggcgtcgttctcctttcccagctctcctgcctgtccgccatgttttcaggccgggtctggcttggtcttcccccgtaaggaaatggccggggagctccagggacccaggcgccgtcgcttcggcggagcctgggctgaccagccaggacagcggggtaaacccgaacaattctgcgcgaggtagggaggccatggcgtccggcagtaactggctctccggggtgaatgtcgtgctggtgatggcctacgggagcctggtgaggagattaccccaccccattcctgctgtcgcatcttacccagtagagaccctccttttgagctgtaccccgtctgcattctccacccactcacctgcgcctatccgggctttgactccttattccaggagtaggtgggagtttaagtcacttagtcgggccgacccgccctcgttagtctagaaccctccctttaacgctagagcacagaccccacgcctccctgctgctggcttcttagatccacccccatcataacggccttgctttgccccaagttttaccctgaaacattcctgagagccggaatctggggatttggaatgaaggcatgctttttta

SEQ ID NO: 361820 - DNA, 2499 bp, Homo sapiens
  misc_feature (1845)..(1845): n is a, c, g, or t
  misc_feature (1864)..(1864): n is a, c, g, or t
  misc_feature (1867)..(1867): n is a, c, g, or t
  misc_feature (1871)..(1871): n is a, c, g, or t
  misc_feature (1874)..(1874): n is a, c, g, or t
  misc_feature (1876)..(1876): n is a, c, g, or t
  misc_feature (1882)..(1882): n is a, c, g, or t
  misc_feature (1981)..(1981): n is a, c, g, or t
acggcggccctgcctccaccacgtgacgcacggatggccgccgcttcctcttactgtcgtagttccgcgtctgagcgctcgacgctcctgggtgccattgcctgcctgagtcacgtgtcagggggaagctggaaggcgtcgttctcctttcccagctctcctgcctgtccgccatgttttcaggccgggtctggcttggtcttcccccgtaaggaaatggccggggagctccagggacccaggcgccgtcgcttcggcggagcctgggctgaccagccaggacagcggggtaaacccgaacaattctgcgcgaggtagggaggccatggcgtccggcagtaactggctctccggggtgaatgtcgtgctggtgatggcctacgggagcctggtgtttgtactgctatttatttttgtgaagaggcaaatcatgcgctttgcaatgaaatctcgaaggggacctcatgtccctgtgggacacaatgcccccaaggacttgaaagaggagattgatattcgactctccagggttcaggatatcaagtatgagccccagctccttgcagatgatgatgctagactactacaactggaaacccagggaaatcaaagttgctacaactatctgtataggatgaaagctctggatgccattcgtacctctgagatcccatttcattctgaaggccggcatccccgttccttaatgggcaagaatttccgctcctacctgctggatctgcgaaacactagtacgcctttcaagggtgtacgcaaagcactcattgatacccttttggatggctatgaaacagcccgctatgggacaggggtctttggccagaatgagtacctacgctatcaggaggccctgagtgagctggccactgcggttaaagcacgaattgggagctctcagcgacatcaccagtcagcagccaaagacctaactcagtcccctgaggtctccccaacaaccatccaggtgacatacctcccctccagtcagaagagtaaacgtgccaagcacttccttgaattgaagagctttaaggataactataacacattggagagtactctgtgacggagctgaaggactcttgccgtagattaagccagtcagttgcaatgtgcaagacaggctgcttgccgggccgccctcggaacatctggcccagcaggcccagactgtatccatccaagttcccgttgtatccagagttcttagagcttgtgtctaaagggtaattccccaacccttccttatgagcatttttagaacattggctaagactattttcccccagtagcgcttttttctggatttgcattcgggtgttattcttaatgtttctgtcaaagcttcttaaaaatcttcacttggtttcagccatagttcaccttccctgttccaggtttatttaattccaaaggtgagagttggagtgagatgtcttccatatctatacctttgtgcacagttgaatgggaactgtttgggtttagggcatcttagagttgattgatggaaaaagcagacaggaactggtgggaggtcaagtggggaagttggtgaatgtggaataacttacctttgtgctccacttaaaccagatgtgttgcagctttcctgacatgcaaggatctactttaattccacactctcattaataaattgaataaaagggaatgttttggcacctgatataatctgccaggctatgtgacagtaggaaggaatggtttcccctaacaagcccaatgcactggtctgactttataaattatttaataaaatgaactattatcaaataaaacgtatgaatcagtaaaaaaaaaaanaaaaaaaaaaaaaaaaaanaanaaanaananaaaaanaaaaaaaaaaaaaaaaaaaaaaaaacaaaagtaaacaaaagaaaaaagaaaaaaggagagaggaggagcggcgccgaccgacaacaaataaccaaattncaccagcgaggagaagcaagacagtaagacgacgctgcgcaggctcgacgtgccttggagacgagggggaggcgccggcgcgacgagcgacgagtgcgtccacaaacccagtagacgagagcgaggcgcagacgagcaccgacatatcacacgaagagtcggctggggggagaagcaatgataacagtctaacgcagagatctaattgtgggttctcgtctgatgaattacggggacgacacccgtataaaagagtagcgggccgtgggagttcacaatctgttctgtgagaaggacaagaacaagccaatacaaaacataaaggacgacgtcgatgtatagatcctattacgttacgatcgagtataaagaaattaagttagctgtctagtgcagatacgtctgttgaggtggagtgagccgaaaaaagaactgcaggtgtacgattagttgtcgcagaggaggtaagtgacaactcatgcggtcttctaacgtgtcggatgcatcgtgcgagccaa

SEQ ID NO: 361821 - DNA, 2287 bp, Homo sapiens
  misc_feature (1743)..(1743): n is a, c, g, or t
  misc_feature (1762)..(1762): n is a, c, g, or t
  misc_feature (1765)..(1765): n is a, c, g, or t
  misc_feature (1769)..(1769): n is a, c, g, or t
  misc_feature (1772)..(1772): n is a, c, g, or t
  misc_feature (1774)..(1774): n is a, c, g, or t
  misc_feature (1780)..(1780): n is a, c, g, or t
acggcggccctgcctccaccacgtgacgcacggatggccgccgcttcctcttactgtcgtagttccgcgtctgagcgctcgacgctcctgggtgccattgcctgcctgagtcacgtgtcagggggaagctggaaggcgtcgttctcctttcccagctctcctgcctgtccgccatgttttcaggccgggtctggcttggtcttcccccgtaaggaaatggccggggagctccagggacccaggcgccgtcgcttcggcggagcctgggctgaccagccaggacagcggggtaaacccgaacaattctgcgcgaggtagggaggccatggcgtccggcagtaactggctctccggggtgaatgtcgtgctggtgatggcctacgggagcctggacttgaaagaggagattgatattcgactctccagggttcaggatatcaagtatgagccccagctccttgcagatgatgatgctagactactacaactggaaacccagggaaatcaaagttgctacaactatctgtataggatgaaagctctggatgccattcgtacctctgagatcccatttcattctgaaggccggcatccccgttccttaatgggcaagaatttccgctcctacctgctggatctgcgaaacactagtacgcctttcaagggtgtacgcaaagcactcattgatacccttttggatggctatgaaacagcccgctatgggacaggggtctttggccagaatgagtacctacgctatcaggaggccctgagtgagctggccactgcggttaaagcacgaattgggagctctcagcgacatcaccagtcagcagccaaagacctaactcagtcccctgaggtctccccaacaaccatccaggtgacatacctcccctccagtcagaagagtaaacgtgccaagcacttccttgaattgaagagctttaaggataactataacacattggagagtactctgtgacggagctgaaggactcttgccgtagattaagccagtcagttgcaatgtgcaagacaggctgcttgccgggccgccctcggaacatctggcccagcaggcccagactgtatccatccaagttcccgttgtatccagagttcttagagcttgtgtctaaagggtaattccccaacccttccttatgagcatttttagaacattggctaagactattttcccccagtagcgcttttttctggatttgcattcgggtgttattcttaatgtttctgtcaaagcttcttaaaaatcttcacttggtttcagccatagttcaccttccctgttccaggtttatttaattccaaaggtgagagttggagtgagatgtcttccatatctatacctttgtgcacagttgaatgggaactgtttgggtttagggcatcttagagttgattgatggaaaaagcagacaggaactggtgggaggtcaagtggggaagttggtgaatgtggaataacttacctttgtgctccacttaaaccagatgtgttgcagctttcctgacatgcaaggatctactttaattccacactctcattaataaattgaataaaagggaatgttttggcacctgatataatctgccaggctatgtgacagtaggaaggaatggtttcccctaacaagcccaatgcactggtctgactttataaattatttaataaaatgaactattatcaaataaaacgtatgaatcagtaaaaaaaaaaanaaaaaaaaaaaaaaaaaanaanaaanaananaaaaanaaaaaaaaagagggggggggccgggaaaaaagaaatatcccccggggggcccaccccccgcaacacggccccgcccccgtccttcttgtgagcacaaggggggccccaattagggagggggaataaaaaaggacgggaggcagggggggggggttaacaccaggggtgggcgggggagaacaccgggcccgcggggaacccttgggggagggccccccattcttcgcggcgggcggcgaccactctgtcgcggcccaaccccccacggagtgtttaaagccgtctccggggacaattaaacccttcaacgcggtaatgtgggggcaacccccggcaatatgtccgcgggcgaagagttcgctccgggttgtttataggactacgagaggatatatatatatataagacgcaaccacgacgccaccacgccgctataatactgcgatccctccactgccgcgtctgataccctccacactccgacacccaaactacaccatgcgcgcg

SEQ ID NO: 361822 - DNA, 1815 bp, Homo sapiens
acggcggccctgcctccaccacgtgacgcacggatggccgccgcttcctcttactgtcgtagttccgcgtctgagcgctcgacgctcctgggtgccattgcctgcctgagtcacgtgtcagggggaagctggaaggcgtcgttctcctttcccagctctcctgcctgtccgccatgttttcaggccgggtctggcttggtcttcccccgtaaggaaatggccggggagctccagggacccaggcgccgtcgcttcggcggagcctgggctgaccagccaggacagcggggtaaacccgaacaattctgcgcgaggtagggaggccatggcgtccggcagtaactggctctccggggtgaatgtcgtgctggtgatggcctacgggagcctggtgtttgtactgctatttatttttgtgaagaggcaaatcatgcgctttgcaatgaaatctcgaaggggacctcatgtccctgtgggacacaatgcccccaaggacttgaaagaggagattgatattcgactctccagggttcaggatatcaagtatgagccccagctccttgcagatgatgatgctagactactacaactggaaacccagggaaatcaaagttgctacaactatctgtataggatgaaagctctggatgccattcgtacctctgagatcccatttcattctgaaggccggcatccccgttccttaatgggcaagaatttccgctcctacctgctggatctgcgaaacactagtacgcctttcaagggtgtacgcaaagcactcattgatacccttttggatggctatgaaacagcccgctatgggacaggggtctttggccagaatgagtacctacgctatcaggaggccctgagtgagctggccactgcggttaaagcacgaattgggagctctcagcgacatcaccagtcagcagccaaagacctaactcagtcccctgaggtctccccaacaaccatccaggtgacatacctcccctccagtcagaagagtaaacgtgccaagcacttccttgaattgaagagctttaaggataactataacacattggagagtactctgtgacggagctgaaggactcttgccgtagattaagccagtcagttgcaatgtgcaagacaggctgcttgccgggccgccctcggaacatctggcccagcaggcccagactgtatccatccaagttcccgttgtatccagagttcttagagcttgtgtctaaagggtaattccccaacccttccttatgagcatttttagaacattggctaagactattttcccccagtagcgcttttttctggatttgcattcgggtgttattcttaatgtttctgtcaaagcttcttaaaaatcttcacttggtttcagccatagttcaccttccctgttccaggtttatttaattccaaaggtgagagttggagtgagatgtcttccatatctatacctttgtgcacagttgaatgggaactgtttgggtttagggcatcttagagttgattgatggaaaaagcagacaggaactggtgggaggtcaagtggggaagttggtgaatgtggaataacttacctttgtgctccacttaaaccagatgtgttgcagctttcctgacatgcaaggatctactttaattccacactctcattaataaattgaataaaagggaatgttttggcacctgatataatctgccaggctatgtgacagtaggaaggaatggtttcccctaacaagcccaatgcactggtctgactttataaattatttaataaaatgaactattatcaaa

SEQ ID NO: 361823 - DNA, 2270 bp, Homo sapiens
  misc_feature (8)..(8): n is a, c, g, or t
  misc_feature (1726)..(1726): n is a, c, g, or t
  misc_feature (1745)..(1745): n is a, c, g, or t
  misc_feature (1748)..(1748): n is a, c, g, or t
  misc_feature (1752)..(1752): n is a, c, g, or t
  misc_feature (1755)..(1755): n is a, c, g, or t
  misc_feature (1757)..(1757): n is a, c, g, or t
  misc_feature (1763)..(1763): n is a, c, g, or t
ttggtgcnttagtctgttgtcattggtggtggtacggtcggtattccgggatccatgttttcaggccgggtctggcttggtcttcccccgtaaggaaatggccggggagctccagggacccaggcgccgtcgcttcggcggagcctgggctgaccagccaggacagcggggtaaacccgaacaattctgcgcgaggtagggaggccatggcgtccggcagtaactggctctccggggtgaatgtcgtgctggtgatggcctacgggagcctggtgtttgtactgctatttatttttgtgaagaggcaaatcatgcgctttgcaatgaaatctcgaaggggacctcatgtccctgtgggacacaatgcccccaaggacttgaaagaggagattgatattcgactctccagggttcaggatatcaagtatgagccccagctccttgcagatgatgatgctagactactacaactggaaacccagggaaatcaaagttgctacaactatctgtataggatgaaagctctggatgccattcgtacctctgagatcccatttcattctgaaggccggcatccccgttccttaatgggcaagaatttccgctcctacctgctggatctgcgaaacactagtacgcctttcaagggtgtacgcaaagcactcattgatacccttttggatggctatgaaacagcccgctatgggacaggggtctttggccagaatgagtacctacgctatcaggaggccctgagtgagctggccactgcggttaaagcacgaattgggagctctcagcgacatcaccagtcagcagccaaagacctaactcagtcccctgaggtctccccaacaaccatccaggtgacatacctcccctccagtcagaagagtaaacgtgccaagcacttccttgaattgaagagctttaaggataactataacacattggagagtactctgtgacggagctgaaggactcttgccgtagattaagccagtcagttgcaatgtgcaagacaggctgcttgccgggccgccctcggaacatctggcccagcaggcccagactgtatccatccaagttcccgttgtatccagagttcttagagcttgtgtctaaagggtaattccccaacccttccttatgagcatttttagaacattggctaagactattttcccccagtagcgcttttttctggatttgcattcgggtgttattcttaatgtttctgtcaaagcttcttaaaaatcttcacttggtttcagccatagttcaccttccctgttccaggtttatttaattccaaaggtgagagttggagtgagatgtcttccatatctatacctttgtgcacagttgaatgggaactgtttgggtttagggcatcttagagttgattgatggaaaaagcagacaggaactggtgggaggtcaagtggggaagttggtgaatgtggaataacttacctttgtgctccacttaaaccagatgtgttgcagctttcctgacatgcaaggatctactttaattccacactctcattaataaattgaataaaagggaatgttttggcacctgatataatctgccaggctatgtgacagtaggaaggaatggtttcccctaacaagcccaatgcactggtctgactttataaattatttaataaaatgaactattatcaaataaaacgtatgaatcagtaaaaaaaaaaanaaaaaaaaaaaaaaaaaanaanaaanaananaaaaanaaaaaaaaagagggggggggccgggaaaaaagaaatatcccccggggggcccaccccccgcaacacggccccgcccccgtccttcttgtgagcacaaggggggccccaattagggagggggaataaaaaaggacgggaggcagggggggggggttaacaccaggggtgggcgggggagaacaccgggcccgcggggaacccttgggggagggccccccattcttcgcggcgggcggcgaccactctgtcgcggcccaaccccccacggagtgtttaaagccgtctccggggacaattaaacccttcaacgcggtaatgtgggggcaacccccggcaatatgtccgcgggcgaagagttcgctccgggttgtttataggactacgagaggatatatatatatataagacgcaaccacgacgccaccacgccgctataatactgcgatccctccactgccgcgtctgataccctccacactccgacacccaaactacaccatgcgcgcg

SEQ ID NO: 361824 - DNA, 2312 bp, Homo sapiens
  misc_feature (1768)..(1768): n is a, c, g, or t
  misc_feature (1787)..(1787): n is a, c, g, or t
  misc_feature (1790)..(1790): n is a, c, g, or t
  misc_feature (1794)..(1794): n is a, c, g, or t
  misc_feature (1797)..(1797): n is a, c, g, or t
  misc_feature (1799)..(1799): n is a, c, g, or t
  misc_feature (1805)..(1805): n is a, c, g, or t
acggcggccctgcctccaccacgtgacgcacggatggccgccgcttcctcttactgtcgtagttccgcgtctgagcgctcgacgctcctgggtgccattgcctgcctgagtcacgtgtcagggggaagctggaaggcgtcgttctcctttcccagctctcctgcctgtccgccatgttttcaggccgggtctggcttggtcttcccccgtaaggaaatggccggggagctccagggacccaggcgccgtcgcttcggcggagcctgggctgaccagccaggacagcggggtaaacccgaacaattctgcgcgaggtgtttgtactgctatttatttttgtgaagaggcaaatcatgcgctttgcaatgaaatctcgaaggggacctcatgtccctgtgggacacaatgcccccaaggacttgaaagaggagattgatattcgactctccagggttcaggatatcaagtatgagccccagctccttgcagatgatgatgctagactactacaactggaaacccagggaaatcaaagttgctacaactatctgtataggatgaaagctctggatgccattcgtacctctgagatcccatttcattctgaaggccggcatccccgttccttaatgggcaagaatttccgctcctacctgctggatctgcgaaacactagtacgcctttcaagggtgtacgcaaagcactcattgatacccttttggatggctatgaaacagcccgctatgggacaggggtctttggccagaatgagtacctacgctatcaggaggccctgagtgagctggccactgcggttaaagcacgaattgggagctctcagcgacatcaccagtcagcagccaaagacctaactcagtcccctgaggtctccccaacaaccatccaggtgacatacctcccctccagtcagaagagtaaacgtgccaagcacttccttgaattgaagagctttaaggataactataacacattggagagtactctgtgacggagctgaaggactcttgccgtagattaagccagtcagttgcaatgtgcaagacaggctgcttgccgggccgccctcggaacatctggcccagcaggcccagactgtatccatccaagttcccgttgtatccagagttcttagagcttgtgtctaaagggtaattccccaacccttccttatgagcatttttagaacattggctaagactattttcccccagtagcgcttttttctggatttgcattcgggtgttattcttaatgtttctgtcaaagcttcttaaaaatcttcacttggtttcagccatagttcaccttccctgttccaggtttatttaattccaaaggtgagagttggagtgagatgtcttccatatctatacctttgtgcacagttgaatgggaactgtttgggtttagggcatcttagagttgattgatggaaaaagcagacaggaactggtgggaggtcaagtggggaagttggtgaatgtggaataacttacctttgtgctccacttaaaccagatgtgttgcagctttcctgacatgcaaggatctactttaattccacactctcattaataaattgaataaaagggaatgttttggcacctgatataatctgccaggctatgtgacagtaggaaggaatggtttcccctaacaagcccaatgcactggtctgactttataaattatttaataaaatgaactattatcaaataaaacgtatgaatcagtaaaaaaaaaaanaaaaaaaaaaaaaaaaaanaanaaanaananaaaaanaaaaaaaaagagggggggggccgggaaaaaagaaatatcccccggggggcccaccccccgcaacacggccccgcccccgtccttcttgtgagcacaaggggggccccaattagggagggggaataaaaaaggacgggaggcagggggggggggttaacaccaggggtgggcgggggagaacaccgggcccgcggggaacccttgggggagggccccccattcttcgcggcgggcggcgaccactctgtcgcggcccaaccccccacggagtgtttaaagccgtctccggggacaattaaacccttcaacgcggtaatgtgggggcaacccccggcaatatgtccgcgggcgaagagttcgctccgggttgtttataggactacgagaggatatatatatatataagacgcaaccacgacgccaccacgccgctataatactgcgatccctccactgccgcgtctgataccctccacactccgacacccaaactacaccatgcgcgcg

SEQ ID NO: 361825 - DNA, 2335 bp, Homo sapiens
  misc_feature (1791)..(1791): n is a, c, g, or t
  misc_feature (1810)..(1810): n is a, c, g, or t
  misc_feature (1813)..(1813): n is a, c, g, or t
  misc_feature (1817)..(1817): n is a, c, g, or t
  misc_feature (1820)..(1820): n is a, c, g, or t
  misc_feature (1822)..(1822): n is a, c, g, or t
  misc_feature (1828)..(1828): n is a, c, g, or t
acggcggccctgcctccaccacgtgacgcacggatggccgccgcttcctcttactgtcgtagttccgcgtctgagcgctcgacgctcctgggtgccattgcctgcctgagtcacgtgtcagggggaagctggaaggcgtcgttctcctttcccagctctcctgcctgtccgccatgttttcaggccgggtctggcttggtcttcccccgtaaggaaatggccggggagctccagggacccaggcgccgtcgcttcggcggagcctgggctgaccagccaggacagcggggtaaacccgaacaattctgcgcgaggtagggaggccatggcgtccggcagtaactggctctccggggtgaatgtcgtgctggtgatggcctacgggagcctggtgtttgtactgctatttatttttgtgaagaggcaaatcatgcgctttgcaatgaaatctcgaaggggacctcatgtccctgtgggacacaatgcccccaaggacttgaaagaggagattgatattcgactctccagggttcaggatatcaagtatgagccccagctccttgcagatgatgatgctagactactacaactggaaacccagggaaatcaaaagatcccatttcattctgaaggccggcatccccgttccttaatgggcaagaatttccgctcctacctgctggatctgcgaaacactagtacgcctttcaagggtgtacgcaaagcactcattgatacccttttggatggctatgaaacagcccgctatgggacaggggtctttggccagaatgagtacctacgctatcaggaggccctgagtgagctggccactgcggttaaagcacgaattgggagctctcagcgacatcaccagtcagcagccaaagacctaactcagtcccctgaggtctccccaacaaccatccaggtgacatacctcccctccagtcagaagagtaaacgtgccaagcacttccttgaattgaagagctttaaggataactataacacattggagagtactctgtgacggagctgaaggactcttgccgtagattaagccagtcagttgcaatgtgcaagacaggctgcttgccgggccgccctcggaacatctggcccagcaggcccagactgtatccatccaagttcccgttgtatccagagttcttagagcttgtgtctaaagggtaattccccaacccttccttatgagcatttttagaacattggctaagactattttcccccagtagcgcttttttctggatttgcattcgggtgttattcttaatgtttctgtcaaagcttcttaaaaatcttcacttggtttcagccatagttcaccttccctgttccaggtttatttaattccaaaggtgagagttggagtgagatgtcttccatatctatacctttgtgcacagttgaatgggaactgtttgggtttagggcatcttagagttgattgatggaaaaagcagacaggaactggtgggaggtcaagtggggaagttggtgaatgtggaataacttacctttgtgctccacttaaaccagatgtgttgcagctttcctgacatgcaaggatctactttaattccacactctcattaataaattgaataaaagggaatgttttggcacctgatataatctgccaggctatgtgacagtaggaaggaatggtttcccctaacaagcccaatgcactggtctgactttataaattatttaataaaatgaactattatcaaataaaacgtatgaatcagtaaaaaaaaaaanaaaaaaaaaaaaaaaaaanaanaaanaananaaaaanaaaaaaaaagagggggggggccgggaaaaaagaaatatcccccggggggcccaccccccgcaacacggccccgcccccgtccttcttgtgagcacaaggggggccccaattagggagggggaataaaaaaggacgggaggcagggggggggggttaacaccaggggtgggcgggggagaacaccgggcccgcggggaacccttgggggagggccccccattcttcgcggcgggcggcgaccactctgtcgcggcccaaccccccacggagtgtttaaagccgtctccggggacaattaaacccttcaacgcggtaatgtgggggcaacccccggcaatatgtccgcgggcgaagagttcgctccgggttgtttataggactacgagaggatatatatatatataagacgcaaccacgacgccaccacgccgctataatactgcgatccctccactgccgcgtctgataccctccacactccgacacccaaactacaccatgcgcgcg

SEQ ID NO: 361826 - DNA, 2271 bp, Homo sapiens
  misc_feature (1727)..(1727): n is a, c, g, or t
  misc_feature (1746)..(1746): n is a, c, g, or t
  misc_feature (1749)..(1749): n is a, c, g, or t
  misc_feature (1753)..(1753): n is a, c, g, or t
  misc_feature (1756)..(1756): n is a, c, g, or t
  misc_feature (1758)..(1758): n is a, c, g, or t
  misc_feature (1764)..(1764): n is a, c, g, or t
acggcggccctgcctccaccacgtgacgcacggatggccgccgcttcctcttactgtcgtagttccgcgtctgagcgctcgacgctcctgggtgccattgcctgcctgagtcacgtgtcagggggaagctggaaggcgtcgttctcctttcccagctctcctgcctgtccgccatgttttcaggccgggtctggcttggtcttcccccgtaaggaaatggccggggagctccagggacccaggcgccgtcgcttcggcggagcctgggctgaccagccaggacagcggggtaaacccgaacaattctgcgcgaggtagggaggccatggcgtccggcagtaactggctctccggggtgaatgtcgtgctggtgatggcctacgggagcctggtgtttgtactgctatttatttttgtgaagaggcaaatcatgcgctttgcaatgaaatctcgaaggggacctcatgtccctgtgggacacaatgcccccaaggttgctacaactatctgtataggatgaaagctctggatgccattcgtacctctgagatcccatttcattctgaaggccggcatccccgttccttaatgggcaagaatttccgctcctacctgctggatctgcgaaacactagtacgcctttcaagggtgtacgcaaagcactcattgatacccttttggatggctatgaaacagcccgctatgggacaggggtctttggccagaatgagtacctacgctatcaggaggccctgagtgagctggccactgcggttaaagcacgaattgggagctctcagcgacatcaccagtcagcagccaaagacctaactcagtcccctgaggtctccccaacaaccatccaggtgacatacctcccctccagtcagaagagtaaacgtgccaagcacttccttgaattgaagagctttaaggataactataacacattggagagtactctgtgacggagctgaaggactcttgccgtagattaagccagtcagttgcaatgtgcaagacaggctgcttgccgggccgccctcggaacatctggcccagcaggcccagactgtatccatccaagttcccgttgtatccagagttcttagagcttgtgtctaaagggtaattccccaacccttccttatgagcatttttagaacattggctaagactattttcccccagtagcgcttttttctggatttgcattcgggtgttattcttaatgtttctgtcaaagcttcttaaaaatcttcacttggtttcagccatagttcaccttccctgttccaggtttatttaattccaaaggtgagagttggagtgagatgtcttccatatctatacctttgtgcacagttgaatgggaactgtttgggtttagggcatcttagagttgattgatggaaaaagcagacaggaactggtgggaggtcaagtggggaagttggtgaatgtggaataacttacctttgtgctccacttaaaccagatgtgttgcagctttcctgacatgcaaggatctactttaattccacactctcattaataaattgaataaaagggaatgttttggcacctgatataatctgccaggctatgtgacagtaggaaggaatggtttcccctaacaagcccaatgcactggtctgactttataaattatttaataaaatgaactattatcaaataaaacgtatgaatcagtaaaaaaaaaaanaaaaaaaaaaaaaaaaaanaanaaanaananaaaaanaaaaaaaaagagggggggggccgggaaaaaagaaatatcccccggggggcccaccccccgcaacacggccccgcccccgtccttcttgtgagcacaaggggggccccaattagggagggggaataaaaaaggacgggaggcagggggggggggttaacaccaggggtgggcgggggagaacaccgggcccgcggggaacccttgggggagggccccccattcttcgcggcgggcggcgaccactctgtcgcggcccaaccccccacggagtgtttaaagccgtctccggggacaattaaacccttcaacgcggtaatgtgggggcaacccccggcaatatgtccgcgggcgaagagttcgctccgggttgtttataggactacgagaggatatatatatatataagacgcaaccacgacgccaccacgccgctataatactgcgatccctccactgccgcgtctgataccctccacactccgacacccaaactacaccatgcgcgcg

SEQ ID NO: 361827 - DNA, 2233 bp, Homo sapiens
  misc_feature (1689)..(1689): n is a, c, g, or t
  misc_feature (1708)..(1708): n is a, c, g, or t
  misc_feature (1711)..(1711): n is a, c, g, or t
  misc_feature (1715)..(1715): n is a, c, g, or t
  misc_feature (1718)..(1718): n is a, c, g, or t
  misc_feature (1720)..(1720): n is a, c, g, or t
  misc_feature (1726)..(1726): n is a, c, g, or t
acggcggccctgcctccaccacgtgacgcacggatggccgccgcttcctcttactgtcgtagttccgcgtctgagcgctcgacgctcctgggtgccattgcctgcctgagtcacgtgtcagggggaagctggaaggcgtcgttctcctttcccagctctcctgcctgtccgccatgttttcaggccgggtctggcttggtcttcccccgtaaggaaatggccggggagctccagggacccaggcgccgtcgcttcggcggagcctgggctgaccagccaggacagcggggtaaacccgaacaattctgcgcgaggtagggaggccatggcgtccggcagtaactggctctccggggtgaatgtcgtgctggtgatggcctacgggagcctggacttgaaagaggagattgatattcgactctccagggttcaggatatcaagtatgagccccagctccttgcagatgatgatgctagactactacaactggaaacccagggaaatcaaaagatcccatttcattctgaaggccggcatccccgttccttaatgggcaagaatttccgctcctacctgctggatctgcgaaacactagtacgcctttcaagggtgtacgcaaagcactcattgatacccttttggatggctatgaaacagcccgctatgggacaggggtctttggccagaatgagtacctacgctatcaggaggccctgagtgagctggccactgcggttaaagcacgaattgggagctctcagcgacatcaccagtcagcagccaaagacctaactcagtcccctgaggtctccccaacaaccatccaggtgacatacctcccctccagtcagaagagtaaacgtgccaagcacttccttgaattgaagagctttaaggataactataacacattggagagtactctgtgacggagctgaaggactcttgccgtagattaagccagtcagttgcaatgtgcaagacaggctgcttgccgggccgccctcggaacatctggcccagcaggcccagactgtatccatccaagttcccgttgtatccagagttcttagagcttgtgtctaaagggtaattccccaacccttccttatgagcatttttagaacattggctaagactattttcccccagtagcgcttttttctggatttgcattcgggtgttattcttaatgtttctgtcaaagcttcttaaaaatcttcacttggtttcagccatagttcaccttccctgttccaggtttatttaattccaaaggtgagagttggagtgagatgtcttccatatctatacctttgtgcacagttgaatgggaactgtttgggtttagggcatcttagagttgattgatggaaaaagcagacaggaactggtgggaggtcaagtggggaagttggtgaatgtggaataacttacctttgtgctccacttaaaccagatgtgttgcagctttcctgacatgcaaggatctactttaattccacactctcattaataaattgaataaaagggaatgttttggcacctgatataatctgccaggctatgtgacagtaggaaggaatggtttcccctaacaagcccaatgcactggtctgactttataaattatttaataaaatgaactattatcaaataaaacgtatgaatcagtaaaaaaaaaaanaaaaaaaaaaaaaaaaaanaanaaanaananaaaaanaaaaaaaaagagggggggggccgggaaaaaagaaatatcccccggggggcccaccccccgcaacacggccccgcccccgtccttcttgtgagcacaaggggggccccaattagggagggggaataaaaaaggacgggaggcagggggggggggttaacaccaggggtgggcgggggagaacaccgggcccgcggggaacccttgggggagggccccccattcttcgcggcgggcggcgaccactctgtcgcggcccaaccccccacggagtgtttaaagccgtctccggggacaattaaacccttcaacgcggtaatgtgggggcaacccccggcaatatgtccgcgggcgaagagttcgctccgggttgtttataggactacgagaggatatatatatatataagacgcaaccacgacgccaccacgccgctataatactgcgatccctccactgccgcgtctgataccctccacactccgacacccaaactacaccatgcgcgcg

SEQ ID NO: 361828 - DNA, 2169 bp, Homo sapiens
  misc_feature (1625)..(1625): n is a, c, g, or t
  misc_feature (1644)..(1644): n is a, c, g, or t
  misc_feature (1647)..(1647): n is a, c, g, or t
  misc_feature (1651)..(1651): n is a, c, g, or t
  misc_feature (1654)..(1654): n is a, c, g, or t
  misc_feature (1656)..(1656): n is a, c, g, or t
  misc_feature (1662)..(1662): n is a, c, g, or t
acggcggccctgcctccaccacgtgacgcacggatggccgccgcttcctcttactgtcgtagttccgcgtctgagcgctcgacgctcctgggtgccattgcctgcctgagtcacgtgtcagggggaagctggaaggcgtcgttctcctttcccagctctcctgcctgtccgccatgttttcaggccgggtctggcttggtcttcccccgtaaggaaatggccggggagctccagggacccaggcgccgtcgcttcggcggagcctgggctgaccagccaggacagcggggtaaacccgaacaattctgcgcgaggtagggaggccatggcgtccggcagtaactggctctccggggtgaatgtcgtgctggtgatggcctacgggagcctggttgctacaactatctgtataggatgaaagctctggatgccattcgtacctctgagatcccatttcattctgaaggccggcatccccgttccttaatgggcaagaatttccgctcctacctgctggatctgcgaaacactagtacgcctttcaagggtgtacgcaaagcactcattgatacccttttggatggctatgaaacagcccgctatgggacaggggtctttggccagaatgagtacctacgctatcaggaggccctgagtgagctggccactgcggttaaagcacgaattgggagctctcagcgacatcaccagtcagcagccaaagacctaactcagtcccctgaggtctccccaacaaccatccaggtgacatacctcccctccagtcagaagagtaaacgtgccaagcacttccttgaattgaagagctttaaggataactataacacattggagagtactctgtgacggagctgaaggactcttgccgtagattaagccagtcagttgcaatgtgcaagacaggctgcttgccgggccgccctcggaacatctggcccagcaggcccagactgtatccatccaagttcccgttgtatccagagttcttagagcttgtgtctaaagggtaattccccaacccttccttatgagcatttttagaacattggctaagactattttcccccagtagcgcttttttctggatttgcattcgggtgttattcttaatgtttctgtcaaagcttcttaaaaatcttcacttggtttcagccatagttcaccttccctgttccaggtttatttaattccaaaggtgagagttggagtgagatgtcttccatatctatacctttgtgcacagttgaatgggaactgtttgggtttagggcatcttagagttgattgatggaaaaagcagacaggaactggtgggaggtcaagtggggaagttggtgaatgtggaataacttacctttgtgctccacttaaaccagatgtgttgcagctttcctgacatgcaaggatctactttaattccacactctcattaataaattgaataaaagggaatgttttggcacctgatataatctgccaggctatgtgacagtaggaaggaatggtttcccctaacaagcccaatgcactggtctgactttataaattatttaataaaatgaactattatcaaataaaacgtatgaatcagtaaaaaaaaaaanaaaaaaaaaaaaaaaaaanaanaaanaananaaaaanaaaaaaaaagagggggggggccgggaaaaaagaaatatcccccggggggcccaccccccgcaacacggccccgcccccgtccttcttgtgagcacaaggggggccccaattagggagggggaataaaaaaggacgggaggcagggggggggggttaacaccaggggtgggcgggggagaacaccgggcccgcggggaacccttgggggagggccccccattcttcgcggcgggcggcgaccactctgtcgcggcccaaccccccacggagtgtttaaagccgtctccggggacaattaaacccttcaacgcggtaatgtgggggcaacccccggcaatatgtccgcgggcgaagagttcgctccgggttgtttataggactacgagaggatatatatatatataagacgcaaccacgacgccaccacgccgctataatactgcgatccctccactgccgcgtctgataccctccacactccgacacccaaactacaccatgcgcgcg

SEQ ID NO: 361829 - DNA, 2156 bp, Homo sapiens
  misc_feature (1612)..(1612): n is a, c, g, or t
  misc_feature (1631)..(1631): n is a, c, g, or t
  misc_feature (1634)..(1634): n is a, c, g, or t
  misc_feature (1638)..(1638): n is a, c, g, or t
  misc_feature (1641)..(1641): n is a, c, g, or t
  misc_feature (1643)..(1643): n is a, c, g, or t
  misc_feature (1649)..(1649): n is a, c, g, or t
acggcggccctgcctccaccacgtgacgcacggatggccgccgcttcctcttactgtcgtagttccgcgtctgagcgctcgacgctcctgggtgccattgcctgcctgagtcacgtgtcagggggaagctggaaggcgtcgttctcctttcccagctctcctgcctgtccgccatgttttcaggccgggtctggcttggtcttcccccgtaaggaaatggccggggagctccagggacccaggcgccgtcgcttcggcggagcctgggctgaccagccaggacagcggggtaaacccgaacaattctgcgcgaggacttgaaagaggagattgatattcgactctccagggttcaggatatcaagtatgagccccagctccttgcagatgatgatgctagactactacaactggaaacccagggaaatcaaaagatcccatttcattctgaaggccggcatccccgttccttaatgggcaagaatttccgctcctacctgctggatctgcgaaacactagtacgcctttcaagggtgtacgcaaagcactcattgatacccttttggatggctatgaaacagcccgctatgggacaggggtctttggccagaatgagtacctacgctatcaggaggccctgagtgagctggccactgcggttaaagcacgaattgggagctctcagcgacatcaccagtcagcagccaaagacctaactcagtcccctgaggtctccccaacaaccatccaggtgacatacctcccctccagtcagaagagtaaacgtgccaagcacttccttgaattgaagagctttaaggataactataacacattggagagtactctgtgacggagctgaaggactcttgccgtagattaagccagtcagttgcaatgtgcaagacaggctgcttgccgggccgccctcggaacatctggcccagcaggcccagactgtatccatccaagttcccgttgtatccagagttcttagagcttgtgtctaaagggtaattccccaacccttccttatgagcatttttagaacattggctaagactattttcccccagtagcgcttttttctggatttgcattcgggtgttattcttaatgtttctgtcaaagcttcttaaaaatcttcacttggtttcagccatagttcaccttccctgttccaggtttatttaattccaaaggtgagagttggagtgagatgtcttccatatctatacctttgtgcacagttgaatgggaactgtttgggtttagggcatcttagagttgattgatggaaaaagcagacaggaactggtgggaggtcaagtggggaagttggtgaatgtggaataacttacctttgtgctccacttaaaccagatgtgttgcagctttcctgacatgcaaggatctactttaattccacactctcattaataaattgaataaaagggaatgttttggcacctgatataatctgccaggctatgtgacagtaggaaggaatggtttcccctaacaagcccaatgcactggtctgactttataaattatttaataaaatgaactattatcaaataaaacgtatgaatcagtaaaaaaaaaaanaaaaaaaaaaaaaaaaaanaanaaanaananaaaaanaaaaaaaaagagggggggggccgggaaaaaagaaatatcccccggggggcccaccccccgcaacacggccccgcccccgtccttcttgtgagcacaaggggggccccaattagggagggggaataaaaaaggacgggaggcagggggggggggttaacaccaggggtgggcgggggagaacaccgggcccgcggggaacccttgggggagggccccccattcttcgcggcgggcggcgaccactctgtcgcggcccaaccccccacggagtgtttaaagccgtctccggggacaattaaacccttcaacgcggtaatgtgggggcaacccccggcaatatgtccgcgggcgaagagttcgctccgggttgtttataggactacgagaggatatatatatatataagacgcaaccacgacgccaccacgccgctataatactgcgatccctccactgccgcgtctgataccctccacactccgacacccaaactacaccatgcgcgcg

SEQ ID NO: 361830 - DNA, 1659 bp, Homo sapiens
acggcggccctgcctccaccacgtgacgcacggatggccgccgcttcctcttactgtcgtagttccgcgtctgagcgctcgacgctcctgggtgccattgcctgcctgagtcacgtgtcagggggaagctggaaggcgtcgttctcctttcccagctctcctgcctgtccgccatgttttcaggccgggtctggcttggtcttcccccgtaaggaaatggccggggagctccagggacccaggcgccgtcgcttcggcggagcctgggctgaccagccaggacagcggggtaaacccgaacaattctgcgcgaggtagggaggccatggcgtccggcagtaactggctctccggggtgaatgtcgtgctggtgatggcctacgggagcctggacttgaaagaggagattgatattcgactctccagggttcaggatatcaagtatgagccccagctccttgcagatgatgatgctagactactacaactggaaacccagggaaatcaaaagatcccatttcattctgaaggccggcatccccgttccttaatgggcaagaatttccgctcctacctgctggatctgcgaaacactagtacgcctttcaagggtgtacgcaaagcactcattgatacccttttggatggctatgaaacagcccgctatgggacaggggtctttggccagaatgagtacctacgctatcaggaggccctgagtgagctggccactgcggttaaagcacgaattgggagctctcagcgacatcaccagtcagcagccaaagacctaactcagtcccctgaggtctccccaacaaccatccaggtgacatacctcccctccagtcagaagagtaaacgtgccaagcacttccttgaattgaagagctttaaggataactataacacattggagagtactctgtgacggagctgaaggactcttgccgtagattaagccagtcagttgcaatgtgcaagacaggctgcttgccgggccgccctcggaacatctggcccagcaggcccagactgtatccatccaagttcccgttgtatccagagttcttagagcttgtgtctaaagggtaattccccaacccttccttatgagcatttttagaacattggctaagactattttcccccagtagcgcttttttctggatttgcattcgggtgttattcttaatgtttctgtcaaagcttcttaaaaatcttcacttggtttcagccatagttcaccttccctgttccaggtttatttaattccaaaggtgagagttggagtgagatgtcttccatatctatacctttgtgcacagttgaatgggaactgtttgggtttagggcatcttagagttgattgatggaaaaagcagacaggaactggtgggaggtcaagtggggaagttggtgaatgtggaataacttacctttgtgctccacttaaaccagatgtgttgcagctttcctgacatgcaaggatctactttaattccacactctcattaataaattgaataaaagggaatgttttggcacctgatataatctgccaggctatgtgacagtaggaaggaatggtttcccctaacaagcccaatgcactggtctgactttataaattatttaataaaatgaactattatcaaa

SEQ ID NO: 361831 - DNA, 2260 bp, Homo sapiens
  misc_feature (1716)..(1716): n is a, c, g, or t
  misc_feature (1735)..(1735): n is a, c, g, or t
  misc_feature (1738)..(1738): n is a, c, g, or t
  misc_feature (1742)..(1742): n is a, c, g, or t
  misc_feature (1745)..(1745): n is a, c, g, or t
  misc_feature (1747)..(1747): n is a, c, g, or t
  misc_feature (1753)..(1753): n is a, c, g, or t
acggcggccctgcctccaccacgtgacgcacggatggccgccgcttcctcttactgtcgtagttccgcgtctgagcgctcgacgctcctgggtgccattgcctgcctgagtcacgtgtcagggggaagctggaaggcgtcgttctcctttcccagctctcctgcctgtccgccatgttttcaggccgggtctggcttggtcttcccccgtaaggaaatggccggggagctccagggacccaggcgccgtcgcttcggcggagcctgggctgaccagccaggacagcggggtaaacccgaacaattctgcgcgaggtagggaggccatggcgtccggcagtaactggctctccggggtgaatgtcgtgctggtgatggcctacgggagcctggtgtttgtactgctatttatttttgtgaagaggcaaatcatgcgctttgcaatgaaatctcgaaggggacctcatgtccctgtgggacacaatgcccccaaggacttgaaagaggagattgatattcgactctccagggttcaggatatcaagtatgagccccagctccttgcagatgatgatgctagactactacaactggaaacccagggaaatcaaagttgctacaactatctgtataggatgaaagctctggatgccattcgtacctctgagatcccatttcattctgaaggccggcatccccgttccttaatgggcaagaatttccgctcctactatcaggaggccctgagtgagctggccactgcggttaaagcacgaattgggagctctcagcgacatcaccagtcagcagccaaagacctaactcagtcccctgaggtctccccaacaaccatccaggtgacatacctcccctccagtcagaagagtaaacgtgccaagcacttccttgaattgaagagctttaaggataactataacacattggagagtactctgtgacggagctgaaggactcttgccgtagattaagccagtcagttgcaatgtgcaagacaggctgcttgccgggccgccctcggaacatctggcccagcaggcccagactgtatccatccaagttcccgttgtatccagagttcttagagcttgtgtctaaagggtaattccccaacccttccttatgagcatttttagaacattggctaagactattttcccccagtagcgcttttttctggatttgcattcgggtgttattcttaatgtttctgtcaaagcttcttaaaaatcttcacttggtttcagccatagttcaccttccctgttccaggtttatttaattccaaaggtgagagttggagtgagatgtcttccatatctatacctttgtgcacagttgaatgggaactgtttgggtttagggcatcttagagttgattgatggaaaaagcagacaggaactggtgggaggtcaagtggggaagttggtgaatgtggaataacttacctttgtgctccacttaaaccagatgtgttgcagctttcctgacatgcaaggatctactttaattccacactctcattaataaattgaataaaagggaatgttttggcacctgatataatctgccaggctatgtgacagtaggaaggaatggtttcccctaacaagcccaatgcactggtctgactttataaattatttaataaaatgaactattatcaaataaaacgtatgaatcagtaaaaaaaaaaanaaaaaaaaaaaaaaaaaanaanaaanaananaaaaanaaaaaaaaagagggggggggccgggaaaaaagaaatatcccccggggggcccaccccccgcaacacggccccgcccccgtccttcttgtgagcacaaggggggccccaattagggagggggaataaaaaaggacgggaggcagggggggggggttaacaccaggggtgggcgggggagaacaccgggcccgcggggaacccttgggggagggccccccattcttcgcggcgggcggcgaccactctgtcgcggcccaaccccccacggagtgtttaaagccgtctccggggacaattaaacccttcaacgcggtaatgtgggggcaacccccggcaatatgtccgcgggcgaagagttcgctccgggttgtttataggactacgagaggatatatatatatataagacgcaaccacgacgccaccacgccgctataatactgcgatccctccactgccgcgtctgataccctccacactccgacacccaaactacaccatgcgcgcg

SEQ ID NO: 361832 - DNA, 1535 bp, Homo sapiens
  misc_feature (991)..(991): n is a, c, g, or t
  misc_feature (1010)..(1010): n is a, c, g, or t
  misc_feature (1013)..(1013): n is a, c, g, or t
  misc_feature (1017)..(1017): n is a, c, g, or t
  misc_feature (1020)..(1020): n is a, c, g, or t
  misc_feature (1022)..(1022): n is a, c, g, or t
  misc_feature (1028)..(1028): n is a, c, g, or t
tggtttctctgctgctagttgtttttggtatgagtagggttaaagcacgaattgggagctctcagcgacatcaccagtcagcagccaaagacctaactcagtcccctgaggtctccccaacaaccatccaggtgacatacctcccctccagtcagaagagtaaacgtgccaagcacttccttgaattgaagagctttaaggataactataacacattggagagtactctgtgacggagctgaaggactcttgccgtagattaagccagtcagttgcaatgtgcaagacaggctgcttgccgggccgccctcggaacatctggcccagcaggcccagactgtatccatccaagttcccgttgtatccagagttcttagagcttgtgtctaaagggtaattccccaacccttccttatgagcatttttagaacattggctaagactattttcccccagtagcgcttttttctggatttgcattcgggtgttattcttaatgtttctgtcaaagcttcttaaaaatcttcacttggtttcagccatagttcaccttccctgttccaggtttatttaattccaaaggtgagagttggagtgagatgtcttccatatctatacctttgtgcacagttgaatgggaactgtttgggtttagggcatcttagagttgattgatggaaaaagcagacaggaactggtgggaggtcaagtggggaagttggtgaatgtggaataacttacctttgtgctccacttaaaccagatgtgttgcagctttcctgacatgcaaggatctactttaattccacactctcattaataaattgaataaaagggaatgttttggcacctgatataatctgccaggctatgtgacagtaggaaggaatggtttcccctaacaagcccaatgcactggtctgactttataaattatttaataaaatgaactattatcaaataaaacgtatgaatcagtaaaaaaaaaaanaaaaaaaaaaaaaaaaaanaanaaanaananaaaaanaaaaaaaaagagggggggggccgggaaaaaagaaatatcccccggggggcccaccccccgcaacacggccccgcccccgtccttcttgtgagcacaaggggggccccaattagggagggggaataaaaaaggacgggaggcagggggggggggttaacaccaggggtgggcgggggagaacaccgggcccgcggggaacccttgggggagggccccccattcttcgcggcgggcggcgaccactctgtcgcggcccaaccccccacggagtgtttaaagccgtctccggggacaattaaacccttcaacgcggtaatgtgggggcaacccccggcaatatgtccgcgggcgaagagttcgctccgggttgtttataggactacgagaggatatatatatatataagacgcaaccacgacgccaccacgccgctataatactgcgatccctccactgccgcgtctgataccctccacactccgacacccaaactacaccatgcgcgcg

SEQ ID NO: 361833 - DNA, 1519 bp, Homo sapiens
  misc_feature (975)..(975): n is a, c, g, or t
  misc_feature (994)..(994): n is a, c, g, or t
  misc_feature (997)..(997): n is a, c, g, or t
  misc_feature (1001)..(1001): n is a, c, g, or t
  misc_feature (1004)..(1004): n is a, c, g, or t
  misc_feature (1006)..(1006): n is a, c, g, or t
  misc_feature (1012)..(1012): n is a, c, g, or t
tgatatacctgactcttgaggaaaaacgacgcccagtgaaagctttcagatagcatcaagatcagcagccaaagacctaactcagtcccctgaggtctccccaacaaccatccaggtgacatacctcccctccagtcagaagagtaaacgtgccaagcacttccttgaattgaagagctttaaggataactataacacattggagagtactctgtgacggagctgaaggactcttgccgtagattaagccagtcagttgcaatgtgcaagacaggctgcttgccgggccgccctcggaacatctggcccagcaggcccagactgtatccatccaagttcccgttgtatccagagttcttagagcttgtgtctaaagggtaattccccaacccttccttatgagcatttttagaacattggctaagactattttcccccagtagcgcttttttctggatttgcattcgggtgttattcttaatgtttctgtcaaagcttcttaaaaatcttcacttggtttcagccatagttcaccttccctgttccaggtttatttaattccaaaggtgagagttggagtgagatgtcttccatatctatacctttgtgcacagttgaatgggaactgtttgggtttagggcatcttagagttgattgatggaaaaagcagacaggaactggtgggaggtcaagtggggaagttggtgaatgtggaataacttacctttgtgctccacttaaaccagatgtgttgcagctttcctgacatgcaaggatctactttaattccacactctcattaataaattgaataaaagggaatgttttggcacctgatataatctgccaggctatgtgacagtaggaaggaatggtttcccctaacaagcccaatgcactggtctgactttataaattatttaataaaatgaactattatcaaataaaacgtatgaatcagtaaaaaaaaaaanaaaaaaaaaaaaaaaaaanaanaaanaananaaaaanaaaaaaaaagagggggggggccgggaaaaaagaaatatcccccggggggcccaccccccgcaacacggccccgcccccgtccttcttgtgagcacaaggggggccccaattagggagggggaataaaaaaggacgggaggcagggggggggggttaacaccaggggtgggcgggggagaacaccgggcccgcggggaacccttgggggagggccccccattcttcgcggcgggcggcgaccactctgtcgcggcccaaccccccacggagtgtttaaagccgtctccggggacaattaaacccttcaacgcggtaatgtgggggcaacccccggcaatatgtccgcgggcgaagagttcgctccgggttgtttataggactacgagaggatatatatatatataagacgcaaccacgacgccaccacgccgctataatactgcgatccctccactgccgcgtctgataccctccacactccgacacccaaactacaccatgcgcgcg

SEQ ID NO: 361834 - DNA, 1228 bp, Homo sapiens
  misc_feature (684)..(684): n is a, c, g, or t
  misc_feature (703)..(703): n is a, c, g, or t
  misc_feature (706)..(706): n is a, c, g, or t
  misc_feature (710)..(710): n is a, c, g, or t
  misc_feature (713)..(713): n is a, c, g, or t
  misc_feature (715)..(715): n is a, c, g, or t
  misc_feature (721)..(721): n is a, c, g, or t
ccaacttgagctcggtacccatccttcctctctcacgcatccaagttcccgttgtatccagagttcttagagcttgtgtctaaagggtaattccccaacccttccttatgagcatttttagaacattggctaagactattttcccccagtagcgcttttttctggatttgcattcgggtgttattcttaatgtttctgtcaaagcttcttaaaaatcttcacttggtttcagccatagttcaccttccctgttccaggtttatttaattccaaaggtgagagttggagtgagatgtcttccatatctatacctttgtgcacagttgaatgggaactgtttgggtttagggcatcttagagttgattgatggaaaaagcagacaggaactggtgggaggtcaagtggggaagttggtgaatgtggaataacttacctttgtgctccacttaaaccagatgtgttgcagctttcctgacatgcaaggatctactttaattccacactctcattaataaattgaataaaagggaatgttttggcacctgatataatctgccaggctatgtgacagtaggaaggaatggtttcccctaacaagcccaatgcactggtctgactttataaattatttaataaaatgaactattatcaaataaaacgtatgaatcagtaaaaaaaaaaanaaaaaaaaaaaaaaaaaanaanaaanaananaaaaanaaaaaaaaagagggggggggccgggaaaaaagaaatatcccccggggggcccaccccccgcaacacggccccgcccccgtccttcttgtgagcacaaggggggccccaattagggagggggaataaaaaaggacgggaggcagggggggggggttaacaccaggggtgggcgggggagaacaccgggcccgcggggaacccttgggggagggccccccattcttcgcggcgggcggcgaccactctgtcgcggcccaaccccccacggagtgtttaaagccgtctccggggacaattaaacccttcaacgcggtaatgtgggggcaacccccggcaatatgtccgcgggcgaagagttcgctccgggttgtttataggactacgagaggatatatatatatataagacgcaaccacgacgccaccacgccgctataatactgcgatccctccactgccgcgtctgataccctccacactccgacacccaaactacaccatgcgcgcg

SEQ ID NO: 361835 - DNA, 992 bp, Homo sapiens
acggcggccctgcctccaccacgtgacgcacggatggccgccgcttcctcttactgtcgtagttccgcgtctgagcgctcgacgctcctgggtgccattgcctgcctgagtcacgtgtcagggggaagctggaaggcgtcgttctcctttcccagctctcctgcctgtccgccatgttttcaggccgggtctggcttggtcttcccccgtaaggaaatggccggggagctccagggacccaggcgccgtcgcttcggcggagcctgggctgaccagccaggacagcggggtaaacccgaacaattctgcgcgaggtagggaggccatggcgtccggcagtaactggctctccggggtgaatgtcgtgctggtgatggcctacgggagcctggtgtttgtactgctatttatttttgtgaagaggcaaatcatgcgctttgcaatgaaatctcgaaggggacctcatgtccctgtgggacacaatgcccccaaggacttgaaagaggagattgatattcgactctccagggttcaggatatcaagtatgagccccagctccttgcagatgatgatgctagactactacaactggaaacccagggaaatcaaagttgctacaactatctgtataggatgaaagctctggatgccattcgtacctctgagatcccatttcattctgaaggccggcatccccgttccttaatgggcaagaatttccgctcctacctgctggatctgcgaaacactagtacgcctttcaagggtgtacgcaaagcactcattgatacccttttggatggctatgaaacagcccgctatgggacaggggtctttggccagaatgagtacctacgctatcaggaggccctgagtgagctggccactgccgtgagtttggaggggaacgtgtcagagggagctggtacagtagtgttggactgttgccacagtgcagtgaccttcataaagcatataaacaaaatccatg

SEQ ID NO: 361836 - DNA, 1747 bp, Homo sapiens
acggcggccctgcctccaccacgtgacgcacggatggccgccgcttcctcttactgtcgtagttccgcgtctgagcgctcgacgctcctgggtgccattgcctgcctgagtcacgtgtcagggggaagctggaaggcgtcgttctcctttcccagctctcctgcctgtccgccatgttttcaggccgggtctggcttggtcttcccccgtaaggaaatggccggggagctccagggacccaggcgccgtcgcttcggcggagcctgggctgaccagccaggacagcggggtaaacccgaacaattctgcgcgaggtagggaggccatggcgtccggcagtaactggctctccggggtgaatgtcgtgctggtgatggcctacgggagcctggtgtttgtactgctatttatttttgtgaagaggcaaatcatgcgctttgcaatgaaatctcgaaggggacctcatgtccctgtgggacacaatgcccccaaggacttgaaagaggagattgatattcgactctccagggttcaggatatcaagtatgagccccagctccttgcagatgatgatgctagactactacaactggaaacccagggaaatcaaagttgctacaactatctgtataggatgaaagctctggatgccattcgtacctctgagatcccatttcattctgaaggccggcatccccgttccttaatgggcaagaatttccgctcctacctgctggatctgcgaaacactagtacgcctttcaagggtgtacgcaaagcactcattgatacccttttggatggctatgaaacagcccgctatgggacaggggtctttggccagaatgagtacctacgctatcaggaggccctgagtgagctggccactgccgtgagtttggaggggaacgtgtcagagggagctggtacagtagtgttggactgttgccacagtgcagtgaccttcataaagcatataaacaaaatccatgataccataagagttgtcaggttctagactattagatcagtctcttacattagaaagcagatgcggccgggcacagtggttcacgcctataatcccagcactttgggaggccgaggcgggaggatcatctgaggttgggaatccgagaccagcctgaccaacatggagaaaccccgttctctactaaaaatacaaaattagccgggcgtggtggcgcatgcctgtaatcctagcttctggggaggctgaggcaggagaatctcttgaacccgggaggcggaggttgcggtgagccaagatcgtgccattatactccagcctgggcaacaaaagtgaaactctgtctcaaaaaaaaaaaagaagaaaagaaagcagatgcaactatacaagctagtaaaagaagtttttactagcatttttcttgtgtgcatttttcttgtcttttgtttagcccaataaaatgtcaaaattggtgtagcctagcaaagggaatagtttttcagcacacacagggattccttctcttcagagtctcagcgtcccttttgtgtcttggcccaataaaagtaagaattaaataacattgggccgggcgcggtggctcacgcctgtaatcccagcactttgggaggccgaggcaggcgaatcatgaggtcaagagatcaagaccatcctagccaacaaggtgaaaccctgtctctactaaaaatacaaaaattagctgggcatggtggtgcgtgcctgtaatctcagcta

SEQ ID NO: 361837 - DNA, 1645 bp, Homo sapiens
acggcggccctgcctccaccacgtgacgcacggatggccgccgcttcctcttactgtcgtagttccgcgtctgagcgctcgacgctcctgggtgccattgcctgcctgagtcacgtgtcagggggaagctggaaggcgtcgttctcctttcccagctctcctgcctgtccgccatgttttcaggccgggtctggcttggtcttcccccgtaaggaaatggccggggagctccagggacccaggcgccgtcgcttcggcggagcctgggctgaccagccaggacagcggggtaaacccgaacaattctgcgcgaggtagggaggccatggcgtccggcagtaactggctctccggggtgaatgtcgtgctggtgatggcctacgggagcctggacttgaaagaggagattgatattcgactctccagggttcaggatatcaagtatgagccccagctccttgcagatgatgatgctagactactacaactggaaacccagggaaatcaaagttgctacaactatctgtataggatgaaagctctggatgccattcgtacctctgagatcccatttcattctgaaggccggcatccccgttccttaatgggcaagaatttccgctcctacctgctggatctgcgaaacactagtacgcctttcaagggtgtacgcaaagcactcattgatacccttttggatggctatgaaacagcccgctatgggacaggggtctttggccagaatgagtacctacgctatcaggaggccctgagtgagctggccactgccgtgagtttggaggggaacgtgtcagagggagctggtacagtagtgttggactgttgccacagtgcagtgaccttcataaagcatataaacaaaatccatgataccataagagttgtcaggttctagactattagatcagtctcttacattagaaagcagatgcggccgggcacagtggttcacgcctataatcccagcactttgggaggccgaggcgggaggatcatctgaggttgggaatccgagaccagcctgaccaacatggagaaaccccgttctctactaaaaatacaaaattagccgggcgtggtggcgcatgcctgtaatcctagcttctggggaggctgaggcaggagaatctcttgaacccgggaggcggaggttgcggtgagccaagatcgtgccattatactccagcctgggcaacaaaagtgaaactctgtctcaaaaaaaaaaaagaagaaaagaaagcagatgcaactatacaagctagtaaaagaagtttttactagcatttttcttgtgtgcatttttcttgtcttttgtttagcccaataaaatgtcaaaattggtgtagcctagcaaagggaatagtttttcagcacacacagggattccttctcttcagagtctcagcgtcccttttgtgtcttggcccaataaaagtaagaattaaataacattgggccgggcgcggtggctcacgcctgtaatcccagcactttgggaggccgaggcaggcgaatcatgaggtcaagagatcaagaccatcctagccaacaaggtgaaaccctgtctctactaaaaatacaaaaattagctgggcatggtggtgcgtgcctgtaatctcagcta

SEQ ID NO: 361838 - DNA, 1069 bp, Homo sapiens
  misc_feature (984)..(984): n is a, c, g, or t
  misc_feature (988)..(988): n is a, c, g, or t
acggcggccctgcctccaccacgtgacgcacggatggccgccgcttcctcttactgtcgtagttccgcgtctgagcgctcgacgctcctgggtgccattgcctgcctgagtcacgtgtcagggggaagctggaaggcgtcgttctcctttcccagctctcctgcctgtccgccatgttttcaggccgggtctggcttggtcttcccccgtaaggaaatggccggggagctccagggacccaggcgccgtcgcttcggcggagcctgggctgaccagccaggacagcggggtaaacccgaacaattctgcgcgaggtagggaggccatggcgtccggcagtaactggctctccggggtgaatgtcgtgctggtgatggcctacgggagcctggtgtttgtactgctatttatttttgtgaagaggcaaatcatgcgctttgcaatgaaatctcgaaggggacctcatgtccctgtgggacacaatgcccccaaggttgctacaactatctgtataggatgaaagctctggatgccattcgtacctctgagatcccatttcattctgaaggccggcatccccgttccttaatgggcaagaatttccgctcctacctgctggatctgcgaaacactagtacgcctttcaagggtgtacgcaaagcactcattgatacccttttggatggctatgaaacagcccgctatgggacaggggtctttggccagaatgagtacctacgctatcaggaggccctgagtgagctggccactgcggttaaagcacgaattgggagctctcagcgacatcaccagtcagcagccaaagacctaactcagtcccctgaggtctccccaacaaccatccaggtgacatacctcccctccagtcagaagagtaaacgtgccaagcacttccttgaattgaagagctttaaggataactataacacattggagagtactctgtgacggagctgaagggcnggantaagcccgcctggcattggcaaaggttgtggcgcggccctcgaaattggccaggccaatggttcaccatccggtccacgta

SEQ ID NO: 361839 - DNA, 1188 bp, Homo sapiens
aagatcactgccactgcactccagcccgggtgacagagcgagactccatctcaaaaaaaaagactaaagaatgagaagagatatcattgtgctgttttctccacagagatcccatttcattctgaaggccggcatccccgttccttaatgggcaagaatttccgctcctacctgctggatctgcgaaacactagtacgcctttcaagggtgtacgcaaagcactcattgatacccttttggatggctatgaaacagcccgctatgggacaggggtctttggccagaatgagtacctacgctatcaggaggccctgagtgagctggccactgccgtgagtttggaggggaacgtgtcagagggagctggtacagtagtgttggactgttgccacagtgcagtgaccttcataaagcatataaacaaaatccatgataccataagagttgtcaggttctagactattagatcagtctcttacattagaaagcagatgcggccgggcacagtggttcacgcctataatcccagcactttgggaggccgaggcgggaggatcatctgaggttgggaatccgagaccagcctgaccaacatggagaaaccccgttctctactaaaaatacaaaattagccgggcgtggtggcgcatgcctgtaatcctagcttctggggaggctgaggcaggagaatctcttgaacccgggaggcggaggttgcggtgagccaagatcgtgccattatactccagcctgggcaacaaaagtgaaactctgtctcaaaaaaaaaaaagaagaaaagaaagcagatgcaactatacaagctagtaaaagaagtttttactagcatttttcttgtgtgcatttttcttgtcttttgtttagcccaataaaatgtcaaaattggtgtagcctagcaaagggaatagtttttcagcacacacagggattccttctcttcagagtctcagcgtcccttttgtgtcttggcccaataaaagtaagaattaaataacattgggccgggcgcggtggctcacgcctgtaatcccagcactttgggaggccgaggcaggcgaatcatgaggtcaagagatcaagaccatcctagccaacaaggtgaaaccctgtctctactaaaaatacaaaaattagctgggcatggtggtgcgtgcctgtaatctcagcta

SEQ ID NO: 361840 - DNA, 1039 bp, Homo sapiens
  misc_feature (3)..(3): n is a, c, g, or t
  misc_feature (11)..(11): n is a, c, g, or t
tanggctagtncgaggctggtgttgaatcggccgaggccatgttttcaggccgggtctggcttggtcttcccccgtaaggaaatggccggggagctccagggacccaggcgccgtcgcttcggcggagcctgggctgaccagccaggacagcggggtaaacccgaacaattctgcgcgaggtagggaggccatggcgtccggcagtaactggctctccggggtgaatgtcgtgctggtgatggcctacgggagcctggacttgaaagaggagattgatattcgactctccagggttcaggatatcaagtatgagccccagctccttgcagatgatgatgctagactactacaactggaaacccagggaaatcaaagttgctacaactatctgtataggatgaaagctctggatgccattcgtacctctgagatcccatttcattctgaaggccggcatccccgttccttaatgggcaagaatttccgctcctacctgctggatctgcgaaacactagtacgcctttcaagggtgtacgcaaagcactcattgatacccttttggatggctatgaaacagcccgctatgggacaggggtctttggccagaatgagtacctacgctatcaggaggccctgagtgagctggccactgcggttaaagcacgaattgggagctctcagcgacatcaccagtcagcagccaaagacctaactcagtcccctgaggtctccccaacaaccatccaggtgacatacctcccctccagtcagaagagtaaacgtgccaagcacttccttgaattgaagagctttaaggataactataacacattggagagtactctgtgacggagctgaaggggctctgcgtgattagcagtcgtgctgtgcgaccggtgttgcggcctcgaattgccaggccagttcccagccggtcgcgttacgggtggggtccccccttgttgattggaattcccgtggtgggggggtggagaatggaccccccttggagtcttgggggggggggggcgcttgct

SEQ ID NO: 361841 - DNA, 2389 bp, Homo sapiens
  misc_feature (1845)..(1845): n is a, c, g, or t
  misc_feature (1864)..(1864): n is a, c, g, or t
  misc_feature (1867)..(1867): n is a, c, g, or t
  misc_feature (1871)..(1871): n is a, c, g, or t
  misc_feature (1874)..(1874): n is a, c, g, or t
  misc_feature (1876)..(1876): n is a, c, g, or t
  misc_feature (1882)..(1882): n is a, c, g, or t
acggcggccctgcctccaccacgtgacgcacggatggccgccgcttcctcttactgtcgtagttccgcgtctgagcgctcgacgctcctgggtgccattgcctgcctgagtcacgtgtcagggggaagctggaaggcgtcgttctcctttcccagctctcctgcctgtccgccatgttttcaggccgggtctggcttggtcttcccccgtaaggaaatggccggggagctccagggacccaggcgccgtcgcttcggcggagcctgggctgaccagccaggacagcggggtaaacccgaacaattctgcgcgaggtagggaggccatggcgtccggcagtaactggctctccggggtgaatgtcgtgctggtgatggcctacgggagcctggtgtttgtactgctatttatttttgtgaagaggcaaatcatgcgctttgcaatgaaatctcgaaggggacctcatgtccctgtgggacacaatgcccccaaggacttgaaagaggagattgatattcgactctccagggttcaggatatcaagtatgagccccagctccttgcagatgatgatgctagactactacaactggaaacccagggaaatcaaagttgctacaactatctgtataggatgaaagctctggatgccattcgtacctctgagatcccatttcattctgaaggccggcatccccgttccttaatgggcaagaatttccgctcctacctgctggatctgcgaaacactagtacgcctttcaagggtgtacgcaaagcactcattgatacccttttggatggctatgaaacagcccgctatgggacaggggtctttggccagaatgagtacctacgctatcaggaggccctgagtgagctggccactgcggttaaagcacgaattgggagctctcagcgacatcaccagtcagcagccaaagacctaactcagtcccctgaggtctccccaacaaccatccaggtgacatacctcccctccagtcagaagagtaaacgtgccaagcacttccttgaattgaagagctttaaggataactataacacattggagagtactctgtgacggagctgaaggactcttgccgtagattaagccagtcagttgcaatgtgcaagacaggctgcttgccgggccgccctcggaacatctggcccagcaggcccagactgtatccatccaagttcccgttgtatccagagttcttagagcttgtgtctaaagggtaattccccaacccttccttatgagcatttttagaacattggctaagactattttcccccagtagcgcttttttctggatttgcattcgggtgttattcttaatgtttctgtcaaagcttcttaaaaatcttcacttggtttcagccatagttcaccttccctgttccaggtttatttaattccaaaggtgagagttggagtgagatgtcttccatatctatacctttgtgcacagttgaatgggaactgtttgggtttagggcatcttagagttgattgatggaaaaagcagacaggaactggtgggaggtcaagtggggaagttggtgaatgtggaataacttacctttgtgctccacttaaaccagatgtgttgcagctttcctgacatgcaaggatctactttaattccacactctcattaataaattgaataaaagggaatgttttggcacctgatataatctgccaggctatgtgacagtaggaaggaatggtttcccctaacaagcccaatgcactggtctgactttataaattatttaataaaatgaactattatcaaataaaacgtatgaatcagtaaaaaaaaaaanaaaaaaaaaaaaaaaaaanaanaaanaananaaaaanaaaaaaaaagagggggggggccgggaaaaaagaaatatcccccggggggcccaccccccgcaacacggccccgcccccgtccttcttgtgagcacaaggggggccccaattagggagggggaataaaaaaggacgggaggcagggggggggggttaacaccaggggtgggcgggggagaacaccgggcccgcggggaacccttgggggagggccccccattcttcgcggcgggcggcgaccactctgtcgcggcccaaccccccacggagtgtttaaagccgtctccggggacaattaaacccttcaacgcggtaatgtgggggcaacccccggcaatatgtccgcgggcgaagagttcgctccgggttgtttataggactacgagaggatatatatatatataagacgcaaccacgacgccaccacgccgctataatactgcgatccctccactgccgcgtctgataccctccacactccgacacccaaactacaccatgcgcgcg

SEQ ID NO: 361842 - DNA, 2504 bp, Homo sapiens
acggcggccctgcctccaccacgtgacgcacggatggccgccgcttcctcttactgtcgtagttccgcgtctgagcgctcgacgctcctgggtgccattgcctgcctgagtcacgtgtcagggggaagctggaaggcgtcgttctcctttcccagctctcctgcctgtccgccatgttttcaggccgggtctggcttggtcttcccccgtaaggaaatggccggggagctccagggacccaggcgccgtcgcttcggcggagcctgggctgaccagccaggacagcggggtaaacccgaacaattctgcgcgaggtagggaggccatggcgtccggcagtaactggctctccggggtgaatgtcgtgctggtgatggcctacgggagcctggtgtttgtactgctatttatttttgtgaagaggcaaatcatgcgctttgcaatgaaatctcgaaggggacctcatgtccctgtgggacacaatgcccccaaggacttgaaagaggagattgatattcgactctccagggttcaggatatcaagtatgagccccagctccttgcagatgatgatgctagactactacaactggaaacccagggaaatcaaagttgctacaactatctgtataggatgaaagctctggatgccattcgtacctctgagatcccatttcattctgaaggccggcatccccgttccttaatgggcaagaatttccgctcctacctgctggatctgcgaaacactagtacgcctttcaagggtgtacgcaaagcactcattgatacccttttggatggctatgaaacagcccgctatgggacaggggtctttggccagaatgagtacctacgctatcaggaggccctgagtgagctggccactgcggttaaagcacgaattgggagctctcagcgacatcaccagtcagcagccaaagacctaactcagtcccctgaggtctccccaacaaccatccaggtgacatacctcccctccagtcagaagagtaaacgtgccaagcacttccttgaattgaagagctttaaggataactataacacattggagagtactctgtgacggagctgaaggactcttgccgtagattaagccagtcagttgcaatgtgcaagacaggctgcttgccgggccgccctcggaacatctggcccagcaggcccagactgtatccatccaagttcccgttgtatccagagttcttagagcttgtgtctaaagggtaattccccaacccttccttatgagcatttttagaacattggctaagactattttcccccagtagcgcttttttctggatttgcattcgggtgttattcttaatgtttctgtcaaagcttcttaaaaatcttcacttggtttcagccatagttcaccttccctgttccaggtttatttaattccaaaggtgagagttggagtgagatgtcttccatatctatacctttgtgcacagttgaatgggaactgtttgggtttagggcatcttagagttgattgatggaaaaagcagacaggaactggtgggaggtcaagtggggaagttggtgaatgtggaataacttacctttgtgctccacttaaaccagatgtgttgcagctttcctgacatgcaaggatctactttaattccacactctcattaataaattgaataaaagggaatgttttggcacctgatataatctgccaggctatgtgacagtaggaaggaatggtttcccctaacaagcccaatgcactggtctgactttataaattatttaataaaatgaactattatcaaaaaaccaacaacaaagagaggcgcgcgggcgcgcctcagagagagtttctccccgtgcgagagcggcgcccccaagagcttctctgcgcgcgccgtttccccccgaagtgactatgtccacgtggctcataaccaaatgcgggtgggttctgccccaattagatgagaggcgagacgacctgcaggcctcacctcatcactattagacggccccctgagggcgcacacagacgctgcgcccagcggctgcgcaggtctttattcaataccacaagacgaagttccagcggggctcgcaccacgcggggggcgtacaacaaacaaccggccgtggtgcacagccaaccgccacatgttgaggcagcactaaccctcttgatgccgaggctgatcgacagcagagccgacaaacacccccttctaaagcccctacctcctcgcctgtgcagacggcgaccgtggcggacgcacacccacactattcaatcctccggtcggggcggcaccacaaacaacgaaccactaaactctgcatactaacacaaacagacgacagactactttctctcacagcagcgcgcacctcactcatatctgcgcgcgcatcaccacatcccatgatagcacaagacgctacctcccacaacagcacggccagacgagcacaccatactaaacgagcggctggct

SEQ ID NO: 361843 - DNA, 2455 bp, Homo sapiens
  misc_feature (1801)..(1801): n is a, c, g, or t
  misc_feature (1820)..(1820): n is a, c, g, or t
  misc_feature (1823)..(1823): n is a, c, g, or t
  misc_feature (1827)..(1827): n is a, c, g, or t
  misc_feature (1830)..(1830): n is a, c, g, or t
  misc_feature (1832)..(1832): n is a, c, g, or t
  misc_feature (1838)..(1838): n is a, c, g, or t
  misc_feature (1937)..(1937): n is a, c, g, or t
acggcggccctgcctccaccacgtgacgcacggatggccgccgcttcctcttactgtcgtagttccgcgtctgagcgctcgacgctcctgggtgccattgcctgcctgagtcacgtgtcagggggaagctggaaggcgtcgttctcctttcccagctctcctgcctgtccgccatgttttcaggccgggtctggcttggtcttcccccgtaaggaaatggccggggagctccagggacccaggcgccgtcgcttcggcggagcctgggctgaccagccaggacagcggggtaaacccgaacaattctgcgcgaggtagggaggccatggcgtccggcagtaactggctctccggggtgaatgtcgtgctggtgatggcctacgggagcctggtgtttgtactgctatttatttttgtgaagaggcaaatcatgcgctttgcaatgaaatctcgaaggggacctcatgtccctgtgggacacaatgcccccaaggacttgaaagaggagattgatattcgactctccagggttcaggatatcaagtatgagccccagctccttgcagatgatgatgctagactactacaactggaaacccagggaaatcaaagttgctacaactatctgtataggatgaaagctctggatgccattcgtacctctgagatcccatttcattctgaaggccggcatccccgttccttaatgggcaagaatttccgctcctacctgctggatctgcgaaacactagtacgcctttcaagggtgtacgcaaagcactcattgatacccttttggatggctatgaaacagcccgctatgggacaggggtctttggccagaatgagtacctacgctatcaggaggccctgagtgagctggccactgcggttaaagcacgaattgggagctctcagcgacatcaccagtcagcagccaaagacctaactcagtcccctgaggtctccccaacaaccatccaggtgacatacctcccctccagtcagaagagtaaacgtgccaagcacttccttgaattgaagagctttaaggataactataacacattggagagtactctgtgacggagctgaaggactcttgccgtagattaagccagtcagttgcaatgtgcaagacaggctgcttgccgggccgccctcggaacatctggcccagcaggcccagactgtatccatccaagttcccgttgtatccagagttcttagagcttgtgtctaaagggtaattccccaacccttccttatgagcatttttagaacattggctaagactattttcccccagtagcgcttttttctggatttgcattcgggtgttattcttaatgtttctgtcaaagcttcttaaaaatcttcacttggtttcagccatagttcaccttccctgttccaggtttatttaattccaaaggtgagagttggagtgagatgtcttccatatctatacctttgtgcacagttgaatggagcagacaggaactggtgggaggtcaagtggggaagttggtgaatgtggaataacttacctttgtgctccacttaaaccagatgtgttgcagctttcctgacatgcaaggatctactttaattccacactctcattaataaattgaataaaagggaatgttttggcacctgatataatctgccaggctatgtgacagtaggaaggaatggtttcccctaacaagcccaatgcactggtctgactttataaattatttaataaaatgaactattatcaaataaaacgtatgaatcagtaaaaaaaaaaanaaaaaaaaaaaaaaaaaanaanaaanaananaaaaanaaaaaaaaaaaaaaaaaaaaaaaaacaaaagtaaacaaaagaaaaaagaaaaaaggagagaggaggagcggcgccgaccgacaacaaataaccaaattncaccagcgaggagaagcaagacagtaagacgacgctgcgcaggctcgacgtgccttggagacgagggggaggcgccggcgcgacgagcgacgagtgcgtccacaaacccagtagacgagagcgaggcgcagacgagcaccgacatatcacacgaagagtcggctggggggagaagcaatgataacagtctaacgcagagatctaattgtgggttctcgtctgatgaattacggggacgacacccgtataaaagagtagcgggccgtgggagttcacaatctgttctgtgagaaggacaagaacaagccaatacaaaacataaaggacgacgtcgatgtatagatcctattacgttacgatcgagtataaagaaattaagttagctgtctagtgcagatacgtctgttgaggtggagtgagccgaaaaaagaactgcaggtgtacgattagttgtcgcagaggaggtaagtgacaactcatgcggtcttctaacgtgtcggatgcatcgtgcgagccaa

SEQ ID NO: 361844 - DNA, 2210 bp, Homo sapiens
  misc_feature (1666)..(1666): n is a, c, g, or t
  misc_feature (1685)..(1685): n is a, c, g, or t
  misc_feature (1688)..(1688): n is a, c, g, or t
  misc_feature (1692)..(1692): n is a, c, g, or t
  misc_feature (1695)..(1695): n is a, c, g, or t
  misc_feature (1697)..(1697): n is a, c, g, or t
  misc_feature (1703)..(1703): n is a, c, g, or t
acggcggccctgcctccaccacgtgacgcacggatggccgccgcttcctcttactgtcgtagttccgcgtctgagcgctcgacgctcctgggtgccattgcctgcctgagtcacgtgtcagggggaagctggaaggcgtcgttctcctttcccagctctcctgcctgtccgccatgttttcaggccgggtctggcttggtcttcccccgtaaggaaatggccggggagctccagggacccaggcgccgtcgcttcggcggagcctgggctgaccagccaggacagcggggtaaacccgaacaattctgcgcgaggacttgaaagaggagattgatattcgactctccagggttcaggatatcaagtatgagccccagctccttgcagatgatgatgctagactactacaactggaaacccagggaaatcaaagttgctacaactatctgtataggatgaaagctctggatgccattcgtacctctgagatcccatttcattctgaaggccggcatccccgttccttaatgggcaagaatttccgctcctacctgctggatctgcgaaacactagtacgcctttcaagggtgtacgcaaagcactcattgatacccttttggatggctatgaaacagcccgctatgggacaggggtctttggccagaatgagtacctacgctatcaggaggccctgagtgagctggccactgcggttaaagcacgaattgggagctctcagcgacatcaccagtcagcagccaaagacctaactcagtcccctgaggtctccccaacaaccatccaggtgacatacctcccctccagtcagaagagtaaacgtgccaagcacttccttgaattgaagagctttaaggataactataacacattggagagtactctgtgacggagctgaaggactcttgccgtagattaagccagtcagttgcaatgtgcaagacaggctgcttgccgggccgccctcggaacatctggcccagcaggcccagactgtatccatccaagttcccgttgtatccagagttcttagagcttgtgtctaaagggtaattccccaacccttccttatgagcatttttagaacattggctaagactattttcccccagtagcgcttttttctggatttgcattcgggtgttattcttaatgtttctgtcaaagcttcttaaaaatcttcacttggtttcagccatagttcaccttccctgttccaggtttatttaattccaaaggtgagagttggagtgagatgtcttccatatctatacctttgtgcacagttgaatgggaactgtttgggtttagggcatcttagagttgattgatggaaaaagcagacaggaactggtgggaggtcaagtggggaagttggtgaatgtggaataacttacctttgtgctccacttaaaccagatgtgttgcagctttcctgacatgcaaggatctactttaattccacactctcattaataaattgaataaaagggaatgttttggcacctgatataatctgccaggctatgtgacagtaggaaggaatggtttcccctaacaagcccaatgcactggtctgactttataaattatttaataaaatgaactattatcaaataaaacgtatgaatcagtaaaaaaaaaaanaaaaaaaaaaaaaaaaaanaanaaanaananaaaaanaaaaaaaaagagggggggggccgggaaaaaagaaatatcccccggggggcccaccccccgcaacacggccccgcccccgtccttcttgtgagcacaaggggggccccaattagggagggggaataaaaaaggacgggaggcagggggggggggttaacaccaggggtgggcgggggagaacaccgggcccgcggggaacccttgggggagggccccccattcttcgcggcgggcggcgaccactctgtcgcggcccaaccccccacggagtgtttaaagccgtctccggggacaattaaacccttcaacgcggtaatgtgggggcaacccccggcaatatgtccgcgggcgaagagttcgctccgggttgtttataggactacgagaggatatatatatatataagacgcaaccacgacgccaccacgccgctataatactgcgatccctccactgccgcgtctgataccctccacactccgacacccaaactacaccatgcgcgcg

SEQ ID NO: 361845 - DNA, 1586 bp, Homo sapiens
acggcggccctgcctccaccacgtgacgcacggatggccgccgcttcctcttactgtcgtagttccgcgtctgagcgctcgacgctcctgggtgccattgcctgcctgagtcacgtgtcagggggaagctggaaggcgtcgttctcctttcccagctctcctgcctgtccgccatgttttcaggccgggtctggcttggtcttcccccgtaaggaaatggccggggagctccagggacccaggcgccgtcgcttcggcggagcctgggctgaccagccaggacagcggggtaaacccgaacaattctgcgcgaggtagggaggccatggcgtccggcagtaactggctctccggggtgaatgtcgtgctggtgatggcctacgggagcctggtgtttgtactgctatttatttttgtgaagaggcaaatcatgcgctttgcaatgaaatctcgaaggggacctcatgtccctgtgggacacaatgcccccaaggacttgaaagaggagattgatattcgactctccagggttcaggatatcaagtatgagccccagctccttgcagatgatgatgctagactactacaactggaaacccagggaaatcaaagttgctacaactatctgtataggatgaaagctctggatgccattcgtacctctgagatcccatttcattctgaaggccggcatccccgttccttaatgggcaagaatttccgctcctacctgctggatctgcgaaacactagtacgcctttcaagggtgtacgcaaagcactcattgatacccttttggatggctatgaaacagcccgctatgggacaggggtctttggccagaatgagtacctacgctatcaggaggccctgagtgagctggccactgcggttaaagcacgaattgggagctctcagcgacatcaccagtcagcagccaaagacctaactcagtcccctgaggtctccccaacaaccatccaggtgacatacctcccctccagtcagaagagtaaacgtgccaagcacttccttgaattgaagagctttaaggataactataacacattggagagtactctgtgacggagctgaaggactcttgccgtagattaagccagtcagttgcaatgtgcaagacaggctgcttgccgggccgccctcggaacatctggcccagcaggcccagactgtatccatccaagttcccgttgtatccagagttcttagagcttgtgtctaaagggtaattccccaacccttccttatgagcatttttagaacattggctaagactattttcccccagtagcgcttttttctggatttgcattcgggtgttattcttaatgtttctgtcaaagcttcttaaaaatcttcacttggtttcagccatagttcaccttccctgttccaggtttatttaattccacactctcattaataaattgaataaaagggaatgttttggcacctgatataatctgccaggctatgtgacagtaggaaggaatggtttcccctaacaagcccaatgcactggtctgactttataaattatttaataaaatgaactattatcaaa

SEQ ID NO: 361846 - DNA, 2137 bp, Homo sapiens
  misc_feature (3)..(3): n is a, c, g, or t
  misc_feature (11)..(11): n is a, c, g, or t
  misc_feature (1593)..(1593): n is a, c, g, or t
  misc_feature (1612)..(1612): n is a, c, g, or t
  misc_feature (1615)..(1615): n is a, c, g, or t
  misc_feature (1619)..(1619): n is a, c, g, or t
  misc_feature (1622)..(1622): n is a, c, g, or t
  misc_feature (1624)..(1624): n is a, c, g, or t
  misc_feature (1630)..(1630): n is a, c, g, or t
tanggctagtncgaggctggtgttgaatcggccgaggccatgttttcaggccgggtctggcttggtcttcccccgtaaggaaatggccggggagctccagggacccaggcgccgtcgcttcggcggagcctgggctgaccagccaggacagcggggtaaacccgaacaattctgcgcgaggtagggaggccatggcgtccggcagtaactggctctccggggtgaatgtcgtgctggtgatggcctacgggagcctggtgtttgtactgctatttatttttgtgaagaggcaaatcatgcgctttgcaatgaaatctcgaaggggacctcatgtccctgtgggacacaatgcccccaaggttgctacaactatctgtataggatgaaagctctggatgccattcgtacctctgagatcccatttcattctgaaggccggcatccccgttccttaatgggcaagaatttccgctcctacctgctggatctgcgaaacactagtacgcctttcaagggtgtacgcaaagcactcattgatacccttttggatggctatgaaacagcccgctatgggacaggggtctttggccagaatgagtacctacgctatcaggaggccctgagtgagctggccactgcggttaaagcacgaattgggagctctcagcgacatcaccagtcagcagccaaagacctaactcagtcccctgaggtctccccaacaaccatccaggtgacatacctcccctccagtcagaagagtaaacgtgccaagcacttccttgaattgaagagctttaaggataactataacacattggagagtactctgtgacggagctgaaggactcttgccgtagattaagccagtcagttgcaatgtgcaagacaggctgcttgccgggccgccctcggaacatctggcccagcaggcccagactgtatccatccaagttcccgttgtatccagagttcttagagcttgtgtctaaagggtaattccccaacccttccttatgagcatttttagaacattggctaagactattttcccccagtagcgcttttttctggatttgcattcgggtgttattcttaatgtttctgtcaaagcttcttaaaaatcttcacttggtttcagccatagttcaccttccctgttccaggtttatttaattccaaaggtgagagttggagtgagatgtcttccatatctatacctttgtgcacagttgaatgggaactgtttgggtttagggcatcttagagttgattgatggaaaaagcagacaggaactggtgggaggtcaagtggggaagttggtgaatgtggaataacttacctttgtgctccacttaaaccagatgtgttgcagctttcctgacatgcaaggatctactttaattccacactctcattaataaattgaataaaagggaatgttttggcacctgatataatctgccaggctatgtgacagtaggaaggaatggtttcccctaacaagcccaatgcactggtctgactttataaattatttaataaaatgaactattatcaaataaaacgtatgaatcagtaaaaaaaaaaanaaaaaaaaaaaaaaaaaanaanaaanaananaaaaanaaaaaaaaagagggggggggccgggaaaaaagaaatatcccccggggggcccaccccccgcaacacggccccgcccccgtccttcttgtgagcacaaggggggccccaattagggagggggaataaaaaaggacgggaggcagggggggggggttaacaccaggggtgggcgggggagaacaccgggcccgcggggaacccttgggggagggccccccattcttcgcggcgggcggcgaccactctgtcgcggcccaaccccccacggagtgtttaaagccgtctccggggacaattaaacccttcaacgcggtaatgtgggggcaacccccggcaatatgtccgcgggcgaagagttcgctccgggttgtttataggactacgagaggatatatatatatataagacgcaaccacgacgccaccacgccgctataatactgcgatccctccactgccgcgtctgataccctccacactccgacacccaaactacaccatgcgcgcg

SEQ ID NO: 361847 - DNA, 1830 bp, Homo sapiens
  misc_feature (1286)..(1286): n is a, c, g, or t
  misc_feature (1305)..(1305): n is a, c, g, or t
  misc_feature (1308)..(1308): n is a, c, g, or t
  misc_feature (1312)..(1312): n is a, c, g, or t
  misc_feature (1315)..(1315): n is a, c, g, or t
  misc_feature (1317)..(1317): n is a, c, g, or t
  misc_feature (1323)..(1323): n is a, c, g, or t
aagatcactgccactgcactccagcccgggtgacagagcgagactccatctcaaaaaaaaagactaaagaatgagaagagatatcattgtgctgttttctccacagagatcccatttcattctgaaggccggcatccccgttccttaatgggcaagaatttccgctcctacctgctggatctgcgaaacactagtacgcctttcaagggtgtacgcaaagcactcattgatacccttttggatggctatgaaacagcccgctatgggacaggggtctttggccagaatgagtacctacgctatcaggaggccctgagtgagctggccactgcggttaaagcacgaattgggagctctcagcgacatcaccagtcagcagccaaagacctaactcagtcccctgaggtctccccaacaaccatccaggtgacatacctcccctccagtcagaagagtaaacgtgccaagcacttccttgaattgaagagctttaaggataactataacacattggagagtactctgtgacggagctgaaggactcttgccgtagattaagccagtcagttgcaatgtgcaagacaggctgcttgccgggccgccctcggaacatctggcccagcaggcccagactgtatccatccaagttcccgttgtatccagagttcttagagcttgtgtctaaagggtaattccccaacccttccttatgagcatttttagaacattggctaagactattttcccccagtagcgcttttttctggatttgcattcgggtgttattcttaatgtttctgtcaaagcttcttaaaaatcttcacttggtttcagccatagttcaccttccctgttccaggtttatttaattccaaaggtgagagttggagtgagatgtcttccatatctatacctttgtgcacagttgaatgggaactgtttgggtttagggcatcttagagttgattgatggaaaaagcagacaggaactggtgggaggtcaagtggggaagttggtgaatgtggaataacttacctttgtgctccacttaaaccagatgtgttgcagctttcctgacatgcaaggatctactttaattccacactctcattaataaattgaataaaagggaatgttttggcacctgatataatctgccaggctatgtgacagtaggaaggaatggtttcccctaacaagcccaatgcactggtctgactttataaattatttaataaaatgaactattatcaaataaaacgtatgaatcagtaaaaaaaaaaanaaaaaaaaaaaaaaaaaanaanaaanaananaaaaanaaaaaaaaagagggggggggccgggaaaaaagaaatatcccccggggggcccaccccccgcaacacggccccgcccccgtccttcttgtgagcacaaggggggccccaattagggagggggaataaaaaaggacgggaggcagggggggggggttaacaccaggggtgggcgggggagaacaccgggcccgcggggaacccttgggggagggccccccattcttcgcggcgggcggcgaccactctgtcgcggcccaaccccccacggagtgtttaaagccgtctccggggacaattaaacccttcaacgcggtaatgtgggggcaacccccggcaatatgtccgcgggcgaagagttcgctccgggttgtttataggactacgagaggatatatatatatataagacgcaaccacgacgccaccacgccgctataatactgcgatccctccactgccgcgtctgataccctccacactccgacacccaaactacaccatgcgcgcg

SEQ ID NO: 361848 - DNA, 2270 bp, Homo sapiens
  misc_feature (1726)..(1726): n is a, c, g, or t
  misc_feature (1745)..(1745): n is a, c, g, or t
  misc_feature (1748)..(1748): n is a, c, g, or t
  misc_feature (1752)..(1752): n is a, c, g, or t
  misc_feature (1755)..(1755): n is a, c, g, or t
  misc_feature (1757)..(1757): n is a, c, g, or t
  misc_feature (1763)..(1763): n is a, c, g, or t
acggcggccctgcctccaccacgtgacgcacggatggccgccgcttcctcttactgtcgtagttccgcgtctgagcgctcgacgctcctgggtgccattgcctgcctgagtcacgtgtcagggggaagctggaaggcgtcgttctcctttcccagctctcctgcctgtccgccatgttttcaggccgggtctggcttggtcttcccccgtaaggaaatggccggggagctccagggacccaggcgccgtcgcttcggcggagcctgggctgaccagccaggacagcggggtaaacccgaacaattctgcgcgaggtagggaggccatggcgtccggcagtaactggctctccggggtgaatgtcgtgctggtgatggcctacgggagcctggtgtttgtactgctatttatttttgtgaagaggcaaatcatgcgctttgcaatgaaatctcgaaggggacctcatgtccctgtgggacacaatgcccccaaggacttgaaagaggagattgatattcgactctccagggttcaggatatcaagtatgagccccagctccttgcagatgatgatgctagactactacaactggaaacccagggaaatcaaagttgctacaactatctgtataggatgaaagctctggatgccattcgtacctctgagatcccatttcattctgaaggccggcatccccgttccttaatgggcaagaatttccgctcctacctgctggatctgcgaaacactagtacgcctttcaagggtgtacgcaaagcactcattgatacccttttggatggctatgaaacagcccgctatgggacaggggtctttggccagaatgagtacctacgccatccaggtgacatacctcccctccagtcagaagagtaaacgtgccaagcacttccttgaattgaagagctttaaggataactataacacattggagagtactctgtgacggagctgaaggactcttgccgtagattaagccagtcagttgcaatgtgcaagacaggctgcttgccgggccgccctcggaacatctggcccagcaggcccagactgtatccatccaagttcccgttgtatccagagttcttagagcttgtgtctaaagggtaattccccaacccttccttatgagcatttttagaacattggctaagactattttcccccagtagcgcttttttctggatttgcattcgggtgttattcttaatgtttctgtcaaagcttcttaaaaatcttcacttggtttcagccatagttcaccttccctgttccaggtttatttaattccaaaggtgagagttggagtgagatgtcttccatatctatacctttgtgcacagttgaatgggaactgtttgggtttagggcatcttagagttgattgatggaaaaagcagacaggaactggtgggaggtcaagtggggaagttggtgaatgtggaataacttacctttgtgctccacttaaaccagatgtgttgcagctttcctgacatgcaaggatctactttaattccacactctcattaataaattgaataaaagggaatgttttggcacctgatataatctgccaggctatgtgacagtaggaaggaatggtttcccctaacaagcccaatgcactggtctgactttataaattatttaataaaatgaactattatcaaataaaacgtatgaatcagtaaaaaaaaaaanaaaaaaaaaaaaaaaaaanaanaaanaananaaaaanaaaaaaaaagagggggggggccgggaaaaaagaaatatcccccggggggcccaccccccgcaacacggccccgcccccgtccttcttgtgagcacaaggggggccccaattagggagggggaataaaaaaggacgggaggcagggggggggggttaacaccaggggtgggcgggggagaacaccgggcccgcggggaacccttgggggagggccccccattcttcgcggcgggcggcgaccactctgtcgcggcccaaccccccacggagtgtttaaagccgtctccggggacaattaaacccttcaacgcggtaatgtgggggcaacccccggcaatatgtccgcgggcgaagagttcgctccgggttgtttataggactacgagaggatatatatatatataagacgcaaccacgacgccaccacgccgctataatactgcgatccctccactgccgcgtctgataccctccacactccgacacccaaactacaccatgcgcgcg

SEQ ID NO: 361849 - DNA, 1054 bp, Homo sapiens
acggcggccctgcctccaccacgtgacgcacggatggccgccgcttcctcttactgtcgtagttccgcgtctgagcgctcgacgctcctgggtgccattgcctgcctgagtcacgtgtcagggggaagctggaaggcgtcgttctcctttcccagctctcctgcctgtccgccatgttttcaggccgggtctggcttggtcttcccccgtaaggaaatggccggggagctccagggacccaggcgccgtcgcttcggcggagcctgggctgaccagccaggacagcggggtaaacccgaacaattctgcgcgaggtagggaggccatggcgtccggcagtaactggctctccggggtgaatgtcgtgctggtgatggcctacgggagcctggtgtttgtactgctatttatttttgtgaagaggcaaatcatgcgctttgcaatgaaatctcgaaggggacctcatgtccctgtgggacacaatgcccccaaggacttgaaagaggagattgatattcgactctccagggttcaggatatcaagtatgagccccagctccttgcagatgatgatgctagactactacaactggaaacccagggaaatcaaagttgctacaactatctgtataggatgaaagctctggatgccattcgtacctctgagatcccatttcattctgaaggccggcatccccgttccttaatgggcaagaatttccgctcctacctgctggatctgcgaaacactagtacgcctttcaagggtgtacgcaaagcactcattgatacccttttggatggctatgaaacagcccgctatgggacaggggtctttggccagaatgagtacctacgctatcaggaggccctgagtgagctggccactgcggttaaagcacgaattgggagctctcagcgacatcaccagtcagcagccaaagacctaactcagtcccctgaggtctccccaacaacaacttccgggggatactccctcggtcgaaataagggcccggttctgatgggagcttgggacttaacgggggaccgg

SEQ ID NO: 361850 - DNA, 1518 bp, Homo sapiens
acggcggccctgcctccaccacgtgacgcacggatggccgccgcttcctcttactgtcgtagttccgcgtctgagcgctcgacgctcctgggtgccattgcctgcctgagtcacgtgtcagggggaagctggaaggcgtcgttctcctttcccagctctcctgcctgtccgccatgttttcaggccgggtctggcttggtcttcccccgtaaggaaatggccggggagctccagggacccaggcgccgtcgcttcggcggagcctgggctgaccagccaggacagcggggtaaacccgaacaattctgcgcgaggtagggaggccatggcgtccggcagtaactggctctccggggtgaatgtcgtgctggtgatggcctacgggagcctggtgtttgtactgctatttatttttgtgaagaggcaaatcatgcgctttgcaatgaaatctcgaaggggacctcatgtccctgtgggacacaatgcccccaaggacttgaaagaggagattgatattcgactctccagggttcaggatatcaagtatgagccccagctccttgcagatgatgatgctagactactacaactggaaacccagggaaatcaaagttgctacaactatctgtataggatgaaagctctggatgccattcgtacctctgagatcccatttcattctgaaggccggcatccccgttccttaatgggcaagaatttccgctcctacctgctggatctgcgaaacactagtacgcctttcaagggtgtacgcaaagcactcattgatacccttttggatggctatgaaacagcccgctatgggacaggggtctttggccagaatgagtacctacgctatcaggaggccctgagtgagctggccactgccgtgagtttggaggggaacgtgtcagagggagctggtacagtagtgttggactgttgccacagtgcagtgaccttcataaagcatataaacaaaatccatgataccataagagttgtcaggttctagactattagatcagtctcttacattagaaagcagatgcggccgggcacagtggttcacgcctataatcccagcactttgggaggccgaggcgggaggatcatctgaggttgggaatccgagaccagcctgaccaacatggagaaaccccgttctctactaaaaatacaaaattagccgggcgtggtggcgcatgcctgtaatcctagcttctggggaggctgaggcaggagaatctcttgaacccgggaggcggaggttgcggtgagccaagatcgtgccattatactccagcctgggcaacaaaagtgaaactctgtctcaaaaaaaaaaaataaaatataaaaagaaaaaaaaaatggggggggttttttgtgggggggggaaacaagaggtttataaaaggggaaggggtataggggttctgggaccatttttttttaaaagggggaaataggggggggccaaaaaggggggggataattgaaaagggggtaacctgt

SEQ ID NO: 361851 - DNA, 1040 bp, Homo sapiens
  misc_feature (931)..(932): n is a, c, g, or t
  misc_feature (939)..(939): n is a, c, g, or t
  misc_feature (941)..(941): n is a, c, g, or t
acggcggccctgcctccaccacgtgacgcacggatggccgccgcttcctcttactgtcgtagttccgcgtctgagcgctcgacgctcctgggtgccattgcctgcctgagtcacgtgtcagggggaagctggaaggcgtcgttctcctttcccagctctcctgcctgtccgccatgttttcaggccgggtctggcttggtcttcccccgtaaggaaatggccggggagctccagggacccaggcgccgtcgcttcggcggagcctgggctgaccagccaggacagcggggtaaacccgaacaattctgcgcgaggtagggaggccatggcgtccggcagtaactggctctccggggtgaatgtcgtgctggtgatggcctacgggagcctggtgtttgtactgctatttatttttgtgaagaggcaaatcatgcgctttgcaatgaaatctcgaaggggacctcatgtccctgtgggacacaatgcccccaaggacttgaaagaggagattgatattcgactctccagggttcaggatatcaagtatgagccccagctccttgcagatgatgatgctagactactacaactggaaacccagggaaatcaaaagatcccatttcattctgaaggccggcatccccgttccttaatgggcaagaatttccgctcctacctgctggatctgcgaaacactagtacgcctttcaagggtgtacgcaaagcactcattgatacccttttggatggctatgaaacagcccgctatgggacaggggtctttggccagaatgagtacctacgctatcaggaggccctgagtgagctggccactgcggttaaagcacgaattgggagctctcagcgacatcaccagtcagcagccaaagacctaactcagtcccctgaggtctccccaacaactccggannctccccngngaaaagaatgcaagcttctgatgaggtaggacctaacctgggtctgggggggaggtgcgaaaacctggtggaagggtgggcccattgtgagagagtcac

SEQ ID NO: 361852 - DNA, 592 bp, Homo sapiens
  misc_feature (510)..(510): n is a, c, g, or t
  misc_feature (582)..(582): n is a, c, g, or t
acggcggccctgcctccaccacgtgacgcacggatggccgccgcttcctcttactgtcgtagttccgcgtctgagcgctcgacgctcctgggtgccattgcctgcctgagtcacgtgtcagggggaagctggaaggcgtcgttctcctttcccagctctcctgcctgtccgccatgttttcaggccgggtctggcttggtcttcccccgtaaggaaatggccggggagctccagggacccaggcgccgtcgcttcggcggagcctgggctgaccagccaggacagcggggtaaacccgaacaattctgcgcgaggtagggaggccatggcgtccggcagtaactggctctccggggtgaatgtcgtgctggtgatggcctacgggagcctggacttgaaagaggagattgatattcgactctccagggttcaggatatcaagtatgagccccagctccttgcagatgatgatgctagactactacaactggaaacccagggaaatcaaanggctacaactaatctgtaataggatggcttctggatggccattcgtacctctggagatccccattctctggncggctccccg

SEQ ID NO: 361853 - DNA, 560 bp, Homo sapiens
agcggaacgtactatcctccttacttttgggtcgggccctccgggaagatggcggccgtgcaggcggccgaggtgaaagtggatggcagcgagccgaaactgagcaagaagtggtggtaatcattagttccagggtgctctgccatgttgacgcaagctgctgtaaggcttgttagggggtccctgcgcaaaacctcctgggcagagtggggtcacagggaactgcgactgggtcaacttgctcctttcacagcgcctcacaaggacaagtcattttctgatcaaagaaggaagtacttctgtttcctgccatgaaacccgaagacaagaaggagaatgtagcaaccactgatacactggaaagcacaacagttggcacttctgtctagaaaataataattgcaagttgtataactcaggcgtctttgcatttctgcgaaagatcaaggtctgcaagggaattcttgtgtgctgctttccatttgacaccgcagttctgttcagccatcagaagagagacaaggaattaaaaatttctttttaatcctgttaccaaataa

SEQ ID NO: 361854 - DNA, 2013 bp, Homo sapiens
agcggaacgtactatcctccttacttttgggtcgggccctccgggaagatggcggccgtgcaggcggccgaggtgaaagtggatggcagcgagccgaaactgagcaagaatgagctgaagagacgcctgaaagctgagaagaaagtagcagagaaggaggccaaacagaaagagctcagtgagaaacagctaagccaagccactgctgctgccaccaaccacaccactgataatggtgtgggtcctgaggaagagagcgtggacccaaatcaatactacaaaatccgcagtcaagcaattcatcagctgaaggtcaatggggaagacccatacccacacaagttccatgtagacatctcactcactgacttcatccaaaaatatagtcacctgcagcctggggatcacctgactgacatcaccttaaaggtggcaggtaggatccatgccaaaagagcttctgggggaaagctcatcttctatgatcttcgaggagagggggtgaagttgcaagtcatggccaattccagaaattataaatcagaagaagaatttattcatattaataacaaactgcgtcggggagacataattggagttcaggggaatcctggtaaaaccaagaagggtgagctgagcatcattccgtatgagatcacactgctgtctccctgtttgcatatgttacctcatcttcactttggcctcaaagacaaggaaacaaggtatcgccagagatacttggacttgatcctgaatgactttgtgaggcagaaatttatcatccgctctaagatcatcacatatataagaagtttcttagatgagctgggattcctagagattgaaactcccatgatgaacatcatcccagggggagccgtggccaagcctttcatcacttatcacaacgagctggacatgaacttatatatgagaattgctccagaactctatcataagatgcttgtggttggtggcatcgaccgggtttatgaaattggacgccagttccggaatgaggggattgatttgacgcacaatcctgagttcaccacctgtgagttctacatggcctatgcagactatcacgatctcatggaaatcacggagaagatggtttcagggatggtgaagcatattacaggcagttacaaggtcacctaccacccagatggcccagagggccaagcctacgatgttgacttcaccccacccttccggcgaatcaacatggtagaagagcttgagaaagccctggggatgaagctgccagaaacgaacctctttgaaactgaagaaactcgcaaaattcttgatgatatctgtgtggcaaaagctgttgaatgccctccacctcggaccacagccaggctccttgacaagcttgttggggagttcctggaagtgacttgcatcaatcctacattcatctgtgatcacccacagataatgagccctttggctaaatggcaccgctctaaagagggtctgactgagcgctttgagctgtttgtcatgaagaaagagatatgcaatgcgtatactgagctgaatgatcccatgcggcagcggcagctttttgaagaacaggccaaggccaaggctgcaggtgatgatgaggccatgttcatagatgaaaacttctgtactgccctggaatatgggctgccccccacagctggctggggcatgggcattgatcgagtcgccatgtttctcacggactccaacaacatcaaggaagtacttctgtttcctgccatgaaacccgaagacaagaaggagaatgtagcaaccactgatacactggaaagcacaacagttggcacttctgtctagaaaataataattgcaagttgtataactcaggcgtctttgcatttctgcgaaagatcaaggtctgcaagggaattcttgtgtgctgctttccatttgacaccgcagttctgttcagccatcagaagagagacaaggaattaaaaatttctttttaatcctgttaccaaataa

SEQ ID NO: 361855 - DNA, 920 bp, Homo sapiens
agcgctgctaccgaagatgccaagatggacgccaggcagccaggagaaagatcccaaccccacccgcgcagatatccgcgaggccccgcgctcagcctcctcacccccgctatccgcggcctccgggtcctcctccgccttccgcttgagcttctgggaggaggggctcaccggcgcgtcccccagcaggtacttatgctcctggccccgcaggtgcttgaggtagcggtccttcagggactgccacgagtgctgcgtgagcgagctcttctccatcgctttccacaaggcgttaccggtgacggagctgggcgagcgggcattttccttcacgtaggtaaggatggctacgtcgtccgcatccgtgaaggcgatccgcccggcgtgccgctgcggctccggctccgcggcgccctcggccagggccccgggctttgcttccgagccggtgtccgccgccgaggcggggcccagccgataggcctccagctccagcctctcgttgcgctccacgcagtccaggatgtactgcgtggagatgaaatcacccgaggcctcggccagcgcctccccgggctgggccagcagcacggccccgggctcctgcactcggcacacggtgccgccgccgtgcaggatgagcgtcgacagccgacgcttggccgggctgggccgcacgtagaaggacatggagctgccgtcgtccctcacgaacagagtcgaggaatgggtgggcccgttggggtctttgcccaaatccatcgcctccgccatgtctgacgccgagcactactagaagagctaccccctcgcgagcgcctggcacacagagctcaactgactgagctgtcaccgcagacgcctctgccgcgaagcgcagcactgggcctgcgcagcagcagccgcggcgcatcgagagt

SEQ ID NO: 361856 - DNA, 728 bp, Homo sapiens
  misc_feature (8)..(8): n is a, c, g, or t
  misc_feature (51)..(51): n is a, c, g, or t
  misc_feature (61)..(61): n is a, c, g, or t
ggaaaccnaagaacttgtgaaacttttgccaaacttgttgatccccccccncggaccacanccaggctccttgacaacttgttggggagttcctggaagtgacttgcatcaatcctacattcatctgtgatcacccacagataatgagccctttggctaaatggcaccgctctaaagagggtctgactgagcgctttgagctgtttgtcatgaagaaagagatatgcaatgcgtatactgagctgaatgatcccatgcggcagcggcagctttttgaagaacaggccaaggccaaggctgcaggtgatgatgaggccatgttcatagatgaaaacttctgtactgccctggaatatgggctgccccccacagctggctggggcatgggcattgatcgagtcgccatgtttctcacggactccaacaacatcaaggaagtacttctgtttcctgccatgaaacccgaagacaagaaggagaatgtagcaaccactgatacactggaaagcacaacagttggcacttctgtctagaaaataataattgcaagttgtataactcaggcgtctttgcatttctgcgaaagatcaaggtctgcaagggaattcttgtgtgctgctttccatttgacaccgcagttctgttcagccatcagaagagagacaaggaattaaaaatttctttttaatcctgttaccaaataaaaaacaaaaaattctccagcgctg

SEQ ID NO: 361857 - DNA, 738 bp, Homo sapiens
  misc_feature (682)..(682): n is a, c, g, or t
agcggaacgtactatcctccttacttttgggtcgggccctccgggaagatggcggccgtgcaggcggccgaggtgaaagtggatggcagcgagccgaaactgagcaagaatgagctgaagagacgcctgaaagctgagaagaaagtagcagagaaggaggccaaacagaaagagctcagtgagaaacagctaagccaagccactgctgctgccaccaaccacaccactgataatggtgtgggtcctgaggaagagagcgtggacccaaatgtaggatccatgccaaaagagcttctgggggaaagctcatcttctatgatcttcgaggagagggggtgaagttgcaagtcatggccaattccagaaattataaatcagaagaagaatttattcatattaataacaaactgcgtcggggagacataattggagttcaggggaatcctggtaaaaccaagaagggtgagctgagcatcattccgtatgagatcacactgctgtctccctgtttgcatatgttacctcatcttcactttggcctcaaagacaaggaaacaaggtatcgccagagatacttggacttgatcctgaatgactttgtgaggcagaaatttatcatccgctctaagatcatcacatatataagaagtttcttagatgagctgggattcctagagattgnaactcccatgatgaacatcatcccggcgggagccaataaagttggtgaaaaaaaaa

SEQ ID NO: 361858 - DNA, 2193 bp, Homo sapiens
agcggaacgtactatcctccttacttttgggtcgggccctccgggaagatggcggccgtgcaggcggccgaggtgaaagtggatggcagcgagccgaaactgagcaagaagtggtggtaatcattagttccagggtgctctgccatgttgacgcaagctgctgtaaggcttgttagggggtccctgcgcaaaacctcctgggcagagtggggtcacagggaactgcgactgggtcaacttgctcctttcacagcgcctcacaaggacaagtcattttctgatcaaagaagtgagctgaagagacgcctgaaagctgagaagaaagtagcagagaaggaggccaaacagaaagagctcagtgagaaacagctaagccaagccactgctgctgccaccaaccacaccactgataatggtgtgggtcctgaggaagagagcgtggacccaaatcaatactacaaaatccgcagtcaagcaattcatcagctgaaggtcaatggggaagacccatacccacacaagttccatgtagacatctcactcactgacttcatccaaaaatatagtcacctgcagcctggggatcacctgactgacatcaccttaaaggtggcaggtaggatccatgccaaaagagcttctgggggaaagctcatcttctatgatcttcgaggagagggggtgaagttgcaagtcatggccaattccagaaattataaatcagaagaagaatttattcatattaataacaaactgcgtcggggagacataattggagttcaggggaatcctggtaaaaccaagaagggtgagctgagcatcattccgtatgagatcacactgctgtctccctgtttgcatatgttacctcatcttcactttggcctcaaagacaaggaaacaaggtatcgccagagatacttggacttgatcctgaatgactttgtgaggcagaaatttatcatccgctctaagatcatcacatatataagaagtttcttagatgagctgggattcctagagattgaaactcccatgatgaacatcatcccagggggagccgtggccaagcctttcatcacttatcacaacgagctggacatgaacttatatatgagaattgctccagaactctatcataagatgcttgtggttggtggcatcgaccgggtttatgaaattggacgccagttccggaatgaggggattgatttgacgcacaatcctgagttcaccacctgtgagttctacatggcctatgcagactatcacgatctcatggaaatcacggagaagatggtttcagggatggtgaagcatattacaggcagttacaaggtcacctaccacccagatggcccagagggccaagcctacgatgttgacttcaccccacccttccggcgaatcaacatggtagaagagcttgagaaagccctggggatgaagctgccagaaacgaacctctttgaaactgaagaaactcgcaaaattcttgatgatatctgtgtggcaaaagctgttgaatgccctccacctcggaccacagccaggctccttgacaagcttgttggggagttcctggaagtgacttgcatcaatcctacattcatctgtgatcacccacagataatgagccctttggctaaatggcaccgctctaaagagggtctgactgagcgctttgagctgtttgtcatgaagaaagagatatgcaatgcgtatactgagctgaatgatcccatgcggcagcggcagctttttgaagaacaggccaaggccaaggctgcaggtgatgatgaggccatgttcatagatgaaaacttctgtactgccctggaatatgggctgccccccacagctggctggggcatgggcattgatcgagtcgccatgtttctcacggactccaacaacatcaaggaagtacttctgtttcctgccatgaaacccgaagacaagaaggagaatgtagcaaccactgatacactggaaagcacaacagttggcacttctgtctagaaaataataattgcaagttgtataactcaggcgtctttgcatttctgcgaaagatcaaggtctgcaagggaattcttgtgtgctgctttccatttgacaccgcagttctgttcagccatcagaagagagacaaggaattaaaaatttctttttaatcctgttaccaaataa

SEQ ID NO: 361859 - DNA, 2307 bp, Homo sapiens
agcggaacgtactatcctccttacttttgggtcgggccctccgggaagatggcggccgtgcaggcggccgaggtgaaagtggatggcagcgagccgaaactgagcaagaagtgagtgtcgctgcgagtctttaaagcctttgcggtaggagagtctgggctgggaagcgccgcgaggttcccaccaaggctgctgtgccggggccttcttgccggctctcgtgggtggtggtaatcattagttccagggtgctctgccatgttgacgcaagctgctgtaaggcttgttagggggtccctgcgcaaaacctcctgggcagagtggggtcacagggaactgcgactgggtcaacttgctcctttcacagcgcctcacaaggacaagtcattttctgatcaaagaagtgagctgaagagacgcctgaaagctgagaagaaagtagcagagaaggaggccaaacagaaagagctcagtgagaaacagctaagccaagccactgctgctgccaccaaccacaccactgataatggtgtgggtcctgaggaagagagcgtggacccaaatcaatactacaaaatccgcagtcaagcaattcatcagctgaaggtcaatggggaagacccatacccacacaagttccatgtagacatctcactcactgacttcatccaaaaatatagtcacctgcagcctggggatcacctgactgacatcaccttaaaggtggcaggtaggatccatgccaaaagagcttctgggggaaagctcatcttctatgatcttcgaggagagggggtgaagttgcaagtcatggccaattccagaaattataaatcagaagaagaatttattcatattaataacaaactgcgtcggggagacataattggagttcaggggaatcctggtaaaaccaagaagggtgagctgagcatcattccgtatgagatcacactgctgtctccctgtttgcatatgttacctcatcttcactttggcctcaaagacaaggaaacaaggtatcgccagagatacttggacttgatcctgaatgactttgtgaggcagaaatttatcatccgctctaagatcatcacatatataagaagtttcttagatgagctgggattcctagagattgaaactcccatgatgaacatcatcccagggggagccgtggccaagcctttcatcacttatcacaacgagctggacatgaacttatatatgagaattgctccagaactctatcataagatgcttgtggttggtggcatcgaccgggtttatgaaattggacgccagttccggaatgaggggattgatttgacgcacaatcctgagttcaccacctgtgagttctacatggcctatgcagactatcacgatctcatggaaatcacggagaagatggtttcagggatggtgaagcatattacaggcagttacaaggtcacctaccacccagatggcccagagggccaagcctacgatgttgacttcaccccacccttccggcgaatcaacatggtagaagagcttgagaaagccctggggatgaagctgccagaaacgaacctctttgaaactgaagaaactcgcaaaattcttgatgatatctgtgtggcaaaagctgttgaatgccctccacctcggaccacagccaggctccttgacaagcttgttggggagttcctggaagtgacttgcatcaatcctacattcatctgtgatcacccacagataatgagccctttggctaaatggcaccgctctaaagagggtctgactgagcgctttgagctgtttgtcatgaagaaagagatatgcaatgcgtatactgagctgaatgatcccatgcggcagcggcagctttttgaagaacaggccaaggccaaggctgcaggtgatgatgaggccatgttcatagatgaaaacttctgtactgccctggaatatgggctgccccccacagctggctggggcatgggcattgatcgagtcgccatgtttctcacggactccaacaacatcaaggaagtacttctgtttcctgccatgaaacccgaagacaagaaggagaatgtagcaaccactgatacactggaaagcacaacagttggcacttctgtctagaaaataataattgcaagttgtataactcaggcgtctttgcatttctgcgaaagatcaaggtctgcaagggaattcttgtgtgctgctttccatttgacaccgcagttctgttcagccatcagaagagagacaaggaattaaaaatttctttttaatcctgttaccaaataa

SEQ ID NO: 361860 - DNA, 2092 bp, Homo sapiens
agcgctgctaccgaagatgccaagatggacgccaggcagccaggagaaagatcccaaccccacccgcgcagatatccgcgaggccccgcgctcagcctcctcacccccgctatccgcggcctccgggtcctcctccgccttccgcttgagcttctgggaggaggggctcaccggcgcgtcccccagcagtgagctgaagagacgcctgaaagctgagaagaaagtagcagagaaggaggccaaacagaaagagctcagtgagaaacagctaagccaagccactgctgctgccaccaaccacaccactgataatggtgtgggtcctgaggaagagagcgtggacccaaatcaatactacaaaatccgcagtcaagcaattcatcagctgaaggtcaatggggaagacccatacccacacaagttccatgtagacatctcactcactgacttcatccaaaaatatagtcacctgcagcctggggatcacctgactgacatcaccttaaaggtggcaggtaggatccatgccaaaagagcttctgggggaaagctcatcttctatgatcttcgaggagagggggtgaagttgcaagtcatggccaattccagaaattataaatcagaagaagaatttattcatattaataacaaactgcgtcggggagacataattggagttcaggggaatcctggtaaaaccaagaagggtgagctgagcatcattccgtatgagatcacactgctgtctccctgtttgcatatgttacctcatcttcactttggcctcaaagacaaggaaacaaggtatcgccagagatacttggacttgatcctgaatgactttgtgaggcagaaatttatcatccgctctaagatcatcacatatataagaagtttcttagatgagctgggattcctagagattgaaactcccatgatgaacatcatcccagggggagccgtggccaagcctttcatcacttatcacaacgagctggacatgaacttatatatgagaattgctccagaactctatcataagatgcttgtggttggtggcatcgaccgggtttatgaaattggacgccagttccggaatgaggggattgatttgacgcacaatcctgagttcaccacctgtgagttctacatggcctatgcagactatcacgatctcatggaaatcacggagaagatggtttcagggatggtgaagcatattacaggcagttacaaggtcacctaccacccagatggcccagagggccaagcctacgatgttgacttcaccccacccttccggcgaatcaacatggtagaagagcttgagaaagccctggggatgaagctgccagaaacgaacctctttgaaactgaagaaactcgcaaaattcttgatgatatctgtgtggcaaaagctgttgaatgccctccacctcggaccacagccaggctccttgacaagcttgttggggagttcctggaagtgacttgcatcaatcctacattcatctgtgatcacccacagataatgagccctttggctaaatggcaccgctctaaagagggtctgactgagcgctttgagctgtttgtcatgaagaaagagatatgcaatgcgtatactgagctgaatgatcccatgcggcagcggcagctttttgaagaacaggccaaggccaaggctgcaggtgatgatgaggccatgttcatagatgaaaacttctgtactgccctggaatatgggctgccccccacagctggctggggcatgggcattgatcgagtcgccatgtttctcacggactccaacaacatcaaggaagtacttctgtttcctgccatgaaacccgaagacaagaaggagaatgtagcaaccactgatacactggaaagcacaacagttggcacttctgtctagaaaataataattgcaagttgtataactcaggcgtctttgcatttctgcgaaagatcaaggtctgcaagggaattcttgtgtgctgctttccatttgacaccgcagttctgttcagccatcagaagagagacaaggaattaaaaatttctttttaatcctgttaccaaataa

SEQ ID NO: 361861 - DNA, 2078 bp, Homo sapiens
aacgtaagtgactcgactcaccatgcaaatgtggtctacaaaagtgacaacaaggccacctgtaccaattaaaaattaaacttttatgattttaggcagaactcaggtttttctttttgttgactcttgcattttgaaatgctggcctctggccgccctgcatattttaagtgcaaatctcactccatattcaatcctgtaatgcagaggtcttggttaaagaaaacaatgtattggggtcactcgggggcagaatactgccctctgctaggtgggccccactggtctgaccaggttcaacttctgaagggcttttttttttttttttttaacagcaatactacaaaatccgcagtcaagcaattcatcagctgaaggtcaatggggaagacccatacccacacaagttccatgtagacatctcactcactgacttcatccaaaaatatagtcacctgcagcctggggatcacctgactgacatcaccttaaaggtggcaggtaggatccatgccaaaagagcttctgggggaaagctcatcttctatgatcttcgaggagagggggtgaagttgcaagtcatggccaattccagaaattataaatcagaagaagaatttattcatattaataacaaactgcgtcggggagacataattggagttcaggggaatcctggtaaaaccaagaagggtgagctgagcatcattccgtatgagatcacactgctgtctccctgtttgcatatgttacctcatcttcactttggcctcaaagacaaggaaacaaggtatcgccagagatacttggacttgatcctgaatgactttgtgaggcagaaatttatcatccgctctaagatcatcacatatataagaagtttcttagatgagctgggattcctagagattgaaactcccatgatgaacatcatcccagggggagccgtggccaagcctttcatcacttatcacaacgagctggacatgaacttatatatgagaattgctccagaactctatcataagatgcttgtggttggtggcatcgaccgggtttatgaaattggacgccagttccggaatgaggggattgatttgacgcacaatcctgagttcaccacctgtgagttctacatggcctatgcagactatcacgatctcatggaaatcacggagaagatggtttcagggatggtgaagcatattacaggcagttacaaggtcacctaccacccagatggcccagagggccaagcctacgatgttgacttcaccccacccttccggcgaatcaacatggtagaagagcttgagaaagccctggggatgaagctgccagaaacgaacctctttgaaactgaagaaactcgcaaaattcttgatgatatctgtgtggcaaaagctgttgaatgccctccacctcggaccacagccaggctccttgacaagcttgttggggagttcctggaagtgacttgcatcaatcctacattcatctgtgatcacccacagataatgagccctttggctaaatggcaccgctctaaagagggtctgactgagcgctttgagctgtttgtcatgaagaaagagatatgcaatgcgtatactgagctgaatgatcccatgcggcagcggcagctttttgaagaacaggccaaggccaaggctgcaggtgatgatgaggccatgttcatagatgaaaacttctgtactgccctggaatatgggctgccccccacagctggctggggcatgggcattgatcgagtcgccatgtttctcacggactccaacaacatcaaggaagtacttctgtttcctgccatgaaacccgaagacaagaaggagaatgtagcaaccactgatacactggaaagcacaacagttggcacttctgtctagaaaataataattgcaagttgtataactcaggcgtctttgcatttctgcgaaagatcaaggtctgcaagggaattcttgtgtgctgctttccatttgacaccgcagttctgttcagccatcagaagagagacaaggaattaaaaatttctttttaatcctgttaccaaataa

SEQ ID NO: 361862 - DNA, 2027 bp, Homo sapiens
agcggaacgtactatcctccttacttttgggtcgggccctccgggaagatggcggccgtgcaggcggccgaggtgaaagtggatggcagcgagccgaaactgagcaagaagtggtggtaatcattagttccagggtgctctgccatgttgacgcaagctgctgtaaggcttgttagggggtccctgcgcaaaacctcctgggcagagtggggtcacagggaactgcgactgggtcaacttgctcctttcacagcgcctcacaaggacaagtcattttctgatcaaagaagtgagctgaagagacgcctgaaagctgagaagaaagtagcagagaaggaggccaaacagaaagagctcagtgagaaacagctaagccaagccactgctgctgccaccaaccacaccactgataatggtgtgggtcctgaggaagagagcgtggacccaaatgtaggatccatgccaaaagagcttctgggggaaagctcatcttctatgatcttcgaggagagggggtgaagttgcaagtcatggccaattccagaaattataaatcagaagaagaatttattcatattaataacaaactgcgtcggggagacataattggagttcaggggaatcctggtaaaaccaagaagggtgagctgagcatcattccgtatgagatcacactgctgtctccctgtttgcatatgttacctcatcttcactttggcctcaaagacaaggaaacaaggtatcgccagagatacttggacttgatcctgaatgactttgtgaggcagaaatttatcatccgctctaagatcatcacatatataagaagtttcttagatgagctgggattcctagagattgaaactcccatgatgaacatcatcccagggggagccgtggccaagcctttcatcacttatcacaacgagctggacatgaacttatatatgagaattgctccagaactctatcataagatgcttgtggttggtggcatcgaccgggtttatgaaattggacgccagttccggaatgaggggattgatttgacgcacaatcctgagttcaccacctgtgagttctacatggcctatgcagactatcacgatctcatggaaatcacggagaagatggtttcagggatggtgaagcatattacaggcagttacaaggtcacctaccacccagatggcccagagggccaagcctacgatgttgacttcaccccacccttccggcgaatcaacatggtagaagagcttgagaaagccctggggatgaagctgccagaaacgaacctctttgaaactgaagaaactcgcaaaattcttgatgatatctgtgtggcaaaagctgttgaatgccctccacctcggaccacagccaggctccttgacaagcttgttggggagttcctggaagtgacttgcatcaatcctacattcatctgtgatcacccacagataatgagccctttggctaaatggcaccgctctaaagagggtctgactgagcgctttgagctgtttgtcatgaagaaagagatatgcaatgcgtatactgagctgaatgatcccatgcggcagcggcagctttttgaagaacaggccaaggccaaggctgcaggtgatgatgaggccatgttcatagatgaaaacttctgtactgccctggaatatgggctgccccccacagctggctggggcatgggcattgatcgagtcgccatgtttctcacggactccaacaacatcaaggaagtacttctgtttcctgccatgaaacccgaagacaagaaggagaatgtagcaaccactgatacactggaaagcacaacagttggcacttctgtctagaaaataataattgcaagttgtataactcaggcgtctttgcatttctgcgaaagatcaaggtctgcaagggaattcttgtgtgctgctttccatttgacaccgcagttctgttcagccatcagaagagagacaaggaattaaaaatttctttttaatcctgttaccaaataa

SEQ ID NO: 361863 - DNA, 1666 bp, Homo sapiens
  misc_feature (6)..(6): n is a, c, g, or t
attganaccctagggagcttgtacgacatgaccattactacgccaagcttggcacgaggacctgactgacatcaccttaaaggtggcaggtaggatccatgccaaaagagcttctgggggaaagctcatcttctatgatcttcgaggagagggggtgaagttgcaagtcatggccaattccagaaattataaatcagaagaagaatttattcatattaataacaaactgcgtcggggagacataattggagttcaggggaatcctggtaaaaccaagaagggtgagctgagcatcattccgtatgagatcacactgctgtctccctgtttgcatatgttacctcatcttcactttggcctcaaagacaaggaaacaaggtatcgccagagatacttggacttgatcctgaatgactttgtgaggcagaaatttatcatccgctctaagatcatcacatatataagaagtttcttagatgagctgggattcctagagattgaaactcccatgatgaacatcatcccagggggagccgtggccaagcctttcatcacttatcacaacgagctggacatgaacttatatatgagaattgctccagaactctatcataagatgcttgtggttggtggcatcgaccgggtttatgaaattggacgccagttccggaatgaggggattgatttgacgcacaatcctgagttcaccacctgtgagttctacatggcctatgcagactatcacgatctcatggaaatcacggagaagatggtttcagggatggtgaagcatattacaggcagttacaaggtcacctaccacccagatggcccagagggccaagcctacgatgttgacttcaccccacccttccggcgaatcaacatggtagaagagcttgagaaagccctggggatgaagctgccagaaacgaacctctttgaaactgaagaaactcgcaaaattcttgatgatatctgtgtggcaaaagctgttgaatgccctccacctcggaccacagccaggctccttgacaagcttgttggggagttcctggaagtgacttgcatcaatcctacattcatctgtgatcacccacagataatgagccctttggctaaatggcaccgctctaaagagggtctgactgagcgctttgagctgtttgtcatgaagaaagagatatgcaatgcgtatactgagctgaatgatcccatgcggcagcggcagctttttgaagaacaggccaaggccaaggctgcaggtgatgatgaggccatgttcatagatgaaaacttctgtactgccctggaatatgggctgccccccacagctggctggggcatgggcattgatcgagtcgccatgtttctcacggactccaacaacatcaaggaagtacttctgtttcctgccatgaaacccgaagacaagaaggagaatgtagcaaccactgatacactggaaagcacaacagttggcacttctgtctagaaaataataattgcaagttgtataactcaggcgtctttgcatttctgcgaaagatcaaggtctgcaagggaattcttgtgtgctgctttccatttgacaccgcagttctgttcagccatcagaagagagacaaggaattaaaaatttctttttaatcctgttaccaaataa

SEQ ID NO: 361864 - DNA, 2374 bp, Homo sapiens
  misc_feature (2037)..(2037): n is a, c, g, or t
agcggaacgtactatcctccttacttttgggtcgggccctccgggaagatggcggccgtgcaggcggccgaggtgaaagtggatggcagcgagccgaaactgagcaagaatgagctgaagagacgcctgaaagctgagaagaaagtagcagagaaggaggccaaacagaaagagctcagtgagaaacagctaagccaagccactgctgctgccaccaaccacaccactgataatggtgtgggtcctgaggaagagagcgtggacccaaatcaatactacaaaatccgcagtcaagcaattcatcagctgaaggtcaatggggaagacccatacccacacaagttccatgtagacatctcactcactgacttcatccaaaaatatagtcacctgcagcctggggatcacctgactgacatcaccttaaaggtggcaggtaggatccatgccaaaagagcttctgggggaaagctcatcttctatgatcttcgaggagagggggtgaagttgcaagtcatggccaattccagaaattataaatcagaagaagaatttattcatattaataacaaactgcgtcggggagacataattggagttcaggggaatcctggtaaaaccaagaagggtgagctgagcatcattccgtatgagatcacactgctgtctccctgtttgcatatgttacctcatcttcactttggcctcaaagacaaggaaacaaggtatcgccagagatacttggacttgatcctgaatgactttgtgaggcagaaatttatcatccgctctaagatcatcacatatataagaagtttcttagatgagctgggattcctagagattgaaactcccatgatgaacatcatcccagggggagccgtggccaagcctttcatcacttatcacaacgagctggacatgaacttatatatgagaattgctccagaactctatcataagatgcttgtggttggtggcatcgaccgggtttatgaaattggacgccagttccggaatgaggggattgatttgacgcacaatcctgagttcaccacctgtgagttctacatggcctatgcagactatcacgatctcatggaaatcacggagaagatggtttcagggatggtgaagcatattacaggcagttacaaggtcacctaccacccagatggcccagagggccaagcctacgatgttgacttcaccccacccttccggcgaatcaacatggtagaagagcttgagaaagccctggggatgaagctgccagaaacgaacctctttgaaactgaagaaactcgcaaaattcttgatgatatctgtgtggcaaaagctgttgaatgccctccacctcggaccacagccaggctccttgacaagcttgttggggagttcctggaagtgacttgcatcaatcctacattcatctgtgatcacccacagataatgagccctttggctaaatggcaccgctctaaagagggtctgactgagcgctttgagctgtttgtcatgaagaaagagatatgcaatgcgtatactgagctgaatgatcccatgcggcagcggcagctttttgaagaacaggccaaggccaaggctgcaggtgatgatgaggccatgttcatagatgaaaacttctgtactgccctggaatatgggctgccccccacagctggctggggcatgggcattgatcgagtcgccatgtttctcacggactccaacaacatcaaggaagtacttctgtttcctgccatgaaacccgaagacaagaaggagaatgtagcaaccactgatacactggaaagcacaacagttggcacttctgtctagaaaataataattgcaagttgtataactcaggcgtctttgcatttctgcgaaagatcaaggtctgcaagggaattcttgtgtgctgctttccatttgacaccgcagttctgttcagccatcagaagagagacaaggaattaaaaatttctttttaatcctgttaccaaataaaaaaaaaaaaaaaaaaaaaaaaanaaaaaaaaaaaggggggggggggaaaaaaaacggggggggcatcttacacccgttttttgttaagagggcgccaagaaggcggtaaaaacgacgggggcgggggtacaaacggtgggggggaaacgtcgttggatcttgggggaacgcttttgggtgggcatttggcacaccacaagattagcgttccggaaaaaactgagtttgcggaactcggctttcgggtggatgtttggtttagtactctctctgaatctagttaggggaggggtagttgatgatagagaacagatatgacggaaaagatgagagtggtcgtagtataatattagcttgata

SEQ ID NO: 361865 - DNA, 2064 bp, Homo sapiens
agcggaacgtactatcctccttacttttgggtcgggccctccgggaagatggcggccgtgcaggcggccgaggtgaaagtggatggcagcgagccgaaactgagcaagaatgagctgaagagacgcctgaaagctgagaagaaagtagcagagaaggaggccaaacagaaagagctcagtgagaaacagctaagccaagccactgctgctgccaccaaccacaccactgataatggtgtgggtcctgaggaagagagcgtggacccaaatcaatactacaaaatccgcagtcaagcaattcatcagctgaaggtcaatggggaagacccatacccacacaagttccatgtagacatctcactcactgacttcatccaaaaatatagtcacctgcagcctggggatcacctgactgacatcaccttaaaggtggcaggtaggatccatgccaaaagagcttctgggggaaagctcatcttctatgatcttcgaggagagggggtgaagttgcaagtcatggccaattccagaaattataaatcagaagaagaatttattcatattaataacaaactgcgtcggggagacataattggagttcaggggaatcctggtaaaaccaagaagggtgagctgagcatcattccgtatgagatcacactgctgtctccctgtttgcatatgttacctcatcttcactttggcctcaaagacaaggaaacaaggtatcgccagagatacttggacttgatcctgaatgactttgtgaggcagaaatttatcatccgctctaagatcatcacatatataagaagtttcttagatgagctgggattcctagagattgaaactcccatgatgaacatcatcccagggggagccgtggccaagcctttcatcacttatcacaacgagctggacatgaacttatatatgagaattgctccagaactctatcataagatgcttgtggttggtggcatcgaccgggtttatgaaattggacgccagttccggaatgaggggattgatttgacgcacaatcctgagttcaccacctgtgagttctacatggcctatgcagactatcacgatctcatggaaatcacggagaagatggtttcagggatggtgaagcatattacaggcagttacaaggtcacctaccacccagatggcccagagggccaagcctacgatgttgacttcaccccacccttccggcgaatcaacatggtagaagagcttgagaaagccctggggatgaagctgccagaaacgaacctctttgaaactgaagaaactcgcaaaattcttgatgatatctgtgtggcaaaagctgttgaatgccctccacctcggaccacagccaggctccttgacaagcttgttggggagttcctggaagtgacttgcatcaatcctacattcatctgtgatcacccacagataatgagccctttggctaaatggcaccgctctaaagagggtctgactgagcgctttgagctgtttgtcatgaagaaagagatatgcaatgcgtatactgagctgaatgatcccatgcggcagcggcagctttttgaagaacaggccaaggccaaggctgcaggtgatgatgaggccatgttcatagatgaaaacttctgtactgccctggaatatgggctgccccccacagctggctggggcatgggcattgatcgagtcgccatgtttctcacggactccaacaacatcaaggaagtacttctgtttcctgccatgaaacccgaagacaagaaggagaatgtagcaaccactgatacactggaaagcacaacagttggcacttctgtctagaaaataataattgcaagttgtataactcaggcgtctttgcatttctgcgaaagatcaaggtctgcaagggaattcttgtgtgctgctttccatttgacaccgcagttctgttcagccatcagaagagagacaaggaattaaaaatttctttttaatcctgttaccaaataaaagccatttgtctcttctctttacttttagaatatcaacttttttccccag

SEQ ID NO: 361866 - DNA, 2037 bp, Homo sapiens
agcggaacgtactatcctccttacttttgggtcgggccctccgggaagatggcggccgtgcaggcggccgaggtgaaagtggatggcagcgagccgaaactgagcaagaatgagctgaagagacgcctgaaagctgagaagaaagtagcagagaaggaggccaaacagaaagagctcagtgagaaacagctaagccaagccactgctgctgccaccaaccacaccactgataatggtgtgggtcctgaggaagagagcgtggacccaaatcaatactacaaaatccgcagtcaagcaattcatcagctgaaggtcaatggggaagacccatacccacacaagttccatgtagacatctcactcactgacttcatccaaaaatatagtcacctgcagcctggggatcacctgactgacatcaccttaaaggtggcaggtaggatccatgccaaaagagcttctgggggaaagctcatcttctatgatcttcgaggagagggggtgaagttgcaagtcatggccaattccagaaattataaatcagaagaagaatttattcatattaataacaaactgcgtcggggagacataattggagttcaggggaatcctggtaaaaccaagaagggtgagctgagcatcattccgtatgagatcacactgctgtctccctgtttgcatatgttacctcatcttcactttggcctcaaagacaaggaaacaaggtatcgccagagatacttggacttgatcctgaatgactttgtgaggcagaaatttatcatccgctctaagatcatcacatatataagaagtttcttagatgagctgggattcctagagattgaaactcccatgatgaacatcatcccagggggagccgtggccaagcctttcatcacttatcacaacgagctggacatgaacttatatatgagaattgctccagaactctatcataagatgcttgtggttggtggcatcgaccgggtttatgaaattggacgccagttccggaatgaggggattgatttgacgcacaatcctgagttcaccacctgtgagttctacatggcctatgcagactatcacgatctcatggaaatcacggagaagatggtttcagggatggtgaagcatattacaggcagttacaaggtcacctaccacccagatggcccagagggccaagcctacgatgttgacttcaccccacccttccggcgaatcaacatggtagaagagcttgagaaagccctggggatgaagctgccagaaacgaacctctttgaaactgaagaaactcgcaaaattcttgatgatatctgtgtggcaaaagctgttgaatgccctccacctcggaccacagccaggctccttgacaagcttgttggggagttcctggaagtgacttgcatcaatcctacattcatctgtgatcacccacagataatgagccctttggctaaatggcaccgctctaaagagggtctgactgagcgctttgagctgtttgtcatgaagaaagagatatgcaatgcgtatactgagctgaatgatcccatgcggcagcggcagctttttgaagaacaggccaaggccaaggctgcaggtgatgatgaggccatgttcatagatgaaaacttctgtactgccctggaatatgggctgccccccacagctggctggggcatgggcattgatcgagtcgccatgtttctcacggactccaacaacatcaaggaagtacttctgtttcctgccatgaaacccgaagacaagaaggagaatgtagcaaccactgatacactggaaagcacaacagttggcacttctgtctagaaaataataattgcaagttgtataactcaggcgtctttgcatttctgcgaaagatcaaggtctgcaagggaattcttgtgtgctgctttccatttgacaccgcagttctgttcagccatcagaagagagacaaggaattaaaaatttctttttaatcctgttaccaaataaaaaacaaaaaattctccagcgctg

SEQ ID NO: 361867 - DNA, 1578 bp, Homo sapiens
agcggaacgtactatcctccttacttttgggtcgggccctccgggaagatggcggccgtgcaggcggccgaggtgaaagtggatggcagcgagccgaaactgagcaagaatgagctgaagagacgcctgaaagctgagaagaaagtagcagagaaggaggccaaacagaaagagctcagtgagaaacagctaagccaagccactgctgctgccaccaaccacaccactgataatggtgtgggtcctgaggaagagagcgtggacccaaatcaatactacaaaatccgcagtcaagcaattcatcagctgaaggtcaatggggaagacccatacccacacaagttccatgtagacatctcactcactgacttcatccaaaaatatagtcacctgcagcctggggatcacctgactgacatcaccttaaaggtggcaggtaggatccatgccaaaagagcttctgggggaaagctcatcttctatgatcttcgaggagagggggtgaagttgcaagtcatggccaattccagaaattataaatcagaagaagaatttattcatattaataacaaactgcgtcggggagacataattggagttcaggggaatcctggtaaaaccaagaagggtgagctgagcatcattccgtatgagatcacactgctgtctccctgtttgcatatgttacctcatcttcactttggcctcaaagacaaggaaacaaggtatcgccagagatacttggacttgatcctgaatgactttgtgaggcagaaatttatcatccgctctaagatcatcacatatataagaagtttcttagatgagctgggattcctagagattgaaactcccatgatgaacatcatcccagggggagccgtggccaagcctttcatcacttatcacaacgagctggacatgaacttatatatgagaattgctccagaactctatcataagatgcttgtggttggtggcatcgaccgggtttatgaaattggacgccagttccggaatgaggggattgatttgacgcacaatcctgagttcaccacctgtgagttctacatggcctatgcagactatcacgatctcatggaaatcacggagaagatggtttcagggatggtgaagcatattacaggcagttacaaggtcacctaccacccagatggcccagagggccaagcctacgatgttgacttcaccccacccttccggcgaatcaacatggtagaagagcttgagaaagccctggggatgaagctgccagaaacgaacctctttgaaactgaagaaactcgcaaaattcttgatgatatctgtgtggcaaaagctgttgaatgccctccacctcggaccacagccaggctccttgacaagcttgttggggagttcctggaagtgacttgcatcaatcctacattcatctgtgatcacccacagataatgagccctttggctaaatggcaccgctctaaagagggtctgactgagcgctttgagctgtttgtcatgaagaaagagatatgcaatgcgtatactgagctgggtaccagctcgattctatcatgt

SEQ ID NO: 361868 - DNA, 1547 bp, Homo sapiens
agcggaacgtactatcctccttacttttgggtcgggccctccgggaagatggcggccgtgcaggcggccgaggtgaaagtggatggcagcgagccgaaactgagcaagaatgagctgaagagacgcctgaaagctgagaagaaagtagcagagaaggaggccaaacagaaagagctcagtgagaaacagctaagccaagccactgctgctgccaccaaccacaccactgataatggtgtgggtcctgaggaagagagcgtggacccaaatcaatactacaaaatccgcagtcaagcaattcatcagctgaaggtcaatggggaagacccatacccacacaagttccatgtagacatctcactcactgacttcatccaaaaatatagtcacctgcagcctggggatcacctgactgacatcaccttaaaggtggcaggtaggatccatgccaaaagagcttctgggggaaagctcatcttctatgatcttcgaggagagggggtgaagttgcaagtcatggccaattccagaaattataaatcagaagaagaatttattcatattaataacaaactgcgtcggggagacataattggagttcaggggaatcctggtaaaaccaagaagggtgagctgagcatcattccgtatgagatcacactgctgtctccctgtttgcatatgttacctcatcttcactttggcctcaaagacaaggaaacaaggtatcgccagagatacttggacttgatcctgaatgactttgtgaggcagaaatttatcatccgctctaagatcatcacatatataagaagtttcttagatgagctgggattcctagagattgaaactcccatgatgaacatcatcccagggggagccgtggccaagcctttcatcacttatcacaacgagctggacatgaacttatatatgagaattgctccagaactctatcataagatgcttgtggttggtggcatcgaccgggtttatgaaattggacgccagttccggaatgaggggattgatttgacgcacaatcctgagttcaccacctgtgagttctacatggcctatgcagactatcacgatctcatggaaatcacggagaagatggtttcagggatggtgaagcatattacaggcagttacaaggtcacctaccacccagatggcccagagggccaagcctacgatgttgacttcaccccacccttccggcgaatcaacatggtagaagagcttgagaaagccctggggatgaagctgccagaaacgaacctctttgaaactgaagaaactcgcaaaattcttgatgatatctgtgtggcaaaagctgttgaatgcccttccaacttcggggaaaccccaaagcaaagggccccaaagggctcctttgacaagcttgttggggagttcctcggaagtgacttgcattcaattccctttaacaattttccaaatttccttgggtgggaaaattccaaaaccccccccaaaaccaaaggggcacaccttctaacactctggacaaggagcccccc

SEQ ID NO: 361869 - DNA, 704 bp, Homo sapiens
  misc_feature (8)..(8): n is a, c, g, or t
  misc_feature (51)..(51): n is a, c, g, or t
  misc_feature (61)..(61): n is a, c, g, or t
ggaaaccnaagaacttgtgaaacttttgccaaacttgttgatccccccccncggaccacanccaggctccttgacaacttgttggggagttcctggaagtgacttgcatcaatcctacattcatctgtgatcacccacagataatgagccctttggctaaatggcaccgctctaaagagggtctgactgagcgctttgagctgtttgtcatgaagaaagagatatgcaatgcgtatactgagctgaatgatcccatgcggcagcggcagctttttgaagaacaggccaaggccaaggctgcaggtgatgatgaggccatgttcatagatgaaaacttctgtactgccctggaatatgggctgccccccacagctggctggggcatgggcattgatcgagtcgccatgtttctcacggactccaacaacatcaaggaagtacttctgtttcctgccatgaaacccgaagacaagaaggagaatgtagcaaccactgatacactggaaagcacaacagttggcacttctgtctagaaaataataattgcaagttgtataactcaggcgtctttgcatttctgcgaaagatcaaggtctgcaagggaattcttgtgtgctgctttccatttgacaccgcagttctgttcagccatcagaagagagacaaggaattaaaaatttctttttaatcctgttaccaaataa

SEQ ID NO: 361870 - DNA, 904 bp, Homo sapiens
  misc_feature (848)..(848): n is a, c, g, or t
agcggaacgtactatcctccttacttttgggtcgggccctccgggaagatggcggccgtgcaggcggccgaggtgaaagtggatggcagcgagccgaaactgagcaagaatgagctgaagagacgcctgaaagctgagaagaaagtagcagagaaggaggccaaacagaaagagctcagtgagaaacagctaagccaagccactgctgctgccaccaaccacaccactgataatggtgtgggtcctgaggaagagagcgtggacccaaatcaatactacaaaatccgcagtcaagcaattcatcagctgaaggtcaatggggaagacccatacccacacaagttccatgtagacatctcactcactgacttcatccaaaaatatagtcacctgcagcctggggatcacctgactgacatcaccttaaaggtggcaggtaggatccatgccaaaagagcttctgggggaaagctcatcttctatgatcttcgaggagagggggtgaagttgcaagtcatggccaattccagaaattataaatcagaagaagaatttattcatattaataacaaactgcgtcggggagacataattggagttcaggggaatcctggtaaaaccaagaagggtgagctgagcatcattccgtatgagatcacactgctgtctccctgtttgcatatgttacctcatcttcactttggcctcaaagacaaggaaacaaggtatcgccagagatacttggacttgatcctgaatgactttgtgaggcagaaatttatcatccgctctaagatcatcacatatataagaagtttcttagatgagctgggattcctagagattgnaactcccatgatgaacatcatcccggcgggagccaataaagttggtgaaaaaaaaa

SEQ ID NO: 361871 - DNA, 1002 bp, Homo sapiens
agcggaacgtactatcctccttacttttgggtcgggccctccgggaagatggcggccgtgcaggcggccgaggtgaaagtggatggcagcgagccgaaactgagcaagaagtggtggtaatcattagttccagggtgctctgccatgttgacgcaagctgctgtaaggcttgttagggggtccctgcgcaaaacctcctgggcagagtggggtcacagggaactgcgactgggtcaacttgctcctttcacagcgcctcacaaggacaagtcattttctgatcaaagaagtgagctgaagagacgcctgaaagctgagaagaaagtagcagagaaggaggccaaacagaaagagctcagtgagaaacagctaagccaagccactgctgctgccaccaaccacaccactgataatggtgtgggtcctgaggaagagagcgtggacccaaatcaatactacaaaatccgcagtcaagcaattcatcagctgaaggtcaatggggaagacccatacccacacaagttccatgtagacatctcactcactgacttcatccaaaaatatagtcacctgcagcctggggatcacctgactgacatcaccttaaaggtggcaggtaggaactctccctggcaaatcactgaactcccacagcaggtaggcctgcggcttcagtagcacaagggaaggtctgggttggtcttgttctcaagtagcctgtgtctgaagctactttactaaggacagtgccattatatctatacagaaagaagcagagcagccctgagacatggaatcatattccagatgaggtagtgctacaaagagaggggctttctctataaggattcccttcatcagcaagaatcagcggtagaagtctcaggcttctaagaattccagtctttggcctaagaatgctttgcactgagacagtatttctagaacattgctcttttggagttgtagtatcttgggtgagatcttcttttcctaaattta

SEQ ID NO: 361872 - DNA, 429 bp, Homo sapiens
cgtcggggagacataattggagttcaggggaatcctggtaaaaccaagaagggtgagctgagcatcattccgtatgagatcacactgctgtctccctgtttgcatatgttacctcatcttcactttggcctcaaagacaaggtaagcgttcttggcctcctagctgtggcctcctagctttctgtttgttttatcatacctttggatcagacataccagtgatttctaactgctgcttttggtttagggaaacaaggtatcgccagagatacttggacttgatcctgaatgactttgtgaggcagaaatttatcatccgctctaagatcatcacatatataagaagtttcttagatgagctgggattcctagaggtaaggagagttccttgcctgacgtgatgagctgccttgcaatgcttgcctcctc

SEQ ID NO: 361873 - DNA, 902 bp, Homo sapiens
gggtctcctgtttatatgtgcttccctctttcctggtcaactgtttcttctatgtcgggtttccttcaattgtgcgcaacgagtgttctttctggttcccttcccggctcggtctgctcccttccgcttgagcttctgggaggaggggctcaccggcgcgtcccccagcaggtacttatgctcctggccccgcaggtgcttgaggtagcggtccttcagggactgccacgagtgctgcgtgagcgagctcttctccatcgctttccacaaggcgttaccggtgacggagctgggcgagcgggcattttccttcacgtaggtaaggatggctacgtcgtccgcatccgtgaaggcgatccgcccggcgtgccgctgcggctccggctccgcggcgccctcggccagggccccgggctttgcttccgagccggtgtccgccgccgaggcggggcccagccgataggcctccagctccagcctctcgttgcgctccacgcagtccaggatgtactgcgtggagatgaaatcacccgaggcctcggccagcgcctccccgggctgggccagcagcacggccccgggctcctgcactcggcacacggtgccgccgccgtgcaggatgagcgtcgacagccgacgcttggccgggctgggccgcacgtagaaggacatggagctgccgtcgtccctcacgaacagagtcgaggaatgggtgggcccgttggggtctttgcccaaatccatcgcctccgccatgtctgacgccgagcactactagaagagctaccccctcgcgagcgcctggcacacagagctcaactgactgagctgtcaccgcagacgcctctgccgcgaagcgcagcactgggcctgcgcagcagcagccgcggcgcatcgagagt

SEQ ID NO: 361874 - DNA, 645 bp, Homo sapiens
agcggaacgtactatcctccttacttttgggtcgggccctccgggaagatggcggccgtgcaggcggccgaggtgaaagtggatggcagcgagccgaaactgagcaagaatgagctgaagagacgcctgaaagctgagaagaaagtagcagagaaggaggccaaacagaaagagctcagtgagaaacagctaagccaagccactgctgctgccaccaaccacaccactgataatggtgtgggtcctgaggaagagagcgtggacccaaatcaatactacaaaatccgcagtcaagcaattcatcagctgaaggtcaatggggaagacccataccctcgagtcgccatgtttctcacggactccaacaacatcaaggaagtacttctgtttcctgccatgaaacccgaagacaagaaggagaatgtagcaaccactgatacactggaaagcacaacagttggcacttctgtctagaaaataataattgcaagttgtataactcaggcgtctttgcatttctgcgaaagatcaaggtctgcaagggaattcttgtgtgctgctttccatttgacaccgcagttctgttcagccatcagaagagagacaaggaattaaaaatttctttttaatcctgttaccaaataa

SEQ ID NO: 361875 - DNA, 848 bp, Homo sapiens
cctgtactgtgatagccgcagagcagtagtaaagcaaacagagatcctgggcgcccggtgtggccccaggcgcgccggggggccccagattctaaggggtaccccacccaaaccgggtaccaattggcgcttccttccggggtccccacaagtccgcaatcgatccaatccggtccgtatcccgcctcggtctctccccttccgtgagcggagagggctcaccggcgcgtcccccagcaggtacttatgctcctggccccgcaggtgcttgaggtagcggtccttcagggactgccacgagtgctgcgtgagcgagctcttctccatcgctttccacaaggcgttaccggtgacggagctgggcgagcgggcattttccttcacgtaggtaaggatggctacgtcgtccgcatccgtgaaggcgatccgcccggcgtgccgctgcggctccggctccgcggcgccctcggccagggccccgggctttgcttccgagccggtgtccgccgccgaggcggggcccagccgataggcctccagctccagcctctcgttgcgctccacgcagtccaggatgtactgcgtggagatgaaatcacccgaggcgtagaaggacatggagctgccgtcgtccctcacgaacagagtcgaggaatgggtgggcccgttggggtctttgcccaaatccatcgcctccgccatgtctgacgccgagcactactagaagagctaccccctcgcgagcgcctggcacacagagctcaactgactgagctgtcaccgcagacgcctctgccgcgaagcgcagcactgggcctgcgcagcagcagccgcggcgcatcgagagt

SEQ ID NO: 361876 - DNA, 1893 bp, Homo sapiens
agcggaacgtactatcctccttacttttgggtcgggccctccgggaagatggcggccgtgcaggcggccgaggtgaaagtggatggcagcgagccgaaactgagcaagaatgagctgaagagacgcctgaaagctgagaagaaagtagcagagaaggaggccaaacagaaagagctcagtgagaaacagctaagccaagccactgctgctgccaccaaccacaccactgataatggtgtgggtcctgaggaagagagcgtggacccaaatcaatactacaaaatccgcagtcaagcaattcatcagctgaaggtcaatggggaagacccatacccacacaagttccatgtagacatctcactcactgacttcatccaaaaatatagtcacctgcagcctggggatcacctgactgacatcaccttaaaggtggcaggtaggatccatgccaaaagagcttctgggggaaagctcatcttctatgatcttcgaggagagggggtgaagttgcaagtcatggccaattccagaaattataaatcagaagaagaatttattcatattaataacaaactgcgtcggggagacataattggagttcaggggaatcctggtaaaaccaagaagggtgagctgagcatcattccgtatgagatcacactgctgtctccctgtttgcatatgttacctcatcttcactttggcctcaaagacaaggaaacaaggtatcgccagagatacttggacttgatcctgaatgactttgtgaggcagaaatttatcatccgctctaagatcatcacatatataagaagtttcttagatgagctgggattcctagagatgcttgtggttggtggcatcgaccgggtttatgaaattggacgccagttccggaatgaggggattgatttgacgcacaatcctgagttcaccacctgtgagttctacatggcctatgcagactatcacgatctcatggaaatcacggagaagatggtttcagggatggtgaagcatattacaggcagttacaaggtcacctaccacccagatggcccagagggccaagcctacgatgttgacttcaccccacccttccggcgaatcaacatggtagaagagcttgagaaagccctggggatgaagctgccagaaacgaacctctttgaaactgaagaaactcgcaaaattcttgatgatatctgtgtggcaaaagctgttgaatgccctccacctcggaccacagccaggctccttgacaagcttgttggggagttcctggaagtgacttgcatcaatcctacattcatctgtgatcacccacagataatgagccctttggctaaatggcaccgctctaaagagggtctgactgagcgctttgagctgtttgtcatgaagaaagagatatgcaatgcgtatactgagctgaatgatcccatgcggcagcggcagctttttgaagaacaggccaaggccaaggctgcaggtgatgatgaggccatgttcatagatgaaaacttctgtactgccctggaatatgggctgccccccacagctggctggggcatgggcattgatcgagtcgccatgtttctcacggactccaacaacatcaaggaagtacttctgtttcctgccatgaaacccgaagacaagaaggagaatgtagcaaccactgatacactggaaagcacaacagttggcacttctgtctagaaaataataattgcaagttgtataactcaggcgtctttgcatttctgcgaaagatcaaggtctgcaagggaattcttgtgtgctgctttccatttgacaccgcagttctgttcagccatcagaagagagacaaggaattaaaaatttctttttaatcctgttaccaaataa

SEQ ID NO: 361877 - DNA, 2236 bp, Homo sapiens
agcggaacgtactatcctccttacttttgggtcgggccctccgggaagatggcggccgtgcaggcggccgaggtgaaagtggatggcagcgagccgaaactgagcaagaagtggtggtaatcattagttccagggtgctctgccatgttgacgcaagctgctgtaaggcttgttagggggtccctgcgcaaaacctcctgggcagagtggggtcacagggaactgcgactgggtcaacttgctcctttcacagcgcctcacaaggacaagtcattttctgatcaaagaagtgagctgaagagacgcctgaaagctgagaagaaagtagcagagaaggaggccaaacagaaagagctcagtgagaaacagctaagccaagccactgctgctgccaccaaccacaccactgataatggtgtgggtcctgaggaagagagcgtggacccaaatcaatactacaaaatccgcagtcaagcaattcatcagctgaaggtcaatggggaagacccatacccacacaagttccatgtagacatctcactcactgacttcatccaaaaatatagtcacctgcagcctggggatcacctgactgacatcaccttaaaggtggcaggtaggatccatgccaaaagagcttctgggggaaagctcatcttctatgatcttcgaggagagggggtgaagttgcaagtcatggccaattccagaaattataaatcagaagaagaatttattcatattaataacaaattatgtctccccgacgcagtttgttattaatatgaataacaaactgcgtcggggagacataattggagttcaggggaatcctggtaaaaccaagaagggtgagctgagcatcattccgtatgagatcacactgctgtctccctgtttgcatatgttacctcatcttcactttggcctcaaagacaaggaaacaaggtatcgccagagatacttggacttgatcctgaatgactttgtgaggcagaaatttatcatccgctctaagatcatcacatatataagaagtttcttagatgagctgggattcctagagattgaaactcccatgatgaacatcatcccagggggagccgtggccaagcctttcatcacttatcacaacgagctggacatgaacttatatatgagaattgctccagaactctatcataagatgcttgtggttggtggcatcgaccgggtttatgaaattggacgccagttccggaatgaggggattgatttgacgcacaatcctgagttcaccacctgtgagttctacatggcctatgcagactatcacgatctcatggaaatcacggagaagatggtttcagggatggtgaagcatattacaggcagttacaaggtcacctaccacccagatggcccagagggccaagcctacgatgttgacttcaccccacccttccggcgaatcaacatggtagaagagcttgagaaagccctggggatgaagctgccagaaacgaacctctttgaaactgaagaaactcgcaaaattcttgatgatatctgtgtggcaaaagctgttgaatgccctccacctcggaccacagccaggctccttgacaagcttgttggggagttcctggaagtgacttgcatcaatcctacattcatctgtgatcacccacagataatgagccctttggctaaatggcaccgctctaaagagggtctgactgagcgctttgagctgtttgtcatgaagaaagagatatgcaatgcgtatactgagctgaatgatcccatgcggcagcggcagctttttgaagaacaggccaaggccaaggctgcaggtgatgatgaggccatgttcatagatgaaaacttctgtactgccctggaatatgggctgccccccacagctggctggggcatgggcattgatcgagtcgccatgtttctcacggactccaacaacatcaaggaagtacttctgtttcctgccatgaaacccgaagacaagaaggagaatgtagcaaccactgatacactggaaagcacaacagttggcacttctgtctagaaaataataattgcaagttgtataactcaggcgtctttgcatttctgcgaaagatcaaggtctgcaagggaattcttgtgtgctgctttccatttgacaccgcagttctgttcagccatcagaagagagacaaggaattaaaaatttctttttaatcctgttaccaaataa

SEQ ID NO: 361878 - DNA, 2139 bp, Homo sapiens
agcggaacgtactatcctccttacttttgggtcgggccctccgggaagatggcggccgtgcaggcggccgaggtgaaagtggatggcagcgagccgaaactgagcaagaagtggtggtaatcattagttccagggtgctctgccatgttgacgcaagctgctgtaaggcttgttagggggtccctgcgcaaaacctcctgggcagagtggggtcacagggaactgcgactgggtcaacttgctcctttcacagcgcctcacaaggacaagtcattttctgatcaaagaagtgagctgaagagacgcctgaaagctgagaagaaagtagcagagaaggaggccaaacagaaagagctcagtgagaaacagctaagccaagccactgctgctgccaccaaccacaccactgataatggtgtgggtcctgaggaagagagcgtggacccaaatcaatactacaaaatccgcagtcaagcaattcatcagctgaaggtcaatggggaagacccatacccacacaagttccatgtagacatctcactcactgacttcatccaaaaatatagtcacctgcagcctggggatcacctgactgacatcaccttaaaggtggcaggtaggatccatgccaaaagagcttctgggggaaagctcatcttctatgatcttcgaggagagggggtgaagttgcaagtcatggccaattccagaaattataaatcagaagaagaatttattcatattaataacaaactgcgtcggggagacataattggagttcaggggaatcctgctccctgtttgcatatgttacctcatcttcactttggcctcaaagacaaggaaacaaggtatcgccagagatacttggacttgatcctgaatgactttgtgaggcagaaatttatcatccgctctaagatcatcacatatataagaagtttcttagatgagctgggattcctagagattgaaactcccatgatgaacatcatcccagggggagccgtggccaagcctttcatcacttatcacaacgagctggacatgaacttatatatgagaattgctccagaactctatcataagatgcttgtggttggtggcatcgaccgggtttatgaaattggacgccagttccggaatgaggggattgatttgacgcacaatcctgagttcaccacctgtgagttctacatggcctatgcagactatcacgatctcatggaaatcacggagaagatggtttcagggatggtgaagcatattacaggcagttacaaggtcacctaccacccagatggcccagagggccaagcctacgatgttgacttcaccccacccttccggcgaatcaacatggtagaagagcttgagaaagccctggggatgaagctgccagaaacgaacctctttgaaactgaagaaactcgcaaaattcttgatgatatctgtgtggcaaaagctgttgaatgccctccacctcggaccacagccaggctccttgacaagcttgttggggagttcctggaagtgacttgcatcaatcctacattcatctgtgatcacccacagataatgagccctttggctaaatggcaccgctctaaagagggtctgactgagcgctttgagctgtttgtcatgaagaaagagatatgcaatgcgtatactgagctgaatgatcccatgcggcagcggcagctttttgaagaacaggccaaggccaaggctgcaggtgatgatgaggccatgttcatagatgaaaacttctgtactgccctggaatatgggctgccccccacagctggctggggcatgggcattgatcgagtcgccatgtttctcacggactccaacaacatcaaggaagtacttctgtttcctgccatgaaacccgaagacaagaaggagaatgtagcaaccactgatacactggaaagcacaacagttggcacttctgtctagaaaataataattgcaagttgtataactcaggcgtctttgcatttctgcgaaagatcaaggtctgcaagggaattcttgtgtgctgctttccatttgacaccgcagttctgttcagccatcagaagagagacaaggaattaaaaatttctttttaatcctgttaccaaataa

SEQ ID NO: 361879 - DNA, 1959 bp, Homo sapiens
agcggaacgtactatcctccttacttttgggtcgggccctccgggaagatggcggccgtgcaggcggccgaggtgaaagtggatggcagcgagccgaaactgagcaagaatgagctgaagagacgcctgaaagctgagaagaaagtagcagagaaggaggccaaacagaaagagctcagtgagaaacagctaagccaagccactgctgctgccaccaaccacaccactgataatggtgtgggtcctgaggaagagagcgtggacccaaatcaatactacaaaatccgcagtcaagcaattcatcagctgaaggtcaatggggaagacccatacccacacaagttccatgtagacatctcactcactgacttcatccaaaaatatagtcacctgcagcctggggatcacctgactgacatcaccttaaaggtggcaggtaggatccatgccaaaagagcttctgggggaaagctcatcttctatgatcttcgaggagagggggtgaagttgcaagtcatggccaattccagaaattataaatcagaagaagaatttattcatattaataacaaactgcgtcggggagacataattggagttcaggggaatcctgctccctgtttgcatatgttacctcatcttcactttggcctcaaagacaaggaaacaaggtatcgccagagatacttggacttgatcctgaatgactttgtgaggcagaaatttatcatccgctctaagatcatcacatatataagaagtttcttagatgagctgggattcctagagattgaaactcccatgatgaacatcatcccagggggagccgtggccaagcctttcatcacttatcacaacgagctggacatgaacttatatatgagaattgctccagaactctatcataagatgcttgtggttggtggcatcgaccgggtttatgaaattggacgccagttccggaatgaggggattgatttgacgcacaatcctgagttcaccacctgtgagttctacatggcctatgcagactatcacgatctcatggaaatcacggagaagatggtttcagggatggtgaagcatattacaggcagttacaaggtcacctaccacccagatggcccagagggccaagcctacgatgttgacttcaccccacccttccggcgaatcaacatggtagaagagcttgagaaagccctggggatgaagctgccagaaacgaacctctttgaaactgaagaaactcgcaaaattcttgatgatatctgtgtggcaaaagctgttgaatgccctccacctcggaccacagccaggctccttgacaagcttgttggggagttcctggaagtgacttgcatcaatcctacattcatctgtgatcacccacagataatgagccctttggctaaatggcaccgctctaaagagggtctgactgagcgctttgagctgtttgtcatgaagaaagagatatgcaatgcgtatactgagctgaatgatcccatgcggcagcggcagctttttgaagaacaggccaaggccaaggctgcaggtgatgatgaggccatgttcatagatgaaaacttctgtactgccctggaatatgggctgccccccacagctggctggggcatgggcattgatcgagtcgccatgtttctcacggactccaacaacatcaaggaagtacttctgtttcctgccatgaaacccgaagacaagaaggagaatgtagcaaccactgatacactggaaagcacaacagttggcacttctgtctagaaaataataattgcaagttgtataactcaggcgtctttgcatttctgcgaaagatcaaggtctgcaagggaattcttgtgtgctgctttccatttgacaccgcagttctgttcagccatcagaagagagacaaggaattaaaaatttctttttaatcctgttaccaaataa

SEQ ID NO: 361880 - DNA, 2522 bp, Homo sapiens
  misc_feature (2037)..(2037): n is a, c, g, or t
agcggaacgtactatcctccttacttttgggtcgggccctccgggaagatggcggccgtgcaggcggccgaggtgaaagtggatggcagcgagccgaaactgagcaagaatgagctgaagagacgcctgaaagctgagaagaaagtagcagagaaggaggccaaacagaaagagctcagtgagaaacagctaagccaagccactgctgctgccaccaaccacaccactgataatggtgtgggtcctgaggaagagagcgtggacccaaatcaatactacaaaatccgcagtcaagcaattcatcagctgaaggtcaatggggaagacccatacccacacaagttccatgtagacatctcactcactgacttcatccaaaaatatagtcacctgcagcctggggatcacctgactgacatcaccttaaaggtggcaggtaggatccatgccaaaagagcttctgggggaaagctcatcttctatgatcttcgaggagagggggtgaagttgcaagtcatggccaattccagaaattataaatcagaagaagaatttattcatattaataacaaactgcgtcggggagacataattggagttcaggggaatcctggtaaaaccaagaagggtgagctgagcatcattccgtatgagatcacactgctgtctccctgtttgcatatgttacctcatcttcactttggcctcaaagacaaggaaacaaggtatcgccagagatacttggacttgatcctgaatgactttgtgaggcagaaatttatcatccgctctaagatcatcacatatataagaagtttcttagatgagctgggattcctagagattgaaactcccatgatgaacatcatcccagggggagccgtggccaagcctttcatcacttatcacaacgagctggacatgaacttatatatgagaattgctccagaactctatcataagatgcttgtggttggtggcatcgaccgggtttatgaaattggacgccagttccggaatgaggggattgatttgacgcacaatcctgagttcaccacctgtgagttctacatggcctatgcagactatcacgatctcatggaaatcacggagaagatggtttcagggatggtgaagcatattacaggcagttacaaggtcacctaccacccagatggcccagagggccaagcctacgatgttgacttcaccccacccttccggcgaatcaacatggtagaagagcttgagaaagccctggggatgaagctgccagaaacgaacctctttgaaactgaagaaactcgcaaaattcttgatgatatctgtgtggcaaaagctgttgaatgccctccacctcggaccacagccaggctccttgacaagcttgttggggagttcctggaagtgacttgcatcaatcctacattcatctgtgatcacccacagataatgagccctttggctaaatggcaccgctctaaagagggtctgactgagcgctttgagctgtttgtcatgaagaaagagatatgcaatgcgtatactgagctgaatgatcccatgcggcagcggcagctttttgaagaacaggccaaggccaaggctgcaggtgatgatgaggccatgttcatagatgaaaacttctgtactgccctggaatatgggctgccccccacagctggctggggcatgggcattgatcgagtcgccatgtttctcacggactccaacaacatcaaggaagtacttctgtttcctgccatgaaacccgaagacaagaaggagaatgtagcaaccactgatacactggaaagcacaacagttggcacttctgtctagaaaataataattgcaagttgtataactcaggcgtctttgcatttctgcgaaagatcaaggtctgcaagggaattcttgtgtgctgctttccatttgacaccgcagttctgttcagccatcagaagagagacaaggaattaaaaatttctttttaatcctgttaccaaataaaaaaaaaaaaaaaaaaaaaaaaanaaaaaaaaaaaaaaaaaaaaaaaaaacacaaccacacacacaaaaaaaaaaaacaaaaaaaaaaaaaagaaaaataaaacgaaaaaaaaaaaaaacaaacaacacacacaggaatgggcggggcgcgcgcgccgacagcgagaaggagtagacacaacacaggaagggggggggggcgcgcccccccaagagttagaatggagcaaggtagtgagtcagcctgattgatctaacaaagaaaaacaagggagcgagacagaaagaagacagaggggggggtgtcatcacacaacaaaaaaaaaaaagcagcgcggggggggagagcacgacacggcggatggtggaagaacacagaccaaccacgaaggaggagggtggacgaggagagcagatacgaggagagggttaatcacacaaggagggcgagacgacacgagaggagagagaaaaaaaaaagacgccccgcgggaggagggggggaggac

SEQ ID NO: 361881 - DNA, 2050 bp, Homo sapiens
agcggaacgtactatcctccttacttttgggtcgggccctccgggaagatggcggccgtgcaggcggccgaggtgaaagtggatggcagcgagccgaaactgagcaagaatgagctgaagagacgcctgaaagctgagaagaaagtagcagagaaggaggccaaacagaaagagctcagtgagaaacagctaagccaagccactgctgctgccaccaaccacaccactgataatggtgtgggtcctgaggaagagagcgtggacccaaatcaatactacaaaatccgcagtcaagcaattcatcagctgaaggtcaatggggaagacccatacccacacaagttccatgtagacatctcactcactgacttcatccaaaaatatagtcacctgcagcctggggatcacctgactgacatcaccttaaaggtggcaggtaggatccatgccaaaagagcttctgggggaaagctcatcttctatgatcttcgaggagagggggtgaagttgcaagtcatggccaattccagaaattataaatcagaagaagaatttattcatattaataacaaactgcgtcggggagacataattggagttcaggggaatcctggtaaaaccaagaagggtgagctgagcatcattccgtatgagatcacactgctgtctccctgtttgcatatgttacctcatcttcactttggcctcaaagacaaggaaacaaggtatcgccagagatacttggacttgatcctgaatgactttgtgaggcagaaatttatcatccgctctaagatcatcacatatataagaagtttcttagatgagctgggattcctagagattgaaactcccatgatgaacatcatcccagggggagccgtggccaagcctttcatcacttatcacaacgagctggacatgaacttatatatgagaattgctccagaactctatcataagatgcttgtggttggtggcatcgaccgggtttatgaaattggacgccagttccggaatgaggggattgatttgacgcacaatcctgagttcaccacctgtgagttctacatggcctatgcagactatcacgatctcatggaaatcacggagaagatggtttcagggatggtgaagcatattacaggcagttacaaggtcacctaccacccagatggcccagagggccaagcctacgatgttgacttcaccccacccttccggcgaatcaacatggtagaagagcttgagaaagccctggggatgaagctgccagaaacgaacctctttgaaactgaagaaactcgcaaaattcttgatgatatctgtgtggcaaaagctgttgaatgccctccacctcggaccacagccaggctccttgacaagcttgttggggagttcctggaagtgacttgcatcaatcctacattcatctgtgatcacccacagataatgagccctttggctaaatggcaccgctctaaagagggtctgactgagcgctttgagctgtttgtcatgaagaaagagatatgcaatgcgtatactgagctgaatgatcccatgcggcagcggcagctttttgaagaacaggccaaggccaaggctgcaggtgatgatgaggccatgttcatagatgaaaacttctgtactgccctggaatatgggctgccccccacagctggctggggcatgggcattgatcgagtcgccatgtttctcacggactccaacaacatcaaggaagtacttctgtttcctgccatgaaacccgaagacaagaaggagaatgtagcaaccactgatacactggaaagcacaacagttggcacttctgtctagaaaataataattgcaagttgtataactcaggcgtctttgcatttctgcgaaagatcaaggtctgcaagggaattcttgtgtgctgctttccatttgacaccgcagttctgttcagccatcagaagagagacaaggaattaaaaatttctttttaatcctgttaccaaataacaaaaattttggaagagaaaaaaaaaagtcgtatcga

SEQ ID NO: 361882 - DNA, 1497 bp, Homo sapiens
agcggaacgtactatcctccttacttttgggtcgggccctccgggaagatggcggccgtgcaggcggccgaggtgaaagtggatggcagcgagccgaaactgagcaagaatgagctgaagagacgcctgaaagctgagaagaaagtagcagagaaggaggccaaacagaaagagctcagtgagaaacagctaagccaagccactgctgctgccaccaaccacaccactgataatggtgtgggtcctgaggaagagagcgtggacccaaatcaatactacaaaatccgcagtcaagcaattcatcagctgaaggtcaatggggaagacccatacccacacaagttccatgtagacatctcactcactgacttcatccaaaaatatagtcacctgcagcctggggatcacctgactgacatcaccttaaaggtggcaggtaggatccatgccaaaagagcttctgggggaaagctcatcttctatgatcttcgaggagagggggtgaagttgcaagtcatggccaattccagaaattataaatcagaagaagaatttattcatattaataacaaactgcgtcggggagacataattggagttcaggggaatcctggtaaaaccaagaagggtgagctgagcatcattccgtatgagatcacactgctgtctccctgtttgcatatgttacctcatcttcactttggcctcaaagacaaggaaacaaggtatcgccagagatacttggacttgatcctgaatgactttgtgaggcagaaatttatcatccgctctaagatcatcacatatataagaagtttcttagatgagctgggattcctagagattgaaactcccatgatgaacatcatcccagggggagccgtggccaagcctttcatcacttatcacaacgagctggacatgaacttatatatgagaattgctccagaactctatcataagatgcttgtggttggtggcatcgaccgggtttatgaaattggacgccagttccggaatgaggggattgatttgacgcacaatcctgagttcaccacctgtgagttctacatggcctatgcagactatcacgatctcatggaaatcacggagaagatggtttcagggatggtgaagcatattacaggcagttacaaggtcacctaccacccagatggcccagagggccaagcctacgatgttgacttcaccccacccttccggcgaatcaacatggtagaagagcttgagaaagccctggggatgaagctgccagaaacgaacctctttgaaactgaagaaactcgcaaaattcttgatgatatctgtgtggcaaaagctgttgaatgccctccacctcggaccacagccaggctccttgacaagcttgttggggagttcctggaagtgacttgcatcaatcctacattcatctgtgatcacccacagataatgagccctttggctaaatggcgttctagatcgcgagcggccgct

SEQ ID NO: 361883 - DNA, 1268 bp, Homo sapiens
  misc_feature (1268)..(1268): n is a, c, g, or t
agcggaacgtactatcctccttacttttgggtcgggccctccgggaagatggcggccgtgcaggcggccgaggtgaaagtggatggcagcgagccgaaactgagcaagaatgagctgaagagacgcctgaaagctgagaagaaagtagcagagaaggaggccaaacagaaagagctcagtgagaaacagctaagccaagccactgctgctgccaccaaccacaccactgataatggtgtgggtcctgaggaagagagcgtggacccaaatcaatactacaaaatccgcagtcaagcaattcatcagctgaaggtcaatggggaagacccatacccacacaagttccatgtagacatctcactcactgacttcatccaaaaatatagtcacctgcagcctggggatcacctgactgacatcaccttaaaggtggcaggtaggatccatgccaaaagagcttctgggggaaagctcatcttctatgatcttcgaggagagggggtgaagttgcaagtcatggccaattccagaaattataaatcagaagaagaatttattcatattaataacaaactgcgtcggggagacataattggagttcaggggaatcctggtaaaaccaagaagggtgagctgagcatcattccgtatgagatcacactgctgtctccctgtttgcatatgttacctcatcttcactttggcctcaaagacaaggaaacaaggtatcgccagagatacttggacttgatcctgaatgactttgtgaggcagaaatttatcatccgctctaagatcatcacatatataagaagtttcttagatgagctgggattcctagagattgaaactcccatgatgaacatcatcccagggggagccgtggccaagcctttcatcacttatcacaacgagctggacatgaacttatatatgagaattgctccagaactctatcataagatgcttgtggttggtggcctcgacccgggttatgaactttggccggccgtccgcgatgccgggtttgttggcgccaattcctgggtttcccaccctgtgagttctatgggctatggaatttcccgatccctgggaatcccgggaaattggcccgggggtgggagcacattagggggtaagggccccaccccattgcccggccccctcatgttttttcccacctccgcgggacacggtaagcacgtaacccggggtgagcccgcacacccctatacagacacttccttcttcagtgtccgcacagn

SEQ ID NO: 361884 - DNA, 1207 bp, Homo sapiens
agcggaacgtactatcctccttacttttgggtcgggccctccgggaagatggcggccgtgcaggcggccgaggtgaaagtggatggcagcgagccgaaactgagcaagaagtggtggtaatcattagttccagggtgctctgccatgttgacgcaagctgctgtaaggcttgttagggggtccctgcgcaaaacctcctgggcagagtggggtcacagggaactgcgactgggtcaacttgctcctttcacagcgcctcacaaggacaagtcattttctgatcaaagaagtgagctgaagagacgcctgaaagctgagaagaaagtagcagagaaggaggccaaacagaaagagctcagtgagaaacagctaagccaagccactgctgctgccaccaaccacaccactgataatggtgtgggtcctgaggaagagagcgtggacccaaatcaatactacaaaatccgcagtcaagcaattcatcagctgaaggtcaatggggaagacccatacccacacaagttccatgtagacatctcactcactgacttcatccaaaaatatagtcacctgcagcctggggatcacctgactgacatcaccttaaaggtggcaggtaggatccatgccaaaagagcttctgggggaaagctcatcttctatgatcttcgaggagagggggtgaagttgcaagtcatggccaattccagaaattataaatcagaagaagaatttattcatattaataacaaactgcgtcggggagacataattggagttcaggggaatcctggtaaaaccaagaagggtgagctgagcatcattccgtatgagatcacactgctgtctccctgtttgcatatgttacctcatcttcactttggcctcaaagacaagtcgagtcgccatgtttctcacggactccaacaacatcaaggaagtacttctgtttcctgccatgaaacccgaagacaagaaggagaatgtagcaaccactgatacactggaaagcacaacagttggcacttctgtctagaaaataataattgcaagttgtataactcaggcgtctttgcatttctgcgaaagatcaaggtctgcaagggaattcttgtgtgctgctttccatttgacaccgcagttctgttcagccatcagaagagagacaaggaattaaaaatttctttttaatcctgttaccaaataa

SEQ ID NO: 361885 - DNA, 736 bp, Homo sapiens
gggtctcctgtttatatgtgcttccctctttcctggtcaactgtttcttctatgtcgggtttccttcaattgtgcgcaacgagtgttctttctggttcccttcccggctcggtctgctcccttccgcttgagcttctgggaggaggggctcaccggcgcgtcccccagcaggtacttatgctcctggccccgcaggtgcttgaggtagcggtccttcagggactgccacgagtgctgcgtgagcgagctcttctccatcgctttccacaaggcgttaccggtgacggagctgggcgagcgggcattttccttcacgtaggtaaggatggctacgtcgtccgcatccgtgaaggcgatccgcccggcgtgccgctgcggctccggctccgcggcgccctcggccagggccccgggctttgcttccgagccggtgtccgccgccgaggcggggcccagccgataggcctccagctccagcctctcgttgcgctccacgcagtccaggatgtactgcgtggagatgaaatcacccgaggcgtagaaggacatggagctgccgtcgtccctcacgaacagagtcgaggaatgggtgggcccgttggggtctttgcccaaatccatcgcctccgccatgtctgacgccgagcactactagaagagctaccccctcgcgagcgcctgcctcgtgctattcctcaggcccggggatccactagtttagacagcccacccgtgg

SEQ ID NO: 361886 - DNA, 1822 bp, Homo sapiens
  misc_feature (222)..(222): n is a, c, g, or t
  misc_feature (293)..(293): n is a, c, g, or t
ataatgtgctgttcttgttattactgctattctgtgtcatcactctattccttctctactggatcattctcatcaacctaggatctctcttttttttttggagagagggtctcactctgtcactcaggctggagtgcagtggtgtgatcatagctcactgcagcctcgaactcctggcctcaatccatcctcctgcctcagcctccagagtagctgggaccncaggtgtacaccaccatgcccacctaatttttttttaaaaaaaggccaggcatggtggctcacacttgtgntcccagcactttgggtggccgaggcaggcagatcatgaggtcagaagttcgagaccagcctgaccaacatggtgaaaccccgtctctactaaaaatagaaaaattagccgggcatggtggcacacgcctgtaatcacggctactcaggaggctgaggcaggagaatcgcttgaacctgggaggcaaaggttgcagtgagctgagattatgccactgcactccagcctgggcaacagagtgagactccgtctcaaaaatatatatatatatttttttgtaggaacaatctcactttgttgcccagtctggcctcgaactcctggcttccaccagtccgcccgccttggcctcccaaagtggtggggttataggcatgaggcaccgttcctggccatctagtatctcttaatcaaaaccactgtttatcctcacatcccttccctaactgtatccccatttcttggctataattctcaagagttgtttgcatatgcttctactttatctcccattcacaaccaccaacatagatacatctctgttttttttccacttttttgagtgagtagttttatttttttcctgaggagctgtatcaaagtatcataaactggatggcttagagcaacaaaaatttattttctcaatgttttggaggcgtgaaattcacaatcaaggtgtcagcatgtccatgctcttttgaaggctctgtagaagaatcctttgttgcttcttccaagcttctggtggttgctggtaattcttggcattcattggcttgtagctgtataactccaatctctgccttcatcttcacatgaccatcttctctctttgtgtatccatataatcatcatctttttttttcgagacaggacctcactctgtcacccaggctggagtgtggtggcacaatcacaactcactgcagccttgacctcccaggcttaggtgatctttccatcacaacctcctaagtagctgggactacaggtgttgcaacaccatgcccagctaatttttctattttttgtagagacaggattttgtcatgttgtccaggctggtctcgaactcctgggctcatgatccacctgcctcggcctcccaagtgctgggattataagtgtgagccaccgtgcccagtctgatctttacttcttatgaggacttgagtcattggatttggggcccaccttaatccagtataacctcatcttaattacttcggcaaagaccctgtttccaaataaggccatatttcacagataccagggtataggacttcatatcgttttgagggacacaattcaacacataacattagttaagcgtctcatggagttcggactggttggggtgataatatttgtttctttttaagaatgtgcatttcctgccaggcacagtggctcattcctgtaataacagaactttgggaggccaaggcaggaggaggactgcttgagcccaggagttagaaaccagcctgggcaacagcaagaccctgtctccattaaaaaaaaaaa

SEQ ID NO: 361887 - DNA, 1768 bp, Homo sapiens
  misc_feature (222)..(222): n is a, c, g, or t
  misc_feature (293)..(293): n is a, c, g, or t
ataatgtgctgttcttgttattactgctattctgtgtcatcactctattccttctctactggatcattctcatcaacctaggatctctcttttttttttggagagagggtctcactctgtcactcaggctggagtgcagtggtgtgatcatagctcactgcagcctcgaactcctggcctcaatccatcctcctgcctcagcctccagagtagctgggaccncaggtgtacaccaccatgcccacctaatttttttttaaaaaaaggccaggcatggtggctcacacttgtgntcccagcactttgggtggccgaggcaggcagatcatgaggtcagaagttcgagaccagcctgaccaacatggtgaaaccccgtctctactaaaaatagaaaaattagccgggcatggtggcacacgcctgtaatcacggctactcaggaggctgaggcaggagaatcgcttgaacctgggaggcaaaggttgcagtgagctgagattatgccactgcactccagcctgggcaacagagtgagactccgtctcaaaaatatatatatatatttttttgtaggaacaatctcactttgttgcccagtctggcctcgaactcctggcttccaccagtccgcccgccttggcctcccaaagtggtggggttataggcatgaggcaccgttcctggccatctagtatctcttaatcaaaaccactgtttatcctcacatcccttccctaactgtatccccatttcttggctataattctcaagagttgtttgcatatgcttctactttatctcccattcacaaccaccaacatagatacatctctgttttttttccacttttttgagtgagtagttttatttttttcctgaggagctgtatcaaagtatcataaactggatggcttagagcaacacatgtccatgctcttttgaaggctctgtagaagaatcctttgttgcttcttccaagcttctggtggttgctggtaattcttggcattcattggcttgtagctgtataactccaatctctgccttcatcttcacatgaccatcttctctctttgtgtatccatataatcatcatctttttttttcgagacaggacctcactctgtcacccaggctggagtgtggtggcacaatcacaactcactgcagccttgacctcccaggcttaggtgatctttccatcacaacctcctaagtagctgggactacaggtgttgcaacaccatgcccagctaatttttctattttttgtagagacaggattttgtcatgttgtccaggctggtctcgaactcctgggctcatgatccacctgcctcggcctcccaagtgctgggattataagtgtgagccaccgtgcccagtctgatctttacttcttatgaggacttgagtcattggatttggggcccaccttaatccagtataacctcatcttaattacttcggcaaagaccctgtttccaaataaggccatatttcacagataccagggtataggacttcatatcgttttgagggacacaattcaacacataacattagttaagcgtctcatggagttcggactggttggggtgataatatttgtttctttttaagaatgtgcatttcctgccaggcacagtggctcattcctgtaataacagaactttgggaggccaaggcaggaggaggactgcttgagcccaggagttagaaaccagcctgggcaacagcaagaccctgtctccattaaaaaaaaaaa

SEQ ID NO: 361888 - DNA, 2628 bp, Homo sapiens
cggcagggccgagagcacgaccggcggaactcggacggcgcccagcggtcgcgggcgggatcgcagggcgaagccgagccgggccgggccctggcaggaaggggcggacccgcctgagtctcggatctggcttggctcgatcctccactctcccactccgctggggccgcccactggacatcgcccgagtcggcctggcggtcgtgccccaggacgcgccgaggtcctccgagcccgcagggggcgctgtcgccatatggcccaccctgagtcggcgcgggcaggaagtacgagggtcacttccggcgggggcgcggcttggactgaggagcggacccggccgggcgcaggggctggactggcggagcaggtggggtccgcggccgccggagcgttccggtcggcgtctgggcatctcggcctcggcagaaagcgcgaccgccctgctgcgcggggcccgcggcgatgccgttcctgcacggcttccggaggatcatcttcgagtaccagccgctggtggatgcgattctgggctccctggggatccaggaccccgagcggcaggagtctctggaccggcccagttatgtcgccagcgaggagagccgaatccttgttctcactgagctgctggagaggaaagcccactctcccttttaccaggaaggcgtcagcaacgccctgctcaagatggctgagctggggctgacgcgggcggccgacgttctcttgcggcatggggccaatctcaactttgaagacccagtcacctactacacggccttgcacatcgccgtcctgcggaaccagccggacatggtggagctgctggtgcatcacggggccgacgttaatcggagggaccggatccacgagagtagccccttggacctggccagcgaggagcctgagcgcctgccctgcctgcagcgcctcctggaccttggagctgatgtcaatgccgctgacaagcatggaaaaactgctctgctccatgctctggccagcagcgacggggtgcagatccacaatactgagaacattcgtctcttactggaaggaggggcagacgtcaaggccaccaccaaagatggggacacagtgttcacctgcatcatcttcctgcttggtgagaccgtgggaggggacaaagaggaggcccagatgatcaaccgcttctgcttccaagtcacacggctgctgctggcacacggggccgaccccagcgagtgcccagcccacgagtccctcacccacatctgcctgaagagctttaaactgcacttccctctcctgcgcttcctcctggagtccggagccgcctacaactgctccctgcacggtgcgtcctgctggtctggctttcacatcatctttgagaggctctgttcccacccaggctgcacggaagacgagagccatgcggacctcctgcgcaaagctgagactgtcctggatctcatggtgaccaactctcagaaactccagctgcccgaaaacttcgatatccaccctgtgggcagcctggcggaaaagatccaggccctccacttctccttgaggcagctggagagctatcccccgcccctcaagcacctgtgccgtgtggccatccggctctaccttcagccgtggcctgtggatgtgaaggtcaaagccctgcctctgcccgacaggctgaagtggtacctccttagcgagcacagtggctccgtggaagatgacatctgataggtctcaggctacaggaacgggggacacgggcagctcaggtcagcctgttggtagatgctgggacagcattagaagagggtctttttgatctgggagatgagacgggatccttcatgagaaaagccagccaggtagagcctgaagctgtgatcactccagtggtgaagggtgcagctctggttcttccagagagactgcccccttccctccagtggcactccaagtcccccccatgttggaaagaggaacagggcttggattgatgtttataccctctgaattggagggcagtgccagggcatttgcagaagctgggaaggaccaagcctcagcaccccagggctgcggggctcttgttggccgcacgtggcagtgcagctggagaggaagcctggggcacgtcctgtgcggtgccaccaaggccccacccctgccccttttccttccaggttctgttactcacagaagtgtttctggtgggctctgcgggagaagacactaagggccccacaggcttgtttcatggtgttgcaagccaagctggcccctgcctgttcctgtagctctggggccaggtcagccgtggccccacctaccagaactgtgctctgctggcagctgtgcttttgccaaacccagggcctcagcgaccatgacttctgctaaaaagcaatcatgagtgcgtggctggggacagacctctctgaagtgtctcctgttgtgaggggctcactttggagccactgaagagccgactgtgccacccacttgcgagcctcagtcccttccaagctgcactggtcattgggaattgtgtaaacacctctggggataagctgaggtgactaaatgatatatttatattataagattaaactgactttcttggcctta

SEQ ID NO: 361889 - DNA, 2519 bp, Homo sapiens
cggcagggccgagagcacgaccggcggaactcggacggcgcccagcggtcgcgggcgggatcgcagggcgaagccgagccgggccgggccctggcaggaaggggcggacccgcctgagtctcggatctggcttggctcgatcctccactctcccactccgctggggccgcccactggacatcgcccgagtcggcctggcggtcgtgccccaggacgcgccgaggtcctccgagcccgcagggggcgctgtcgccatatggcccaccctgagtcggcgcgggcaggaagtacgagggtcacttccggcgggggcgcggcttggactgaggagcggacccggccgggcgcaggggctggactggcggagcaggtggggtccgcggccgccggagcgttccggtcggcgtctgggcatctcggcctcggcagaaagcgcgaccgccctgctgcgcggggcccgcggcgatgccgttcctgcacggcttccggaggatcatcttcgagtaccagccgctggtggatgcgattctgggctccctggggatccaggaccccgagcggcaggagtctctggaccggcccagttatgtcgccagcgaggagagccgaatccttgttctcactgagctgctggagaggaaagcccactctcccttttaccaggaaggcgtcagcaacgccctgctcaagatggctgagctggggctgacgcgggcggccgacgttctcttgcggcatggggccaatctcaactttgaagacccagtcacctactacacggccttgcacatcgccgtcctgcggaaccagccggacatggtggagctgctggtgcatcacggggccgacgttaatcggagggaccgggaaaaactgctctgctccatgctctggccagcagcgacggggtgcagatccacaatactgagaacattcgtctcttactggaaggaggggcagacgtcaaggccaccaccaaagatggggacacagtgttcacctgcatcatcttcctgcttggtgagaccgtgggaggggacaaagaggaggcccagatgatcaaccgcttctgcttccaagtcacacggctgctgctggcacacggggccgaccccagcgagtgcccagcccacgagtccctcacccacatctgcctgaagagctttaaactgcacttccctctcctgcgcttcctcctggagtccggagccgcctacaactgctccctgcacggtgcgtcctgctggtctggctttcacatcatctttgagaggctctgttcccacccaggctgcacggaagacgagagccatgcggacctcctgcgcaaagctgagactgtcctggatctcatggtgaccaactctcagaaactccagctgcccgaaaacttcgatatccaccctgtgggcagcctggcggaaaagatccaggccctccacttctccttgaggcagctggagagctatcccccgcccctcaagcacctgtgccgtgtggccatccggctctaccttcagccgtggcctgtggatgtgaaggtcaaagccctgcctctgcccgacaggctgaagtggtacctccttagcgagcacagtggctccgtggaagatgacatctgataggtctcaggctacaggaacgggggacacgggcagctcaggtcagcctgttggtagatgctgggacagcattagaagagggtctttttgatctgggagatgagacgggatccttcatgagaaaagccagccaggtagagcctgaagctgtgatcactccagtggtgaagggtgcagctctggttcttccagagagactgcccccttccctccagtggcactccaagtcccccccatgttggaaagaggaacagggcttggattgatgtttataccctctgaattggagggcagtgccagggcatttgcagaagctgggaaggaccaagcctcagcaccccagggctgcggggctcttgttggccgcacgtggcagtgcagctggagaggaagcctggggcacgtcctgtgcggtgccaccaaggccccacccctgccccttttccttccaggttctgttactcacagaagtgtttctggtgggctctgcgggagaagacactaagggccccacaggcttgtttcatggtgttgcaagccaagctggcccctgcctgttcctgtagctctggggccaggtcagccgtggccccacctaccagaactgtgctctgctggcagctgtgcttttgccaaacccagggcctcagcgaccatgacttctgctaaaaagcaatcatgagtgcgtggctggggacagacctctctgaagtgtctcctgttgtgaggggctcactttggagccactgaagagccgactgtgccacccacttgcgagcctcagtcccttccaagctgcactggtcattgggaattgtgtaaacacctctggggataagctgaggtgactaaatgatatatttatattataagattaaactgactttcttggcctta

SEQ ID NO: 361890 - DNA, 2218 bp, Homo sapiens
gggcttcatggacttagatgaaagcgctaccgacccgttgcgcggacccgccgagaccccgattctgcaccgctaacgaaggatcacgttcctttaccatccggtggtgcaagccctactccaagaggtggggatccaggaccccgagcggcaggagtctctggaccggcccagttatgtcgccagcgaggagagccgaatccttgttctcactgagctgctggagaggaaagcccactctcccttttaccaggaaggcgtcagcaacgccctgctcaagatggctgagctggggctgacgcgggcggccgacgttctcttgcggcatggggccaatctcaactttgaagacccagtcacctactacacggccttgcacatcgccgtcctgcggaaccagccggacatggtggagctgctggtgcatcacggggccgacgttaatcggagggaccggatccacgagagtagccccttggacctggccagcgaggagcctgagcgcctgccctgcctgcagcgcctcctggaccttggagctgatgtcaatgccgctgacaagcatggaaaaactgctctgctccatgctctggccagcagcgacggggtgcagatccacaatactgagaacattcgtctcttactggaaggaggggcagacgtcaaggccaccaccaaagatggggacacagtgttcacctgcatcatcttcctgcttggtgagaccgtgggaggggacaaagaggaggcccagatgatcaaccgcttctgcttccaagtcacacggctgctgctggcacacggggccgaccccagcgagtgcccagcccacgagtccctcacccacatctgcctgaagagctttaaactgcacttccctctcctgcgcttcctcctggagtccggagccgcctacaactgctccctgcacggtgcgtcctgctggtctggctttcacatcatctttgagaggctctgttcccacccaggctgcacggaagacgagagccatgcggacctcctgcgcaaagctgagactgtcctggatctcatggtgaccaactctcagaaactccagctgcccgaaaacttcgatatccaccctgtgggcagcctggcggaaaagatccaggccctccacttctccttgaggcagctggagagctatcccccgcccctcaagcacctgtgccgtgtggccatccggctctaccttcagccgtggcctgtggatgtgaaggtcaaagccctgcctctgcccgacaggctgaagtggtacctccttagcgagcacagtggctccgtggaagatgacatctgataggtctcaggctacaggaacgggggacacgggcagctcaggtcagcctgttggtagatgctgggacagcattagaagagggtctttttgatctgggagatgagacgggatccttcatgagaaaagccagccaggtagagcctgaagctgtgatcactccagtggtgaagggtgcagctctggttcttccagagagactgcccccttccctccagtggcactccaagtcccccccatgttggaaagaggaacagggcttggattgatgtttataccctctgaattggagggcagtgccagggcatttgcagaagctgggaaggaccaagcctcagcaccccagggctgcggggctcttgttggccgcacgtggcagtgcagctggagaggaagcctggggcacgtcctgtgcggtgccaccaaggccccacccctgccccttttccttccaggttctgttactcacagaagtgtttctggtgggctctgcgggagaagacactaagggccccacaggcttgtttcatggtgttgcaagccaagctggcccctgcctgttcctgtagctctggggccaggtcagccgtggccccacctaccagaactgtgctctgctggcagctgtgcttttgccaaacccagggcctcagcgaccatgacttctgctaaaaagcaatcatgagtgcgtggctggggacagacctctctgaagtgtctcctgttgtgaggggctcactttggagccactgaagagccgactgtgccacccacttgcgagcctcagtcccttccaagctgcactggtcattgggaattgtgtaaacacctctggggataagctgaggtgactaaatgatatatttatattataagattaaactgactttcttggcctta

SEQ ID NO: 361891 - DNA, 692 bp, Homo sapiens
gcctgccctgcctgcagcgcctcctggaccttggagctgatgtcaatgccgctgacaagcatggtgggtgcctcctgcaggaaagcaggacagctgggcccccaggcaccttgtgggggacacccagggtgccccaggacaacagctaggtgggcagactggatgctggccctggctggtggcacagcatggctgggcacacagggattctgctgacttgctgagctcagaggcttcagagaggcagtgcagtcattgtccctgtgctggccctcaagggccttctataggaagaaatagggcatgtgtgcacttagtttccaagaaacaatggcttcccattgggagaggcccagccaacatctcaggtagcatcttggggtccagaaaaatcctacctttcctggcctttccgctcccacttctctgggtggaaagggaatggccagaagcctgtcaccctcagccctcacctgagctgagagttgtctctgaaagttcatcttctgatcctctgagtgtctggatttctgccacctcctctgggttgccctgacctgggcttcctggcctcctgctcctccttgctctccctccctccctaggaaaaactgctctgctccatgctctggccagcagcgacggggtgcagatccacaatactgagaacattcgtctcttactggaaggag

SEQ ID NO: 361892 - DNA, 3181 bp, Homo sapiens
cggcagggccgagagcacgaccggcggaactcggacggcgcccagcggtcgcgggcgggatcgcagggcgaagccgagccgggccgggccctggcaggaaggggcggacccgcctgagtctcggatctggcttggctcgatcctccactctcccactccgctggggccgcccactggacatcgcccgagtcggcctggcggtcgtgccccaggacgcgccgaggtcctccgagcccgcagggggcgctgtcgccatatggcccaccctgagtcggcgcgggcaggaagtacgagggtcacttccggcgggggcgcggcttggactgaggagcggacccggccgggcgcaggggctggactggcggagcaggtggggtccgcggccgccggagcgttccggtcggcgtctgggcatctcggcctcggcagaaagcgcgaccgccctgctgcgcggggcccgcggcgatgccgttcctgcacggcttccggaggatcatcttcgagtaccagccgctggtggatgcgattctgggctccctggggatccaggaccccgagcggcaggagtctctggaccggcccagttatgtcgccagcgaggagagccgaatccttgttctcactgagctgctggagaggaaagcccactctcccttttaccaggaaggcgtcagcaacgccctgctcaagatggctgagctggggctgacgcgggcggccgacgttctcttgcggcatggggccaatctcaactttgaagacccagtcacctactacacggccttgcacatcgccgtcctgcggaaccagccggacatggtggagctgctggtgcatcacggggccgacgttaatcggagggaccggatccacgagagtagccccttggacctggccagcgaggagcctgagcgcctgccctgcctgcagcgcctcctggaccttggagctgatgtcaatgccgctgacaagcatggaaaaactgctctgctccatgctctggccagcagcgacggggtgcagatccacaatactgagaacattcgtctcttactggaaggaggggcagacgtcaaggccaccaccaaagatggggacacagtgttcacctgcatcatcttcctgcttggtgagaccgtgggaggggacaaagaggaggcccagatgatcaaccgcttctgcttccaagtcacacggctgctgctggcacacggggccgaccccagcgagtgcccagcccacgagtccctcacccacatctgcctgaagagctttaaactgcacttccctctcctgcgcttcctcctggagtccggagccgcctacaactgctccctgcacggtgcgtcctgctggtctggctttcacatcatctttgagaggctctgttcccacccaggctgcacggaagacgagagccatgcggacctcctgcgcaaagctgagactgtcctggatctcatggtgaccaactctcagaaactccagctgcccgaaaacttcgatatccaccctgtgggcagcctggcggaaaagatccaggccctccacttctccttgaggcagctggagagctatcccccgcccctcaagcacctgtgccgtgtggccatccggctctaccttcagccgtggcctgtggatgtgaaggtcaaagccctgcctctgcccgacaggctgaagtggtacctccttagcgagcacagtggctccgtggaagatgacatctgataggtctcaggctacaggaacgggggacacgggcagctcaggtcagcctgttggtagatgctgggacagcattagaagagggtctttttgatctgggagatgagacgggatccttcatgagaaaagccagccaggtagagcctgaagctgtgatcactccagtggtgaagggtgcagctctggttcttccagagagactgcccccttccctccagtggcactccaagtcccccccatgttggaaagaggaacagggcttggattgatgtttataccctctgaattggagggcagtgccagggcatttgcagaagctgggaaggaccaagcctcagcaccccagggctgcggggctcttgttggccgcacgtggcagtgcagctggagaggaagcctggggcacgtcctgtgcggtgccaccaaggccccacccctgccccttttccttccaggttctgttactcacagaagtgtttctggtgggctctgcgggagaagacactaagggccccacaggcttgtttcatggtgttgcaagccaagctggcccctgcctgttcctgtagctctggggccaggtcagccgtggccccacctaccagaactgtgctctgctggcagctgtgcttttgccaaacccagggcctcagcgaccatgacttctgctaaaaagcaatcatgagtgcgtggctggggacagacctctctgaagtgtctcctgttgtgaggggctcactttggagccactgaagagccgactgtgccacccacttgcgagcctcagtcccttccaagctgcactggtcattgggaattgtgtaaacacctctggggataagctgaggtgactaaatgatatatttatattataagattaaactgactttcttggccttaacaaggtccttatataaaatttccaccccgcccctccatagttcaggatagaggctcccacagcagccggtaaggaagtgggtggcaggtgtgaggggatgctgtgtttggggggttgtttccaagtccctgcaaagaagcaccactctagactggcaagggcctccacagtgtggaggtcccattttattatttttttttttcgagacactctgtcacccaggctggagtgcaatggtgcaatctcggctcactgcgacctctgcctcccaggttcaagcagttctcctgcctcagcctcctgagtagctggcattataggtgcccaccaccatgcctggctgatttttgtatttttagtagagacggggtttcgccatgttggtcaggctggtctcaaactcctgacctcaggtgattcgcctgcctcggcctttcaaagtgctgggattacagacatgagccactgtgcccggcccccattttattttagttttattttgagacagagtctcgctctgtcacctaggctggagtgcagtggcgcaatctc

SEQ ID NO: 361893 - DNA, 570 bp, Homo sapiens
ggagcgttccggtcggcgtctgggcatctcggcctcggcagaaagcgcgaccgccctgctgcgcggggcccgcggcgatgccgttcctgcacggcttccggaggatcatcttcgagtaccagccgctggtggatgcgattctgggctccctggggatccaggaccccgagcggcaggagtctctggaccggtaactcaccccctcccgtgagctggccgaggccgctccgaccccgcagcgtcccactttatcaccacaagccgggcggggtggatgcgtcccccttgacagaggaagggacgggcggaagccggggttgcgtggctcggagtgcgcgctgccccgcgcggatcccactcctgccccttgcatggcggagacgaagggcggggagggcccgagggcggaggcccgcgggttgtcgcagggcctgcgcctcagccccaccctgtcgcctgcctgtcctgtgccaccccccggcgtggcagaggagcagggtggaatccgtgaggcctcagatgttaccccagagcagtgtgaaggtgggcttttgtagcagagtttgcgtt

SEQ ID NO: 361894 - DNA, 1490 bp, Homo sapiens
tttgacttaagaagccattttatggggaaattagaatgaatcttaaaaaagttttttttcttcttttgattgtattgaattcctttgtagtgtggcttttttaaaagactgaatctttgttctcattaaccctaggaaatgttcttgctttctctgcttatctctttgctctttaatatgaacagaattttttttactccctaaggaacgcaagccattttctgtttctagcactcccaccatgtcacgctcaagttcaataagtggtgttgatatggcaggactacagacatcttttctgtctcaggtgatgttttattttttatatgtgcttagttcttagaataataataaaggaaatatgcaaatggcaatattgtctgtcatcatgaccttgccattctatgggtaattcatctgaatacttgtggaggagtgctaattttagtgagaggaaacacgtgaatgattttctgcctttgagaagacatttaaagcaaaaattgacagaaccatttttgttcgaacctggtaatggaagacaagctatgataactgagtaactgtgtgaactttcttaattaacataggatgagtctcatgatcactcatttggaccaatgcctatatcagcaaatggaagcaatctttatgatgctgtaaggatgggagcaggatcaagcataattgaaaacctacagtctcagctaaagctaagggaaggggaaatcactcatttacaggtattggaaaaattaaatttgctatagaagtaaatgaagttttgaggcctaataaatagcacccttcatttccatctgaattctgagcaaattgagaaacaagatgacatagtggcatgtgaagcccaaaatgtatcacatatatcaatgataaaggctaaaaagagaaattagctaaggataacagccaactgaacctgctaattgccagaattaggcatattcggctgatctgtcacaggaaatgctgggctggagcaggcctcccatgttttacaacctgcctacataagacataagcatctaggagcagagaatccctcctcctttcaagcagctctttcccaacagaataaagggaagtcactgagctgtgaatgcctgttcatagatagagacaaaacatttctatcacaccggcaatttcctatgtgtcccatcccaatcaatcctttcccctttgctggctccaaacaatgactctttcctatctttttagaaagattagaattgcttttctagagttccagtaatggaatcatacagtgtctaagtctgtttgtggtgctgtaacaaaatacctgagactgggtaatttataaattataggaatttatttctcacagttctggatgctgaaaagtttatgatcaaggcactagcaggtttggtgtctgagggcccagtttctaatttgaagatggtgctttaaacactgtcctcacatggtagaaggggcagatgggc

SEQ ID NO: 361895 - DNA, 514 bp, Homo sapiens
gaaacattcctggtctcaagcattttgaaccaggatacctcttttcagtgttaaacacaatacactcagaagtaggtaaaaattcaactcccattatatacttttagttatatgaaaatattaaagaacttgaattggcaaaaagtagatcagactaatctgaatcccagatgtttgtatagctggtatgctatacagggacctaattaatttctttggtagtgatgaaagcctctgtcgatacaacctacacaggtggggctacgttaaagtatatttttatttctctgggttcttgtagtaatttagaataactgaaatatatgtcatttccttagattagaaaaatatatggttgaatgttttcaaacaaataattggatttatctctgttgcacagtaaaccttataaacggtatacctctcaggaaagttgggaccgtttttctgccactgtttcctttacttaagaaagagctagctcaaggttatatgttgacatgtctatttcaaa

SEQ ID NO: 361896 - DNA, 6888 bp, Homo sapiens
gtagatttggttgctgtgtacgtggaagaagcaagcgcatgcgcacatgggcccccttcgtctcagctgtgcgggaacggccgagggtaacatcccgggctcgcgggaggctgtcggggtaatggccacacgctgacagaaccagccgagtggaaaaggggagcgaagccgttcctctgcacccttccccaggcctgaggccttcccgcttggtgctgccgccgccactgccggctgaggaggggcgatgagttggttcaacgcctcccagctctccagcttcgctaagcaggccctgtcccaggcccagaagtctattgacagggttctggacatccaggaagaggagccgagcatctgggccgagaccattccgtatggagagccgggaataagttcccctgtcagtggaggatgggatacttcaacctgggggttgaaatcaaacactgaacctcagagtccaccaatagcctctcctaaagcaatcacaaagccagttcggaggactgtggtcgatgaatctgaaaatttcttcagtgcctttctctcgccaactgatgtccagaccattcagaagagtccagtggtatcaaaacctccagcaaaatcacaacgaccagaagaagaagtgaaaagcagcttacatgaatccttgcacattggccagtcaagaactcctgaaacaactgaatcacaagtaaaagactcttctttgtgtgtttcaggggaaactctggcagcaggtacttcatcacctaaaactgaaggcaagcacgaagaaactgttaataaagaatcggatatgaaggtgccaactgtaagtttgaaagtatctgaaagtgtaattgatgtgaaaacaactatggaaagtatatctaatacgtctacgcagtctctcacagcagaaacaaaggacatagctttggaacctaaggaacaaaaacatgaagacaggcagagcaatacaccttctcctcctgttagtaccttttcatcaggtacttctaccaccagtgatattgaagttttagatcatgaaagtgtaataagtgagagctcagcgagctcgagacaagagactacagattcaaaatcaagtcttcacttgatgcagacatcttttcagcttctctctgcatctgcttgtcctgaatataatcgtttagatgatttccaaaaactcactgagagttgctgttcatctgatgcttttgaaagaatagactcatttagtgtacagtcattagatagccggagtgtaagtgaaatcaattcagatgatgaattgtcaggcaagggatatgctttagtgcctattatagttaattcttcaactccaaagtctaaaacagttgaatctgctgaaggaaaatctgaagaagtaaatgaaacattagttatacccactgaggaagcagaaatggaagaaagtggacgaagtgcaactcctgttaactgtgaacagcctgatatcttggtttcttctacaccaataaatgaaggacagactgtgttagacaaggtggctgagcagtgtgaacctgctgaaagtcagccagaagcactttctgagaaggaagatgtttgcaagacagttgaatttctgaatgaaaagctggaaaaaagggaggctcagttattatctcttagtaaggaaaaagcacttctagaagaagcttttgataacctgaaagatgaaatgttcagagtgaaagaagaaagcagtagcatttcttccttgaaagatgagtttactcaaagaattgcagaagcagaaaagaaagttcaactagcctgcaaagagagagatgctgctaaaaaggaaatcaaaaacataaaagaagaacttgccactagattaaatagtagtgaaactgcagaccttttgaaagagaaagatgagcagatccgagggttaatggaagaaggagaaaaactttcaaaacagcagctgcacaattctaacatcatcaagaaattaagagctaaagacaaggagaatgaaaatatggttgcaaagctgaacaaaaaagttaaagagctagaagaggagttgcagcatttgaaacaggtccttgatggcaaagaagaggttgagaaacaacatagagaaaatattaaaaaactaaattccatggtagaacgccaagagaaagatcttggccgtcttcaggtagacatggatgaacttgaagaaaagaaccgaagtattcaggctgccctggatagtgcatacaaagaacttactgatcttcacaaagccaatgctgcaaaggatagtgaggcacaggaagctgctctgagccgtgaaatgaaagctaaagaagaactttctgcagcattagagaaggcccaagaagaagcccgtcagcagcaagaaacattagccattcaagtgggggaccttaggcttgcattgcagcgtacagaacaagcggctgccagaaaggaggattatttacgccatgagatcggtgaacttcagcagagactccaggaagcagagaatcgaaaccaggaactgagtcaaagtgtttcatcaacaacaagaccattgcttcgacaaatagaaaatttgcaagcaaccctgggatcccagacatcgtcgtgggagaaattagagaagaatctttctgataggcttggtgaatcccagaccttgctggcagcagcagttgagagagaacgtgcagctacagaagaactccttgctaacaaaattcagatgtcttccatggagtcacagaattctcttttaagacaggaaaacagtagatttcaagcccagctagaatcagagaaaaataggctgtgtaaactggaggatgagaacaataggtaccaggttgaattggaaaacctaaaagatgaatatgtaagaacacttgaagagacgaggaaagaaaagacattgttgaatagtcagttagaaatggaaagaatgaaagttgaacaagaaaggaagaaagccatttttactcaagaaacaataaaagaaaaggaacgcaagccattttctgtttctagcactcccaccatgtcacgctcaagttcaataagtggtgttgatatggcaggactacagacatcttttctgtctcaggatgagtctcatgatcactcatttggaccaatgcctatatcagcaaatggaagcaatctttatgatgctgtaaggatgggagcaggatcaagcataattgaaaacctacagtctcagctaaagctaagggaaggggaaatcactcatttacagctagaaattggcaatctagaaaaaactcgatcaataatggctgaagaactagttaaattaacaaatcaaaatgatgaacttgaagagaaggtgaaggagatacccaaacttagaactcagctaagagatttggatcaaaggtacaacactattctgcagatgtatggagaaaaagcagaagaggcagaagaacttcgattagatctcgaagatgtaaaaaatatgtacaaaactcaaatagatgaacttttaagacaaagtctcagttaacttgtgaaaattgaattcccatcaaactgaatgtaagcatttaatatctaaacatttaatgtggacttccaataaattcttttatagaattagaaagtgggatttactgtagagtgtaaaaatttttttaaaattgttttacactatgtagtaatatttacagttaaattattttgtgcaatatttgaactttatttttgaaactattctttaaagatttattttttaaagcattcattttttttccttgaatagcacagagatttattactttatcctcatataaatatggctagagaagaagaatggtgttcatatatgtattgtagatatacaactagttgtatctataatttgtaagtgtttatatatatattaagaacatttgaagagtaatgttaacatactgaaactttgaaatctttcacatttaaaatttcaacatatcttaattactgctcatgaaaatgtacattaagtgttaaagtaaaaaattattaaatctgtggctattaaattttaaactaatttttttcctttaaaagtaagagtcacactgacactgtctgaaatttaaagagtgaatgatttaaacttaaaaaaaattttgatctgaaaatttatttcacccagctttcacaattaagtctgtataaaatgtggtaccttttggtacctatccagagaaacctgtacatattcaatgttatctagatgtgattggataatggagaaaatttatttataatgattttgcaatggcatcaataacatttaaatgattttgaagaagtattattttactaccctataaaatgaatcgaaaataataaagttcttaacataatttactctttaaaaattacctgttcatattttgtaaacccatatttttagcacattaaaaatgaatgtttgatattacagaatattcataacaaaatggaagaattataggaattaacttgaatttggcatttttaattttgtgatttatcattttattttttcttgaaatttcaaacacaaggaaagcatagaatagcttttaaaagtagctatgccttcttccaaatgttattttattcaaaaaggtaaccaggttgtgttttaaacctgtgaaatattgtgatgcattttattactgaaagttatttaactgcctttacttgcacataaaaactctcatttacggccaggtgctgtggctcatgcctgtaatcccagcactttgggaggccaaggcgggcatatcacctgatgtcaggagttcaagaccagcatggccagcagtttggtgaaaccccatctctactaaaaatacaaaaattagcctggcgtggtggtgtgcgcctgtaatcctagctactcgggaggctgaggcaggagcattgcttgaacctgggaggtggaggttacaatgagccaagattgtgccactgcactccagcatgggtgacagagaaagactccgtctcaaaaaaaaaaaaaacaaactcttatttaatttttagttaaaattaaaacactagtacttcagaatatagatacaagtacaccatcttgaagaatttggagtttttcagggcaattcaaatgacctcattttttgttctttttgtattccagacagtgtttctgtcattggatctctgattggtagtgttaataaatattctttcagtgtgagccagattcataaaattaattttcttcattttagtagtaaaaagtagtctaatagctttttgtcagcttgatttttttgtgtgtgtaatattcaagggcagaatgacaggacagataagcaataagaaatgtatagaattagaaaatatagtagttccctcttacccatgggacatacgttccaagacccccagtgaacgtctgaaaccatggatagtatagacacctctatacactgttttttcctatacatatatacctatgataaagttctatttataaatcagggacagcaagagataaacaataactgcaaatagaacaattataacagtgcactgtaataaaagtgatgtaaatgtgatatgtctgtctctttctctcaaaatatcttattgtactgtactcacctgtaatcagactgtggttgaccgtgagtaaccgaaaccacagaaagcaaaatcgtggataaggggagactactctatatgaaacttaagttacaaaattctctgaagcatttgaaactagacgttttggaattataaaatagtccctttaaaatatccactagtagaaaaaaacttcatttgcagagaaaagattgcaataaaactcattcctaaacttttcaattttataaaattaaacattctttttttatccgtattaacaatttctagttacatagtttctagttacatattaccatatattactctttatctacaaataaatagctgatactcaaactgatcatattttgattgttaaacacttggatctctcaatacttctgtaagttaaagtgaacttaaacagtttcttgaaaaactccagtaggtggcagaatacctattgaatattcgttgctatactttgctgtttgtcattaaaacatctctacccatattcttgcaaaataatatttatattttaatggataggaaaatgatttgcaattagatgtttccattcttgaaagaaaaaagctgcaaataacattttcaagaatataaaaaaatgagtaaccaaagggaaggttgtttggtcatttatagacaattaagcacagactgtagatgtccttccaattcttgggaggctaaactgagtctaccatttcttacatttcttttacctattttttgagaattgccagttgtacagtgtttagcatgtggaatgtaccaaatatatctatgttgtgacttaagatattctaaatgtggataacttctgacctaggaaacatgaagtttgtagtgaagtaagtgaaaagaatgttcaggaaattttttttctccatctcttcagttggcatttattgagagttttatttgaatgcttattaaaagtatatgatttataatatttagaaaatagaagaaaaaagaaaactgtagatgttttatcttgttttaatactgtatgtttagtacgtatacatttatgttctagtgtatcaaaatttttcattttcattaaagtgaatccaattttccatattctaggtccattttaaaccatgaaaactttaatcacatattttgtaaagggctgaaagtatgatttaaactacagattgatatattttaattctaaatgaaaggtaatgtaaataagcatggatctgattgaataaagattttaaaatagtaaaaatgtat

SEQ ID NO: 361897 - DNA, 4898 bp, Homo sapiens
gtagatttggttgctgtgtacgtggaagaagcaagcgcatgcgcacatgggcccccttcgtctcagctgtgcgggaacggccgagggtaacatcccgggctcgcgggaggctgtcggggtaatggccacacgctgacagaaccagccgagtggaaaaggggagcgaagccgttcctctgcacccttccccaggcctgaggccttcccgcttggtgctgccgccgccactgccggctgaggaggggcgatgagttggttcaacgcctcccagctctccagcttcgctaagcaggccctgtcccaggcccagaagtctattgacagggttctggacatccaggaagaggagccgagcatctgggccgagaccattccgtatggagagccgggaataagttcccctgtcagtggaggatgggatacttcaacctgggggttgaaatcaaacactgaacctcagagtccaccaatagcctctcctaaagcaatcacaaagccagttcggaggactgtggtcgatgaatctgaaaatttcttcagtgcctttctctcgccaactgatgtccagaccattcagaagagtccagtggtatcaaaacctccagcaaaatcacaacgaccagaagaagaagtgaaaagcagcttacatgaatccttgcacattggccagtcaagaactcctgaaacaactgaatcacaagtaaaagactcttctttgtgtgtttcaggggaaactctggcagcaggtacttcatcacctaaaactgaaggcaagcacgaagaaactgttaataaagaatcggatatgaaggtgccaactgtaagtttgaaagtatctgaaagtgtaattgatgtgaaaacaactatggaaagtatatctaatacgtctacgcagtctctcacagcagaaacaaaggacatagctttggaacctaaggaacaaaaacatgaagacaggcagagcaatacaccttctcctcctgttagtaccttttcatcaggtacttctaccaccagtgatattgaagttttagatcatgaaagtgtaataagtgagagctcagcgagctcgagacaagagactacagattcaaaatcaagtcttcacttgatgcagacatcttttcagcttctctctgcatctgcttgtcctgaatataatcgtttagatgatttccaaaaactcactgagagttgctgttcatctgatgcttttgaaagaatagactcatttagtgtacagtcattagatagccggagtgtaagtgaaatcaattcagatgatgaattgtcaggcaagggatatgctttagtgcctattatagttaattcttcaactccaaagtctaaaacagttgaatctgctgaaggaaaatctgaagaagtaaatgaaacattagttatacccactgaggaagcagaaatggaagaaagtggacgaagtgcaactcctgttaactgtgaacagcctgatatcttggtttcttctacaccaataaatgaaggacagactgtgttagacaaggtggctgagcagtgtgaacctgctgaaagtcagccagaagcactttctgagaaggaagatgtttgcaagacagttgaatttctgaatgaaaagctggaaaaaagggaggctcagttattatctcttagtaaggaaaaagcacttctagaagaagcttttgataacctgaaagatgaaatgttcagagtgaaagaagaaagcagtagcatttcttccttgaaagatgagtttactcaaagaattgcagaagcagaaaagaaagttcaactagcctgcaaagagagagatgctgctaaaaaggaaatcaaaaacataaaagaagaacttgccactagattaaatagtagtgaaactgcagaccttttgaaagagaaagatgagcagatccgagggttaatggaagaaggagaaaaactttcaaaacagcagctgcacaattctaacatcatcaagaaattaagagctaaagacaaggagaatgaaaatatggttgcaaagctgaacaaaaaagttaaagagctagaagaggagttgcagcatttgaaacaggtccttgatggcaaagaagaggttgagaaacaacatagagaaaatattaaaaaactaaattccatggtagaacgccaagagaaagatcttggccgtcttcaggtagacatggatgaacttgaagaaaagaaccgaagtattcaggctgccctggatagtgcatacaaagaacttactgatcttcacaaagccaatgctgcaaaggatagtgaggcacaggaagctgctctgagccgtgaaatgaaagctaaagaagaactttctgcagcattagagaaggcccaagaagaagcccgtcagcagcaagaaacattagccattcaagtgggggaccttaggcttgcattgcagcgtacagaacaagcggctgccagaaaggaggattatttacgccatgagatcggtgaacttcagcagagactccaggaagcagagaatcgaaaccaggaactgagtcaaagtgtttcatcaacaacaagaccattgcttcgacaaatagaaaatttgcaagcaaccctgggatcccagacatcgtcgtgggagaaattagagaagaatctttctgataggcttggtgaatcccagaccttgctggcagcagcagttgagagagaacgtgcagctacagaagaactccttgctaacaaaattcagatgtcttccatggagtcacagaattctcttttaagacaggaaaacagtagatttcaagcccagctagaatcagagaaaaataggctgtgtaaactggaggatgagaacaataggtaccaggttgaattggaaaacctaaaagatgaatatgtaagaacacttgaagagacgaggaaagaaaagacattgttgaatagtcagttagaaatggaaagaatgaaagttgaacaagaaaggaagaaagccatttttactcaagaaacaataaaagaaaaggaacgcaagccattttctgtttctagcactcccaccatgtcacgctcaagttcaataagtggtgttgatatggcaggactacagacatcttttctgtctcaggatgagtctcatgatcactcatttggaccaatgcctatatcagcaaatggaagcaatctttatgatgctgtaaggatgggagcaggatcaagcataattgaaaacctacagtctcagctaaagctaagggaaggggaaatcactcatttacagctagaaattggcaatctagaaaaaactcgatcaataatggctgaagaactagttaaattaacaaatcaaaatgatgaacttgaagagaaggtgaaggagatacccaaacttagaactcagctaagagatttggatcaaaggtacaacactattctgcagatgtatggagaaaaagcagaagaggcagaagaacttcgattagatctcgaagatgtaaaaaatatgtacaaaactcaaatagatgaacttttaagacaaagtctcagttaacttgtgaaaattgaattcccatcaaactgaatgtaagcatttaatatctaaacatttaatgtggacttccaataaattcttttatagaattagaaagtgggatttactgtagagtgtaaaaatttttttaaaattgttttacactatgtagtaatatttacagttaaattattttgtgcaatatttgaactttatttttgaaactattctttaaagatttattttttaaagcattcattttttttccttgaatagcacagagatttattactttatcctcatataaatatggctagagaagaagaatggtgttcatatatgtattgtagatatacaactagttgtatctataatttgtaagtgtttatatatatattaagaacatttgaagagtaatgttaacatactgaaactttgaaatctttcacatttaaaatttcaacatatcttaattactgctcatgaaaatgtacattaagtgttaaagtaaaaaattattaaatctgtggctattaaattttaaactaatttttttcctttaaaagtaagagtcacactgacactgtctgaaatttaaagagtgaatgatttaaacttaaaaaaaattttgatctgaaaatttatttcacccagctttcacaattaagtctgtataaaatgtggtaccttttggtacctatccagagaaacctgtacatattcaatgttatctagatgtgattggataatggagaaaatttatttataatgattttgcaatggcatcaataacatttaaatgattttgaagaagtattattttactaccctataaaatgaatcgaaaataataaagttcttaacataatttactctttaaaaattacctgttcatattttgtaaacccatatttttagcacattaaaaatgaatgtttgatattacagaatattcataacaaaatggaagaattataggaattaacttgaatttggcatttttaattttgtgatttatcattttattttttcttgaaatttcaaacacaaggaaagcatagaatagcttttaaaagtagctatgccttcttccaaatgttattttattcaaaaaggtaaccaggttgtgttttaaacctgtgaaatattgtgatgcattttattactgaaagttatttaactgcctttacttgcacataaaaactctcatgcctcggccgggccccccaaaaatggttgggattccaggggtgagggaccaaggccggccaaactttattcttttaaatgtggatgtctagggtttcccaaggatctgttaaaaatgttactctttctccattggattattttgggcacccttataaacaatcaattgcccataaaaaaa

SEQ ID NO: 361898 - DNA, 4280 bp, Homo sapiens
agagcaccaataaataaaatgcacagaagtggagctttttcacttttggtttggtttctgagtgaaactcagatgggatctggaacacactgttggaaaatcactgatgtcaagctggtaataaaaatgatttctcaatatgtagctggagttaataaagtactgagtttttaatagtctatactagcatctttttcattttctgtttttttaaattctgccttgtttaataggtaccaggttgaattggaaaacctaaaagatgaatatgtaagaacacttgaagagacgaggaaagaaaagacattgttgaatagtcagttagaaatggaaagaatgaaagttgaacaagaaaggaagaaagccatttttactcaagaaacaataaaagaaaaggaacgcaagccattttctgtttctagcactcccaccatgtcacgctcaagttcaataagtggtgttgatatggcaggactacagacatcttttctgtctcaggatgagtctcatgatcactcatttggaccaatgcctatatcagcaaatggaagcaatctttatgatgctgtaaggatgggagcaggatcaagcataattgaaaacctacagtctcagctaaagctaagggaaggggaaatcactcatttacagctagaaattggcaatctagaaaaaactcgatcaataatggctgaagaactagttaaattaacaaatcaaaatgatgaacttgaagagaaggtgaaggagatacccaaacttagaactcagctaagagatttggatcaaaggtacaacactattctgcagatgtatggagaaaaagcagaagaggcagaagaacttcgattagatctcgaagatgtaaaaaatatgtacaaaactcaaatagatgaacttttaagacaaagtctcagttaacttgtgaaaattgaattcccatcaaactgaatgtaagcatttaatatctaaacatttaatgtggacttccaataaattcttttatagaattagaaagtgggatttactgtagagtgtaaaaatttttttaaaattgttttacactatgtagtaatatttacagttaaattattttgtgcaatatttgaactttatttttgaaactattctttaaagatttattttttaaagcattcattttttttccttgaatagcacagagatttattactttatcctcatataaatatggctagagaagaagaatggtgttcatatatgtattgtagatatacaactagttgtatctataatttgtaagtgtttatatatatattaagaacatttgaagagtaatgttaacatactgaaactttgaaatctttcacatttaaaatttcaacatatcttaattactgctcatgaaaatgtacattaagtgttaaagtaaaaaattattaaatctgtggctattaaattttaaactaatttttttcctttaaaagtaagagtcacactgacactgtctgaaatttaaagagtgaatgatttaaacttaaaaaaaattttgatctgaaaatttatttcacccagctttcacaattaagtctgtataaaatgtggtaccttttggtacctatccagagaaacctgtacatattcaatgttatctagatgtgattggataatggagaaaatttatttataatgattttgcaatggcatcaataacatttaaatgattttgaagaagtattattttactaccctataaaatgaatcgaaaataataaagttcttaacataatttactctttaaaaattacctgttcatattttgtaaacccatatttttagcacattaaaaatgaatgtttgatattacagaatattcataacaaaatggaagaattataggaattaacttgaatttggcatttttaattttgtgatttatcattttattttttcttgaaatttcaaacacaaggaaagcatagaatagcttttaaaagtagctatgccttcttccaaatgttattttattcaaaaaggtaaccaggttgtgttttaaacctgtgaaatattgtgatgcattttattactgaaagttatttaactgcctttacttgcacataaaaactctcatttacggccaggtgctgtggctcatgcctgtaatcccagcactttgggaggccaaggcgggcatatcacctgatgtcaggagttcaagaccagcatggccagcagtttggtgaaaccccatctctactaaaaatacaaaaattagcctggcgtggtggtgtgcgcctgtaatcctagctactcgggaggctgaggcaggagcattgcttgaacctgggaggtggaggttacaatgagccaagattgtgccactgcactccagcatgggtgacagagaaagactccgtctcaaaaaaaaaaaaaacaaactcttatttaatttttagttaaaattaaaacactagtacttcagaatatagatacaagtacaccatcttgaagaatttggagtttttcagggcaattcaaatgacctcattttttgttctttttgtattccagacagtgtttctgtcattggatctctgattggtagtgttaataaatattctttcagtgtgagccagattcataaaattaattttcttcattttagtagtaaaaagtagtctaatagctttttgtcagcttgatttttttgtgtgtgtaatattcaagggcagaatgacaggacagataagcaataagaaatgtatagaattagaaaatatagtagttccctcttacccatgggacatacgttccaagacccccagtgaacgtctgaaaccatggatagtatagacacctctatacactgttttttcctatacatatatacctatgataaagttctatttataaatcagggacagcaagagataaacaataactgcaaatagaacaattataacagtgcactgtaataaaagtgatgtaaatgtgatatgtctgtctctttctctcaaaatatcttattgtactgtactcacctgtaatcagactgtggttgaccgtgagtaaccgaaaccacagaaagcaaaatcgtggataaggggagactactctatatgaaacttaagttacaaaattctctgaagcatttgaaactagacgttttggaattataaaatagtccctttaaaatatccactagtagaaaaaaacttcatttgcagagaaaagattgcaataaaactcattcctaaacttttcaattttataaaattaaacattctttttttatccgtattaacaatttctagttacatagtttctagttacatattaccatatattactctttatctacaaataaatagctgatactcaaactgatcatattttgattgttaaacacttggatctctcaatacttctgtaagttaaagtgaacttaaacagtttcttgaaaaactccagtaggtggcagaatacctattgaatattcgttgctatactttgctgtttgtcattaaaacatctctacccatattcttgcaaaataatatttatattttaatggataggaaaatgatttgcaattagatgtttccattcttgaaagaaaaaagctgcaaataacattttcaagaatataaaaaaatgagtaaccaaagggaaggttgtttggtcatttatagacaattaagcacagactgtagatgtccttccaattcttgggaggctaaactgagtctaccatttcttacatttcttttacctattttttgagaattgccagttgtacagtgtttagcatgtggaatgtaccaaatatatctatgttgtgacttaagatattctaaatgtggataacttctgacctaggaaacatgaagtttgtagtgaagtaagtgaaaagaatgttcaggaaattttttttctccatctcttcagttggcatttattgagagttttatttgaatgcttattaaaagtatatgatttataatatttagaaaatagaagaaaaaagaaaactgtagatgttttatcttgttttaatactgtatgtttagtacgtatacatttatgttctagtgtatcaaaatttttcattttcattaaagtgaatccaattttccatattctaggtccattttaaaccatgaaaactttaatcacatattttgtaaagggctgaaagtatgatttaaactacagattgatatattttaattctaaatgaaaggtaatgtaaataagcatggatctgattgaataaagattttaaaatagtaaaaatgtat

SEQ ID NO: 361899 - DNA, 3142 bp, Homo sapiens
atgtatgtagatatatgaacaccattcttcttctctagccatatttatatgaggataaagtaataaatctctgtgctagagaagaagaatggtgttcatatatgtattgtagatatacaactagttgtatctataatttgtaagtgtttatatatatattaagaacatttgaagagtaatgttaacatactgaaactttgaaatctttcacatttaaaatttcaacatatcttaattactgctcatgaaaatgtacattaagtgttaaagtaaaaaattattaaatctgtggctattaaattttaaactaatttttttcctttaaaagtaagagtcacactgacactgtctgaaatttaaagagtgaatgatttaaacttaaaaaaaattttgatctgaaaatttatttcacccagctttcacaattaagtctgtataaaatgtggtaccttttggtacctatccagagaaacctgtacatattcaatgttatctagatgtgattggataatggagaaaatttatttataatgattttgcaatggcatcaataacatttaaatgattttgaagaagtattattttactaccctataaaatgaatcgaaaataataaagttcttaacataatttactctttaaaaattacctgttcatattttgtaaacccatatttttagcacattaaaaatgaatgtttgatattacagaatattcataacaaaatggaagaattataggaattaacttgaatttggcatttttaattttgtgatttatcattttattttttcttgaaatttcaaacacaaggaaagcatagaatagcttttaaaagtagctatgccttcttccaaatgttattttattcaaaaaggtaaccaggttgtgttttaaacctgtgaaatattgtgatgcattttattactgaaagttatttaactgcctttacttgcacataaaaactctcatttacggccaggtgctgtggctcatgcctgtaatcccagcactttgggaggccaaggcgggcatatcacctgatgtcaggagttcaagaccagcatggccagcagtttggtgaaaccccatctctactaaaaatacaaaaattagcctggcgtggtggtgtgcgcctgtaatcctagctactcgggaggctgaggcaggagcattgcttgaacctgggaggtggaggttacaatgagccaagattgtgccactgcactccagcatgggtgacagagaaagactccgtctcaaaaaaaaaaaaaacaaactcttatttaatttttagttaaaattaaaacactagtacttcagaatatagatacaagtacaccatcttgaagaatttggagtttttcagggcaattcaaatgacctcattttttgttctttttgtattccagacagtgtttctgtcattggatctctgattggtagtgttaataaatattctttcagtgtgagccagattcataaaattaattttcttcattttagtagtaaaaagtagtctaatagctttttgtcagcttgatttttttgtgtgtgtaatattcaagggcagaatgacaggacagataagcaataagaaatgtatagaattagaaaatatagtagttccctcttacccatgggacatacgttccaagacccccagtgaacgtctgaaaccatggatagtatagacacctctatacactgttttttcctatacatatatacctatgataaagttctatttataaatcagggacagcaagagataaacaataactgcaaatagaacaattataacagtgcactgtaataaaagtgatgtaaatgtgatatgtctgtctctttctctcaaaatatcttattgtactgtactcacctgtaatcagactgtggttgaccgtgagtaaccgaaaccacagaaagcaaaatcgtggataaggggagactactctatatgaaacttaagttacaaaattctctgaagcatttgaaactagacgttttggaattataaaatagtccctttaaaatatccactagtagaaaaaaacttcatttgcagagaaaagattgcaataaaactcattcctaaacttttcaattttataaaattaaacattctttttttatccgtattaacaatttctagttacatagtttctagttacatattaccatatattactctttatctacaaataaatagctgatactcaaactgatcatattttgattgttaaacacttggatctctcaatacttctgtaagttaaagtgaacttaaacagtttcttgaaaaactccagtaggtggcagaatacctattgaatattcgttgctatactttgctgtttgtcattaaaacatctctacccatattcttgcaaaataatatttatattttaatggataggaaaatgatttgcaattagatgtttccattcttgaaagaaaaaagctgcaaataacattttcaagaatataaaaaaatgagtaaccaaagggaaggttgtttggtcatttatagacaattaagcacagactgtagatgtccttccaattcttgggaggctaaactgagtctaccatttcttacatttcttttacctattttttgagaattgccagttgtacagtgtttagcatgtggaatgtaccaaatatatctatgttgtgacttaagatattctaaatgtggataacttctgacctaggaaacatgaagtttgtagtgaagtaagtgaaaagaatgttcaggaaattttttttctccatctcttcagttggcatttattgagagttttatttgaatgcttattaaaagtatatgatttataatatttagaaaatagaagaaaaaagaaaactgtagatgttttatcttgttttaatactgtatgtttagtacgtatacatttatgttctagtgtatcaaaatttttcattttcattaaagtgaatccaattttccatattctaggtccattttaaaccatgaaaactttaatcacatattttgtaaagggctgaaagtatgatttaaactacagattgatatattttaattctaaatgaaaggtaatgtaaataagcatggatctgattgaataaagattttaaaatagtaaaaatgtat

SEQ ID NO: 361900 - DNA, 4006 bp, Homo sapiens
gtagatttggttgctgtgtacgtggaagaagcaagcgcatgcgcacatgggcccccttcgtctcagctgtgcgggaacggccgagggtaacatcccgggctcgcgggaggctgtcggggtaatggccacacgctgacagaaccagccgagtggaaaaggggagcgaagccgttcctctgcacccttccccaggcctgaggccttcccgcttggtgctgccgccgccactgccggctgaggaggggcgatgagttggttcaacgcctcccagctctccagcttcgctaagcaggccctgtcccaggcccagaagtctattgacagggttctggacatccaggaagaggagccgagcatctgggccgagaccattccgtatggagagccgggaataagttcccctgtcagtggaggatgggatacttcaacctgggggttgaaatcaaacactgaacctcagagtccaccaatagcctctcctaaagcaatcacaaagccagttcggaggactgtggtcgatgaatctgaaaatttcttcagtgcctttctctcgccaactgatgtccagaccattcagaagagtccagtggtatcaaaacctccagcaaaatcacaacgaccagaagaagaagtgaaaagcagcttacatgaatccttgcacattggccagtcaagaactcctgaaacaactgaatcacaagtaaaagactcttctttgtgtgtttcaggggaaactctggcagcaggtacttcatcacctaaaactgaaggcaagcacgaagaaactgttaataaagaatcggatatgaaggtgccaactgtaagtttgaaagtatctgaaagtgtaattgatgtgaaaacaactatggaaagtatatctaatacgtctacgcagtctctcacagcagaaacaaaggacatagctttggaacctaaggaacaaaaacatgaagacaggcagagcaatacaccttctcctcctgttagtaccttttcatcaggtacttctaccaccagtgatattgaagttttagatcatgaaagtgtaataagtgagagctcagcgagctcgagacaagagactacagattcaaaatcaagtcttcacttgatgcagacatcttttcagcttctctctgcatctgcttgtcctgaatataatcgtttagatgatttccaaaaactcactgagagttgctgttcatctgatgcttttgaaagaatagactcatttagtgtacagtcattagatagccggagtgtaagtgaaatcaattcagatgatgaattgtcaggcaagggatatgctttagtgcctattatagttaattcttcaactccaaagtctaaaacagttgaatctgctgaaggaaaatctgaagaagtaaatgaaacattagttatacccactgaggaagcagaaatggaagaaagtggacgaagtgcaactcctgttaactgtgaacagcctgatatcttggtttcttctacaccaataaatgaaggacagactgtgttagacaaggtggctgagcagtgtgaacctgctgaaagtcagccagaagcactttctgagaaggaagatgtttgcaagacagttgaatttctgaatgaaaagctggaaaaaagggaggctcagttattatctcttagtaaggaaaaagcacttctagaagaagcttttgataacctgaaagatgaaatgttcagagtgaaagaagaaagcagtagcatttcttccttgaaagatgagtttactcaaagaattgcagaagcagaaaagaaagttcaactagcctgcaaagagagagatgctgctaaaaaggaaatcaaaaacataaaagaagaacttgccactagattaaatagtagtgaaactgcagaccttttgaaagagaaagatgagcagatccgagggttaatggaagaaggagaaaaactttcaaaacagcagctgcacaattctaacatcatcaagaaattaagagctaaagacaaggagaatgaaaatatggttgcaaagctgaacaaaaaagttaaagagctagaagaggagttgcagcatttgaaacaggtccttgatggcaaagaagaggttgagaaacaacatagagaaaatattaaaaaactaaattccatggtagaacgccaagagaaagatcttggccgtcttcaggtagacatggatgaacttgaagaaaagaaccgaagtattcaggctgccctggatagtgcatacaaagaacttactgatcttcacaaagccaatgctgcaaaggatagtgaggcacaggaagctgctctgagccgtgaaatgaaagctaaagaagaactttctgcagcattagagaaggcccaagaagaagcccgtcagcagcaagaaacattagccattcaagtgggggaccttaggcttgcattgcagcgtacagaacaagcggctgccagaaaggaggattatttacgccatgagatcggtgaacttcagcagagactccaggaagcagagaatcgaaaccaggaactgagtcaaagtgtttcatcaacaacaagaccattgcttcgacaaatagaaaatttgcaagcaaccctgggatcccagacatcgtcgtgggagaaattagagaagaatctttctgataggcttggtgaatcccagaccttgctggcagcagcagttgagagagaacgtgcagctacagaagaactccttgctaacaaaattcagatgtcttccatggagtcacagaattctcttttaagacaggaaaacagtagatttcaagcccagctagaatcagagaaaaataggctgtgtaaactggaggatgagaacaataggtaccaggttgaattggaaaacctaaaagatgaatatgtaagaacacttgaagagacgaggaaagaaaagacattgttgaatagtcagttagaaatggaaagaatgaaagttgaacaagaaaggaagaaagccatttttactcaagaaacaataaaagaaaaggaacgcaagccattttctgtttctagcactcccaccatgtcacgctcaagttcaataagtggtgttgatatggcaggactacagacatcttttctgtctcaggatgagtctcatgatcactcatttggaccaatgcctatatcagcaaatggaagcaatctttatgatgctgtaaggatgggagcaggatcaagcataattgaaaacctacagtctcagctaaagctaagggaaggggaaatcactcatttacaggtattggaaaaattaaatttgctatagaagtaaatgaagttttgaggcctaataaatagcacccttcatttccatctgaattctgagcaaattgagaaacaagatgacatagtggcatgtgaagcccaaaatgtatcacatatatcaatgataaaggctaaaaagagaaattagctaaggataacagccaactgaacctgctaattgccagaattaggcatattcggctgatctgtcacaggaaatgctgggctggagcaggcctcccatgttttacaacctgcctacataagacataagcatctaggagcagagaatccctcctcctttcaagcagctctttcccaacagaataaagggaagtcactgagctgtgaatgcctgttcatagatagagacaaaacatttctatcacaccggcaatttcctatgtgtcccatcccaatcaatcctttcccctttgctggctccaaacaatgactctttcctatctttttagaaagattagaattgcttttctagagttccagtaatggaatcatacagtgtctaagtctgtttgtggtgctgtaacaaaatacctgagactgggtaatttataaattataggaatttatttctcacagttctggatgctgaaaagtttatgatcaaggcactagcaggtttggtgtctgagggcccagtttctaatttgaagatggtgctttaaacactgtcctcacatggtagaaggggcagatgggc

SEQ ID NO: 361901 - DNA, 4005 bp, Homo sapiens
gtagatttggttgctgtgtacgtggaagaagcaagcgcatgcgcacatgggcccccttcgtctcagctgtgcgggaacggccgagggtaacatcccgggctcgcgggaggctgtcggggtaatggccacacgctgacagaaccagccgagtggaaaaggggagcgaagccgttcctctgcacccttccccaggcctgaggccttcccgcttggtgctgccgccgccactgccggctgaggaggggcgatgagttggttcaacgcctcccagctctccagcttcgctaagcaggccctgtcccaggcccagaagtctattgacagggttctggacatccaggaagaggagccgagcatctgggccgagaccattccgtatggagagccgggaataagttcccctgtcagtggaggatgggatacttcaacctgggggttgaaatcaaacactgaacctcagagtccaccaatagcctctcctaaagcaatcacaaagccagttcggaggactgtggtcgatgaatctgaaaatttcttcagtgcctttctctcgccaactgatgtccagaccattcagaagagtccagtggtatcaaaacctccagcaaaatcacaacgaccagaagaagaagtgaaaagcagcttacatgaatccttgcacattggccagtcaagaactcctgaaacaactgaatcacaagtaaaagactcttctttgtgtgtttcaggggaaactctggcagcaggtacttcatcacctaaaactgaaggcaagcacgaagaaactgttaataaagaatcggatatgaaggtgccaactgtaagtttgaaagtatctgaaagtgtaattgatgtgaaaacaactatggaaagtatatctaatacgtctacgcagtctctcacagcagaaacaaaggacatagctttggaacctaaggaacaaaaacatgaagacaggcagagcaatacaccttctcctcctgttagtaccttttcatcaggtacttctaccaccagtgatattgaagttttagatcatgaaagtgtaataagtgagagctcagcgagctcgagacaagagactacagattcaaaatcaagtcttcacttgatgcagacatcttttcagcttctctctgcatctgcttgtcctgaatataatcgtttagatgatttccaaaaactcactgagagttgctgttcatctgatgcttttgaaagaatagactcatttagtgtacagtcattagatagccggagtgtaagtgaaatcaattcagatgatgaattgtcaggcaagggatatgctttagtgcctattatagttaattcttcaactccaaagtctaaaacagttgaatctgctgaaggaaaatctgaagaagtaaatgaaacattagttatacccactgaggaagcagaaatggaagaaagtggacgaagtgcaactcctgttaactgtgaacagcctgatatcttggtttcttctacaccaataaatgaaggacagactgtgttagacaaggtggctgagcagtgtgaacctgctgaaagtcagccagaagcactttctgagaaggaagatgtttgcaagacagttgaatttctgaatgaaaagctggaaaaaagggaggctcagttattatctcttagtaaggaaaaagcacttctagaagaagcttttgataacctgaaagatgaaatgttcagagtgaaagaagaaagcagtagcatttcttccttgaaagatgagtttactcaaagaattgcagaagcagaaaagaaagttcaactagcctgcaaagagagagatgctgctaaaaaggaaatcaaaaacataaaagaagaacttgccactagattaaatagtagtgaaactgcagaccttttgaaagagaaagatgagcagatccgagggttaatggaagaaggagaaaaactttcaaaacagcagctgcacaattctaacatcatcaagaaattaagagctaaagacaaggagaatgaaaatatggttgcaaagctgaacaaaaaagttaaagagctagaagaggagttgcagcatttgaaacaggtccttgatggcaaagaagaggttgagaaacaacatagagaaaatattaaaaaactaaattccatggtagaacgccaagagaaagatcttggccgtcttcaggtagacatggatgaacttgaagaaaagaaccgaagtattcaggctgccctggatagtgcatacaaagaacttactgatcttcacaaagccaatgctgcaaaggatagtgaggcacaggaagctgctctgagccgtgaaatgaaagctaaagaagaactttctgcagcattagagaaggcccaagaagaagcccgtcagcagcaagaaacattagccattcaagtgggggaccttaggcttgcattgcagcgtacagaacaagcggctgccagaaaggaggattatttacgccatgagatcggtgaacttcagcagagactccaggaagcagagaatcgaaaccaggaactgagtcaaagtgtttcatcaacaacaagaccattgcttcgacaaatagaaaatttgcaagcaaccctgggatcccagacatcgtcgtgggagaaattagagaagaatctttctgataggcttggtgaatcccagaccttgctggcagcagcagttgagagagaacgtgcagctacagaagaactccttgctaacaaaattcagatgtcttccatggagtcacagaattctcttttaagacaggaaaacagtagatttcaagcccagctagaatcagagaaaaataggctgtgtaaactggaggatgagaacaataggtaccaggttgaattggaaaacctaaaagatgaatatgtaagaacacttgaagagacgaggaaagaaaagacattgttgaatagtcagttagaaatggaaagaatgaaagttgaacaagaaaggaagaaagccatttttactcaagaaacaataaaagaaaaggaacgcaagccattttctgtttctagcactcccaccatgtcacgctcaagttcaataagtggtgttgatatggcaggactacagacatcttttctgtctcaggatgagtctcatgatcactcatttggaccaatgcctatatcagcaaatggaagcaatctttatgatgctgtaaggatgggagcaggatcaagcataattgaaaacctacagtctcagctaaagctaagggaaggggaaatcactcatttacaggtattggaaaaattaaatttgctatagaagtaaatgaagttttgaggcctaataaatagcacccttcatttccatctgaattctgagcaaattgagaaacaagatgacatagtggcatgtgaagcccaaaatgtatcacatatatcaatgataaaggctaaaaagagaaattagctaaggataacagccaactgaacctgctaattgccagaattaggcatattcggctgatctgtcacaggaaatgctgggctggagcaggcctcccatgttttacaacctgcctacataagacataagcatctaggagcagagaatccctcctcctttcaagcagctctttcccaacagaataaagggaagtcactgagctgtgaatgcctgttctattcagatttacctcttagataagttgttccagctaccccgggaaggaggggtaaaggggatgagatgtttgaactgtaacaccctgtacatgggaggaaacaacatgagttgttgatggagcatccttccatcttacctttttggccttcccccaacctcaggcagtccagatcatggatatggtagacaggttcattcattccagttgagtgatgtaaagggcccagtaatcaggaatttggagtgttggccaccagctcaaaggcagtgggataatgcgctgggcggagtcccgagtttcgcatgcccggccagtgagtccataaggcatttttacccatatcttaggccaaaag

SEQ ID NO: 361902 - DNA, 2068 bp, Homo sapiens
ttgttgagacggagtctcactccgtcgcccaggctggagtgcagtggcgcgatctcggctcactgtaatcctagctactcgggaggctgaggcaggagcattgcttgaacctgggaggtggaggttacaatgagccaagattgtgccactgcactccagcatgggtgacagagaaagactccgtctcaaaaaaaaaaaaaacaaactcttatttaatttttagttaaaattaaaacactagtacttcagaatatagatacaagtacaccatcttgaagaatttggagtttttcagggcaattcaaatgacctcattttttgttctttttgtattccagacagtgtttctgtcattggatctctgattggtagtgttaataaatattctttcagtgtgagccagattcataaaattaattttcttcattttagtagtaaaaagtagtctaatagctttttgtcagcttgatttttttgtgtgtgtaatattcaagggcagaatgacaggacagataagcaataagaaatgtatagaattagaaaatatagtagttccctcttacccatgggacatacgttccaagacccccagtgaacgtctgaaaccatggatagtatagacacctctatacactgttttttcctatacatatatacctatgataaagttctatttataaatcagggacagcaagagataaacaataactgcaaatagaacaattataacagtgcactgtaataaaagtgatgtaaatgtgatatgtctgtctctttctctcaaaatatcttattgtactgtactcacctgtaatcagactgtggttgaccgtgagtaaccgaaaccacagaaagcaaaatcgtggataaggggagactactctatatgaaacttaagttacaaaattctctgaagcatttgaaactagacgttttggaattataaaatagtccctttaaaatatccactagtagaaaaaaacttcatttgcagagaaaagattgcaataaaactcattcctaaacttttcaattttataaaattaaacattctttttttatccgtattaacaatttctagttacatagtttctagttacatattaccatatattactctttatctacaaataaatagctgatactcaaactgatcatattttgattgttaaacacttggatctctcaatacttctgtaagttaaagtgaacttaaacagtttcttgaaaaactccagtaggtggcagaatacctattgaatattcgttgctatactttgctgtttgtcattaaaacatctctacccatattcttgcaaaataatatttatattttaatggataggaaaatgatttgcaattagatgtttccattcttgaaagaaaaaagctgcaaataacattttcaagaatataaaaaaatgagtaaccaaagggaaggttgtttggtcatttatagacaattaagcacagactgtagatgtccttccaattcttgggaggctaaactgagtctaccatttcttacatttcttttacctattttttgagaattgccagttgtacagtgtttagcatgtggaatgtaccaaatatatctatgttgtgacttaagatattctaaatgtggataacttctgacctaggaaacatgaagtttgtagtgaagtaagtgaaaagaatgttcaggaaattttttttctccatctcttcagttggcatttattgagagttttatttgaatgcttattaaaagtatatgatttataatatttagaaaatagaagaaaaaagaaaactgtagatgttttatcttgttttaatactgtatgtttagtacgtatacatttatgttctagtgtatcaaaatttttcattttcattaaagtgaatccaattttccatattctaggtccattttaaaccatgaaaactttaatcacatattttgtaaagggctgaaagtatgatttaaactacagattgatatattttaattctaaatgaaaggtaatgtaaataagcatggatctgattgaataaagattttaaaatagtaaaaatgtat

SEQ ID NO: 361903 - DNA, 2072 bp, Homo sapiens
gtagatttggttgctgtgtacgtggaagaagcaagcgcatgcgcacatgggcccccttcgtctcagctgtgcgggaacggccgagggtaacatcccgggctcgcgggaggctgtcggggtaatggccacacgctgacagaaccagccgagtggaaaaggggagcgaagccgttcctctgcacccttccccaggcctgaggccttcccgcttggtgctgccgccgccactgccggctgaggaggggcgatgagttggttcaacgcctcccagctctccagcttcgctaagcaggccctgtcccaggcccagaagtctattgacagggttctggacatccaggaagaggagccgagcatctgggccgagaccattccgtatggagagccgggaataagttcccctgtcagtggaggatgggatacttcaacctgggggttgaaatcaaacactgaacctcagagtccaccaatagcctctcctaaagcaatcacaaagccagttcggaggactgtggtcgatgaatctgaaaatttcttcagtgcctttctctcgccaactgatgtccagaccattcagaagagtccagtggtatcaaaacctccagcaaaatcacaacgaccagaagaagaagtgaaaagcagcttacatgaatccttgcacattggccagtcaagaactcctgaaacaactgaatcacaagtaaaagactcttctttgtgtgtttcaggggaaactctggcagcaggtacttcatcacctaaaactgaaggcaagcacgaagaaactgttaataaagaatcggatatgaaggtgccaactgtaagtttgaaagtatctgaaagtgtaattgatgtgaaaacaactatggaaagtatatctaatacgtctacgcagtctctcacagcagaaacaaaggacatagctttggaacctaaggaacaaaaacatgaagacaggcagagcaatacaccttctcctcctgttagtaccttttcatcaggtacttctaccaccagtgatattgaagttttagatcatgaaagtgtaataagtgagagctcagcgagctcgagacaagagactacagattcaaaatcaagtcttcacttgatgcagacatcttttcagcttctctctgcatctgcttgtcctgaatataatcgtttagatgatttccaaaaactcactgagagttgctgttcatctgatgcttttgaaagaatagactcatttagtgtacagtcattagatagccggagtgtaagtgaaatcaattcagatgatgaattgtcaggcaagggatatgctttagtgcctattatagttaattcttcaactccaaagtctaaaacagttgaatctgctgaaggaaaatctgaagaagtaaatgaaacattagttatacccactgaggaagcagaaatggaagaaagtggacgaagtgcaactcctgttaactgtgaacagcctgatatcttggtttcttctacaccaataaatgaaggacagactgtgttagacaaggtggctgagcagtgtgaacctgctgaaagtcagccagaagcactttctgagaaggaagatgtttgcaaggtaactctagtaagtggaagggatttttagatgtgctttttggagattaaatcatttgttttaaaaaatactttcattgatgcataataatttatacagatttaaaaacatacgcattttgccatttctgtgtagcattaagtaccttgaagttgaacaattattaatataatttggaatttctccaaggcaattatggtagaataagttgatacttcaatacagttaagcatgaaagttttcatcttacatctttatttttgagtccttatcacttcaaaattctgttatgcttattagtatgtcaatttgaaaggaatattttcttacattaacatgtatcttcacctcctttgcagatagatgtgccaaaaaaactaaatgttatggtttttcttgtatcagaatttgtttttacatgtttacattatttgtagcaaatattaaatgataatttaagattttaattattggtgct

SEQ ID NO: 361904 - DNA, 218 bp, Homo sapiens
tactgatcttcacaaagccaatgctgcaaaggatagtgaggcacaggaagctgctctgagccgtgaaatgaaagctaaagaagaactttctgcagcattagagaaggcccaagaagaagcccgtcagcagcaagaaacattagccattcaagtaagcaatggatgatgaattagagtagttttaaaaatatttgtttatgcttctacaaattaaacaa

SEQ ID NO: 361905 - DNA, 427 bp, Homo sapiens
aaagagtgataaagcaggtataagttaagattggttcatttgtctcagtagacagtcctgccttaggcaataaatagttatcagttttaagtgtggctacttgcatcattaaatgtttgaaatcagaattgacttggtattttggtctctgggctgtatgtgtatgtgatttttttttctgtcctgtaatcaggtgaatcccagaccttgctggcagcagcagttgagagagaacgtgcagctacagaagaactccttgctaacaaaattcagatgtcttccatggagtcacagaattctcttttaagacaggaaaacagtagatttcaagcccagctagaatcagagaaaaataggctgtgtaaactggaggatgagaacaataggtgagcatggtttctgagtgatatttttggtagttccgtga

SEQ ID NO: 361906 - DNA, 6525 bp, Homo sapiens
gtagatttggttgctgtgtacgtggaagaagcaagcgcatgcgcacatgggcccccttcgtctcagctgtgcgggaacggccgagggtaacatcccgggctcgcgggaggctgtcggggtaatggccacacgctgacagaaccagccgagtggaaaaggggagcgaagccgttcctctgcacccttccccaggcctgaggccttcccgcttggtgctgccgccgccactgccggctgaggaggggcgatgagttggttcaacgcctcccagctctccagcttcgctaagcaggccctgtcccaggcccagaagtctattgacagggttctggacatccaggaagaggagccgagcatctgggccgagaccattccgtatggagagccgggaataagttcccctgtcagtggaggatgggatacttcaacctgggggttgaaatcaaacactgaacctcagagtccaccaatagcctctcctaaagcaatcacaaagccagttcggaggactgtggtcgatgaatctgaaaatttcttcagtgcctttctctcgccaactgatgtccagaccattcagaagagtccagtggtatcaaaacctccagcaaaatcacaacgaccagaagaagaagtgaaaagcagcttacatgaatccttgcacattggccagtcaagaactcctgaaacaactgaatcacaagtaaaagactcttctttgtgtgtttcaggggaaactctggcagcaggtacttcatcacctaaaactgaaggcaagcacgaagaaactgttaataaagaatcggatatgaaggtgccaactgtaagtttgaaagtatctgaaagtgtaattgatgtgaaaacaactatggaaagtatatctaatacgtctacgcagtctctcacagcagaaacaaaggacatagctttggaacctaaggaacaaaaacatgaagacaggcagagcaatacaccttctcctcctgttagtaccttttcatcaggtacttctaccaccagtgatattgaagttttagatcatgaaagtgtaataagtgagagctcagcgagctcgagacaagagactacagattcaaaatcaagtcttcacttgatgcagacatcttttcagcttctctctgcatctgcttgtcctgaatataatcgtttagatgatttccaaaaactcactgagagttgctgttcatctgatgcttttgaaagaatagactcatttagtgtacagtcattagatagccggagtgtaagtgaaatcaattcagatgatgaattgtcaggcaagggatatgctttagtgcctattatagttaattcttcaactccaaagtctaaaacagttgaatctgctgaaggaaaatctgaagaagtaaatgaaacattagttatacccactgaggaagcagaaatggaagaaagtggacgaagtgcaactcctgttaactgtgaacagcctgatatcttggtttcttctacaccaataaatgaaggacagactgtgttagacaaggtggctgagcagtgtgaacctgctgaaagtcagccagaagcactttctgagaaggaagatgtttgcaagacagttgaatttctgaatgaaaagctggaaaaaagggaggctcagttattatctcttagtaaggaaaaagcacttctagaagaagcttttgataacctgaaagatgaaatgttcagagtgaaagaagaaagcagtagcatttcttccttgaaagatgagtttactcaaagaattgcagaagcagaaaagaaagttcaactagcctgcaaagagagagatgctgctaaaaaggaaatcaaaaacataaaagaagaacttgccactagattaaatagtagtgaaactgcagaccttttgaaagagaaagatgagcagatccgagggttaatggaagaaggagaaaaactttcaaaacagcagctgcacaattctaacatcatcaagaaattaagagctaaagacaaggagaatgaaaatatggttgcaaagctgaacaaaaaagttaaagagctagaagaggagttgcagcatttgaaacaggtccttgatggcaaagaagaggttgagaaacaacatagagaaaatattaaaaaactaaattccatggtagaacgccaagagaaagatcttggccgtcttcaggtagacatggatgaacttgaagaaaagaaccgaagtattcaggctgccctggatagtgcatacaaagaacttactgatcttcacaaagccaatgctgcaaaggatagtgaggcacaggaagctgctctgagccgtgaaatgaaagctaaagaagaactttctgcagcattagagaaggcccaagaagaagcccgtcagcagcaagaaacattagccattcaagtgggggaccttaggcttgcattgcagcgtacagaacaagcggctgccagaaaggaggattatttacgccatgagatcggtgaacttcagcagagactccaggaagcagagaatcgaaaccaggaactgagtcaaagtgtttcatcaacaacaagaccattgcttcgacaaatagaaaatttgcaagcaaccctgggatcccagacatcgtcgtgggagaaattagagaagaatctttctgataggcttggtgaatcccagaccttgctggcagcagcagttgagagagaacgtgcagctacagaagaactccttgctaacaaaattcagatgtcttccatggagtcacagaattctcttttaagacaggaaaacagtagatttcaagcccagctagaatcagagaaaaataggctgtgtaaactggaggatgagaacaataggtaccaggttgaattggaaaacctaaaagatgaatatgtaagaacacttgaagagacgaggaaagaaaagacattgttgaatagtcagttagaaatggaaagaatgaaagttgaacaagaaaggaagaaagccatttttactcaagaaacaataaaagaaaaggaacgcaagccattttctgtttctagcactcccaccatgtcacgctcaagttcaataagtggtgttgatatggcaggactacagacatcttttctgtctcaggatgagtctcatgatcactcatttggaccaatgcctatatcagcaaatggaagcaatctttatgatgctgtaaggatgggagcaggatcaagcataattgaaaacctacagtctcagctaaagctaagggaaggggaaatcactcatttacagctagaaattggcaatctagaaaaaactcgatcaataatggctgaagaactagttaaattaacaaatcaaaatgatgaacttgaagagaaggtgaaggagatacccaaacttagaactcagctaagagatttggatcaaaggtacaacactattctgcagatgtatggagaaaaagcagaagaggcagaagaacttcgattagatctcgaagatgtaaaaaatatgtacaaaactcaaatagatgaacttttaagacaaagtctcagttaacttgtgaaaattgaattcccatcaaactgaatgtaagcatttaatatctaaacatttaatgtggacttccaataaattcttttatagaattagaaagtgggatttactgtagagtgtaaaaatttttttaaaattgttttacactatgtagtaatatttacagttaaattattttgtgcaatatttgaactttatttttgaaactattctttaaagatttattttttaaagcattcattttttttccttgaatagcacagagatttattactttatcctcatataaatatggctagagaagaagaatggtgttcatatatgtattgtagatatacaactagttgtatctataatttgtaagtgtttatatatatattaagaacatttgaagagtaatgttaacatactgaaactttgaaatctttcacatttaaaatttcaacatatcttaattactgctcatgaaaatgtacattaagtgttaaagtaaaaaattattaaatctgtggctattaaattttaaactaatttttttcctttaaaagtaagagtcacactgacactgtctgaaatttaaagagtgaatgatttaaacttaaaaaaaattttgatctgaaaatttatttcacccagctttcacaattaagtctgtataaaatgtggtaccttttggtacctatccagagaaacctgtacatattcaatgttatctagatgtgattggataatggagaaaatttatttataatgattttgcaatggcatcaataacatttaaatgattttgaagaagtattattttactaccctataaaatgaatcgaaaataataaagttcttaacataatttactctttaaaaattacctgttcatattttgtaaacccatatttttagcacattaaaaatgaatgtttgatattacagaatattcataacaaaatggaagaattataggaattaacttgaatttggcatttttaattttgtgatttatcattttattttttcttgaaatttcaaacacaaggaaagcatagaatagcttttaaaagtagctatgccttcttccaaatgttattttattcaaaaaggtaaccaggttgtgttttaaacctgtgaaatattgtgatgcattttattactgaaagttatttaactgcctttacttgcacataaaaactctcatttacggccaggtgctgtggctcatgcctgtaatcccagcactttgggaggccaaggcgggcatatcacctgatgtcaggagttcaagaccagcatggccagcagtttggtgaaaccccatctctactaaaaatacaaaaattagcctggcgtggtggtgtgcgcctgtaatcctagctactcgggaggctgaggcaggagcattgcttgaacctgggaggtggaggttacaatgagccaagattgtgccactgcactccagcatgggtgacagagaaagactccgtctcaaaaaaaaaaaaaacaaactcttatttaatttttagttaaaattaaaacactagtacttcagaatatagatacaagtacaccatcttgaagaatttggagtttttcagggcaattcaaatgacctcattttttgttctttttgtattccagacagtgtttctgtcattggatctctgattggtagtgttaataaatattctttcagtgtgagccagattcataaaattaattttcttcattttagtagtaaaaagtagtctaatagctttttgtcagcttgatttttttgtgtgtgtaatattcaagggcagaatgacaggacagataagcaataagaaatgtatagaattagaaaatatagtagttccctcttacccatgggacatacgttccaagacccccagtgaacgtctgaaaccatggatagtatagacacctctatacactgttttttcctatacatatatacctatgataaagttctatttataaatcagggacagcaagagataaacaataactgcaaatagaacaattataacagtgcactgtaataaaagtgatgtaaatgtgatatgtctgtctctttctctcaaaatatcttattgtactgtactcacctgtaatcagactgtggttgaccgtgagtaaccgaaaccacagaaagcaaaatcgtggataaggggagactactctatatgaaacttaagttacaaaattctctgaagcatttgaaactagacgttttggaattataaaatagtccctttaaaatatccactagtagaaaaaaacttcatttgcagagaaaagattgcaataaaactcattcctaaacttttcaattttataaaattaaacattctttttttatccgtattaacaatttctagttacatagtttctagttacatattaccatatattactctttatctacaaataaatagctgatactcaaactgatcatattttgattgttaaacacttggatctctcaatacttctgtaagttaaagtgaacttaaacagtttcttgaaaaactccagtaggtggcagaatacctattgaatattcgttgctatactttgctgtttgtcattaaaacatctctacccatattcttgcaaaataatatttatattttaatggataggaaaatgatttgcaattagatgtttccattcttgaaagaaaaaagctgcaaataacattttcaagaatataaaaaaatgagtaaccaaagggaaggttgtttggtcatttatagacaattaagcacagactgtagatgtccttccaattcttgggaggctaaactgagtctaccatttcttacatttcttttacctattttttgagaattgccagttgtacagtgtttagcatgtggaatgtaccaaatatatagtgaagtaagtgaaaagaatgttcaggaaattttttttctccaaacaggatcctcaagctgctgccatgaactaaggaactattagagctcatgcgatccttgctg

SEQ ID NO: 361907 - DNA, 6668 bp, Homo sapiens
cattccaaggagctgcggatgaagctggagaagctttagagatgagcgtggatggaagccaagcggaagatctccagcctgtccttcaccctggaggaggaagaatagggaggcgtggaggaagaggagccgagcatctgggccgagaccattccgtatggagagccgggaataagttcccctgtcagtggaggatgggatacttcaacctgggggttgaaatcaaacactgaacctcagagtccaccaatagcctctcctaaagcaatcacaaagccagttcggaggactgtggtcgatgaatctgaaaatttcttcagtgcctttctctcgccaactgatgtccagaccattcagaagagtccagtggtatcaaaacctccagcaaaatcacaacgaccagaagaagaagtgaaaagcagcttacatgaatccttgcacattggccagtcaagaactcctgaaacaactgaatcacaagtaaaagactcttctttgtgtgtttcaggggaaactctggcagcaggtacttcatcacctaaaactgaaggcaagcacgaagaaactgttaataaagaatcggatatgaaggtgccaactgtaagtttgaaagtatctgaaagtgtaattgatgtgaaaacaactatggaaagtatatctaatacgtctacgcagtctctcacagcagaaacaaaggacatagctttggaacctaaggaacaaaaacatgaagacaggcagagcaatacaccttctcctcctgttagtaccttttcatcaggtacttctaccaccagtgatattgaagttttagatcatgaaagtgtaataagtgagagctcagcgagctcgagacaagagactacagattcaaaatcaagtcttcacttgatgcagacatcttttcagcttctctctgcatctgcttgtcctgaatataatcgtttagatgatttccaaaaactcactgagagttgctgttcatctgatgcttttgaaagaatagactcatttagtgtacagtcattagatagccggagtgtaagtgaaatcaattcagatgatgaattgtcaggcaagggatatgctttagtgcctattatagttaattcttcaactccaaagtctaaaacagttgaatctgctgaaggaaaatctgaagaagtaaatgaaacattagttatacccactgaggaagcagaaatggaagaaagtggacgaagtgcaactcctgttaactgtgaacagcctgatatcttggtttcttctacaccaataaatgaaggacagactgtgttagacaaggtggctgagcagtgtgaacctgctgaaagtcagccagaagcactttctgagaaggaagatgtttgcaagacagttgaatttctgaatgaaaagctggaaaaaagggaggctcagttattatctcttagtaaggaaaaagcacttctagaagaagcttttgataacctgaaagatgaaatgttcagagtgaaagaagaaagcagtagcatttcttccttgaaagatgagtttactcaaagaattgcagaagcagaaaagaaagttcaactagcctgcaaagagagagatgctgctaaaaaggaaatcaaaaacataaaagaagaacttgccactagattaaatagtagtgaaactgcagaccttttgaaagagaaagatgagcagatccgagggttaatggaagaaggagaaaaactttcaaaacagcagctgcacaattctaacatcatcaagaaattaagagctaaagacaaggagaatgaaaatatggttgcaaagctgaacaaaaaagttaaagagctagaagaggagttgcagcatttgaaacaggtccttgatggcaaagaagaggttgagaaacaacatagagaaaatattaaaaaactaaattccatggtagaacgccaagagaaagatcttggccgtcttcaggtagacatggatgaacttgaagaaaagaaccgaagtattcaggctgccctggatagtgcatacaaagaacttactgatcttcacaaagccaatgctgcaaaggatagtgaggcacaggaagctgctctgagccgtgaaatgaaagctaaagaagaactttctgcagcattagagaaggcccaagaagaagcccgtcagcagcaagaaacattagccattcaagtgggggaccttaggcttgcattgcagcgtacagaacaagcggctgccagaaaggaggattatttacgccatgagatcggtgaacttcagcagagactccaggaagcagagaatcgaaaccaggaactgagtcaaagtgtttcatcaacaacaagaccattgcttcgacaaatagaaaatttgcaagcaaccctgggatcccagacatcgtcgtgggagaaattagagaagaatctttctgataggcttggtgaatcccagaccttgctggcagcagcagttgagagagaacgtgcagctacagaagaactccttgctaacaaaattcagatgtcttccatggagtcacagaattctcttttaagacaggaaaacagtagatttcaagcccagctagaatcagagaaaaataggctgtgtaaactggaggatgagaacaataggtaccaggttgaattggaaaacctaaaagatgaatatgtaagaacacttgaagagacgaggaaagaaaagacattgttgaatagtcagttagaaatggaaagaatgaaagttgaacaagaaaggaagaaagccatttttactcaagaaacaataaaagaaaaggaacgcaagccattttctgtttctagcactcccaccatgtcacgctcaagttcaataagtggtgttgatatggcaggactacagacatcttttctgtctcaggatgagtctcatgatcactcatttggaccaatgcctatatcagcaaatggaagcaatctttatgatgctgtaaggatgggagcaggatcaagcataattgaaaacctacagtctcagctaaagctaagggaaggggaaatcactcatttacagctagaaattggcaatctagaaaaaactcgatcaataatggctgaagaactagttaaattaacaaatcaaaatgatgaacttgaagagaaggtgaaggagatacccaaacttagaactcagctaagagatttggatcaaaggtacaacactattctgcagatgtatggagaaaaagcagaagaggcagaagaacttcgattagatctcgaagatgtaaaaaatatgtacaaaactcaaatagatgaacttttaagacaaagtctcagttaacttgtgaaaattgaattcccatcaaactgaatgtaagcatttaatatctaaacatttaatgtggacttccaataaattcttttatagaattagaaagtgggatttactgtagagtgtaaaaatttttttaaaattgttttacactatgtagtaatatttacagttaaattattttgtgcaatatttgaactttatttttgaaactattctttaaagatttattttttaaagcattcattttttttccttgaatagcacagagatttattactttatcctcatataaatatggctagagaagaagaatggtgttcatatatgtattgtagatatacaactagttgtatctataatttgtaagtgtttatatatatattaagaacatttgaagagtaatgttaacatactgaaactttgaaatctttcacatttaaaatttcaacatatcttaattactgctcatgaaaatgtacattaagtgttaaagtaaaaaattattaaatctgtggctattaaattttaaactaatttttttcctttaaaagtaagagtcacactgacactgtctgaaatttaaagagtgaatgatttaaacttaaaaaaaattttgatctgaaaatttatttcacccagctttcacaattaagtctgtataaaatgtggtaccttttggtacctatccagagaaacctgtacatattcaatgttatctagatgtgattggataatggagaaaatttatttataatgattttgcaatggcatcaataacatttaaatgattttgaagaagtattattttactaccctataaaatgaatcgaaaataataaagttcttaacataatttactctttaaaaattacctgttcatattttgtaaacccatatttttagcacattaaaaatgaatgtttgatattacagaatattcataacaaaatggaagaattataggaattaacttgaatttggcatttttaattttgtgatttatcattttattttttcttgaaatttcaaacacaaggaaagcatagaatagcttttaaaagtagctatgccttcttccaaatgttattttattcaaaaaggtaaccaggttgtgttttaaacctgtgaaatattgtgatgcattttattactgaaagttatttaactgcctttacttgcacataaaaactctcatttacggccaggtgctgtggctcatgcctgtaatcccagcactttgggaggccaaggcgggcatatcacctgatgtcaggagttcaagaccagcatggccagcagtttggtgaaaccccatctctactaaaaatacaaaaattagcctggcgtggtggtgtgcgcctgtaatcctagctactcgggaggctgaggcaggagcattgcttgaacctgggaggtggaggttacaatgagccaagattgtgccactgcactccagcatgggtgacagagaaagactccgtctcaaaaaaaaaaaaaacaaactcttatttaatttttagttaaaattaaaacactagtacttcagaatatagatacaagtacaccatcttgaagaatttggagtttttcagggcaattcaaatgacctcattttttgttctttttgtattccagacagtgtttctgtcattggatctctgattggtagtgttaataaatattctttcagtgtgagccagattcataaaattaattttcttcattttagtagtaaaaagtagtctaatagctttttgtcagcttgatttttttgtgtgtgtaatattcaagggcagaatgacaggacagataagcaataagaaatgtatagaattagaaaatatagtagttccctcttacccatgggacatacgttccaagacccccagtgaacgtctgaaaccatggatagtatagacacctctatacactgttttttcctatacatatatacctatgataaagttctatttataaatcagggacagcaagagataaacaataactgcaaatagaacaattataacagtgcactgtaataaaagtgatgtaaatgtgatatgtctgtctctttctctcaaaatatcttattgtactgtactcacctgtaatcagactgtggttgaccgtgagtaaccgaaaccacagaaagcaaaatcgtggataaggggagactactctatatgaaacttaagttacaaaattctctgaagcatttgaaactagacgttttggaattataaaatagtccctttaaaatatccactagtagaaaaaaacttcatttgcagagaaaagattgcaataaaactcattcctaaacttttcaattttataaaattaaacattctttttttatccgtattaacaatttctagttacatagtttctagttacatattaccatatattactctttatctacaaataaatagctgatactcaaactgatcatattttgattgttaaacacttggatctctcaatacttctgtaagttaaagtgaacttaaacagtttcttgaaaaactccagtaggtggcagaatacctattgaatattcgttgctatactttgctgtttgtcattaaaacatctctacccatattcttgcaaaataatatttatattttaatggataggaaaatgatttgcaattagatgtttccattcttgaaagaaaaaagctgcaaataacattttcaagaatataaaaaaatgagtaaccaaagggaaggttgtttggtcatttatagacaattaagcacagactgtagatgtccttccaattcttgggaggctaaactgagtctaccatttcttacatttcttttacctattttttgagaattgccagttgtacagtgtttagcatgtggaatgtaccaaatatatctatgttgtgacttaagatattctaaatgtggataacttctgacctaggaaacatgaagtttgtagtgaagtaagtgaaaagaatgttcaggaaattttttttctccatctcttcagttggcatttattgagagttttatttgaatgcttattaaaagtatatgatttataatatttagaaaatagaagaaaaaagaaaactgtagatgttttatcttgttttaatactgtatgtttagtacgtatacatttatgttctagtgtatcaaaatttttcattttcattaaagtgaatccaattttccatattctaggtccattttaaaccatgaaaactttaatcacatattttgtaaagggctgaaagtatgatttaaactacagattgatatattttaattctaaatgaaaggtaatgtaaataagcatggatctgattgaataaagattttaaaatagtaaaaatgtat

SEQ ID NO: 361908 - DNA, 3998 bp, Homo sapiens
gtagatttggttgctgtgtacgtggaagaagcaagcgcatgcgcacatgggcccccttcgtctcagctgtgcgggaacggccgagggtaacatcccgggctcgcgggaggctgtcggggtaatggccacacgctgacagaaccagccgagtggaaaaggggagcgaagccgttcctctgcacccttccccaggcctgaggccttcccgcttggtgctgccgccgccactgccggctgaggaggggcgatgagttggttcaacgcctcccagctctccagcttcgctaagcaggccctgtcccaggcccagaagtctattgacagggttctggacatccaggaagaggagccgagcatctgggccgagaccattccgtatggagagccgggaataagttcccctgtcagtggaggatgggatacttcaacctgggggttgaaatcaaacactgaacctcagagtccaccaatagcctctcctaaagcaatcacaaagccagttcggaggactgtggtcgatgaatctgaaaatttcttcagtgcctttctctcgccaactgatgtccagaccattcagaagagtccagtggtatcaaaacctccagcaaaatcacaacgaccagaagaagaagtgaaaagcagcttacatgaatccttgcacattggccagtcaagaactcctgaaacaactgaatcacaagtaaaagactcttctttgtgtgtttcaggggaaactctggcagcaggtacttcatcacctaaaactgaaggcaagcacgaagaaactgttaataaagaatcggatatgaaggtgccaactgtaagtttgaaagtatctgaaagtgtaattgatgtgaaaacaactatggaaagtatatctaatacgtctacgcagtctctcacagcagaaacaaaggacatagctttggaacctaaggaacaaaaacatgaagacaggcagagcaatacaccttctcctcctgttagtaccttttcatcaggtacttctaccaccagtgatattgaagttttagatcatgaaagtgtaataagtgagagctcagcgagctcgagacaagagactacagattcaaaatcaagtcttcacttgatgcagacatcttttcagcttctctctgcatctgcttgtcctgaatataatcgtttagatgatttccaaaaactcactgagagttgctgttcatctgatgcttttgaaagaatagactcatttagtgtacagtcattagatagccggagtgtaagtgaaatcaattcagatgatgaattgtcaggcaagggatatgctttagtgcctattatagttaattcttcaactccaaagtctaaaacagttgaatctgctgaaggaaaatctgaagaagtaaatgaaacattagttatacccactgaggaagcagaaatggaagaaagtggacgaagtgcaactcctgttaactgtgaacagcctgatatcttggtttcttctacaccaataaatgaaggacagactgtgttagacaaggtggctgagcagtgtgaacctgctgaaagtcagccagaagcactttctgagaaggaagatgtttgcaagacagttgaatttctgaatgaaaagctggaaaaaagggaggctcagttattatctcttagtaaggaaaaagcacttctagaagaagcttttgataacctgaaagatgaaatgttcagagtgaaagaagaaagcagtagcatttcttccttgaaagatgagtttactcaaagaattgcagaagcagaaaagaaagttcaactagcctgcaaagagagagatgctgctaaaaaggaaatcaaaaacataaaagaagaacttgccactagattaaatagtagtgaaactgcagaccttttgaaagagaaagatgagcagatccgagggttaatggaagaaggagaaaaactttcaaaacagcagctgcacaattctaacatcatcaagaaattaagagctaaagacaaggagaatgaaaatatggttgcaaagctgaacaaaaaagttaaagagctagaagaggagttgcagcatttgaaacaggtccttgatggcaaagaagaggttgagaaacaacatagagaaaatattaaaaaactaaattccatggtagaacgccaagagaaagatcttggccgtcttcaggtagacatggatgaacttgaagaaaagaaccgaagtattcaggctgccctggatagtgcatacaaagaacttactgatcttcacaaagccaatgctgcaaaggatagtgaggcacaggaagctgctctgagccgtgaaatgaaagctaaagaagaactttctgcagcattagagaaggcccaagaagaagcccgtcagcagcaagaaacattagccattcaagtgggggaccttaggcttgcattgcagcgtacagaacaagcggctgccagaaaggaggattatttacgccatgagatcggtgaacttcagcagagactccaggaagcagagaatcgaaaccaggaactgagtcaaagtgtttcatcaacaacaagaccattgcttcgacaaatagaaaatttgcaagcaaccctgggatcccagacatcgtcgtgggagaaattagagaagaatctttctgataggcttggtgaatcccagaccttgctggcagcagcagttgagagagaacgtgcagctacagaagaactccttgctaacaaaattcagatgtcttccatggagtcacagaattctcttttaagacaggaaaacagtagatttcaagcccagctagaatcagagaaaaataggctgtgtaaactggaggatgagaacaataggtaccaggttgaattggaaaacctaaaagatgaatatgtaagaacacttgaagagacgaggaaagaaaagacattgttgaatagtcagttagaaatggaaagaatgaaagttgaacaagaaaggaagaaagccatttttactcaagaaacaataaaagaaaaggaacgcaagccattttctgtttctagcactcccaccatgtcacgctcaagttcaataagtggtgttgatatggcaggactacagacatcttttctgtctcaggatgagtctcatgatcactcatttggaccaatgcctatatcagcaaatggaagcaatctttatgatgctgtaaggatgggagcaggatcaagcataattgaaaacctacagtctcagctaaagctaagggaaggggaaatcactcatttacaggtattggaaaaattaaatttgctatagaagtaaatgaagttttgaggcctaataaatagcacccttcatttccatctgaattctgagcaaattgagaaacaagatgacatagtggcatgtgaagcccaaaatgtatcacatatatcaatgataaaggctaaaaagagaaattagctaaggataacagccaactgaacctgctaattgccagaattaggcatattcggctgatctgtcacaggaaatgctgggctggagcaggcctcccatgttttacaacctgcctacataagacataagcatctaggagcagagaatccctcctcctttcaagcagctctttcccaacagaataaagggaagtcactgagctgtgaatgcctgttctattcagatttacctcttagataagttgttccagctaccccgggaaggaggggtaaaggggatgagatgtttgaactgtaacaccctgtacatgggaggaaacaacatgagttgttgatggagcatccttccatcttacctttttggcttttaaaaaactttatgcagtcagaaatattgaaatgttttacaggtttgagcatcccagctctgaaatctgaaatgcccccaaatccaaaactttgagtgctgacatgctgctcaaaggaaaagctcaattgagcattttggatttccagatttgggatgctcaaccagtaagtacataatgcaattattccataatctgaaa

SEQ ID NO: 361909 - DNA, 3373 bp, Homo sapiens
gtagatttggttgctgtgtacgtggaagaagcaagcgcatgcgcacatgggcccccttcgtctcagctgtgcgggaacggccgagggtaacatcccgggctcgcgggaggctgtcggggtaatggccacacgctgacagaaccagccgagtggaaaaggggagcgaagccgttcctctgcacccttccccaggcctgaggccttcccgcttggtgctgccgccgccactgccggctgaggaggggcgatgagttggttcaacgcctcccagctctccagcttcgctaagcaggccctgtcccaggcccagaagtctattgacagggttctggacatccaggaagaggagccgagcatctgggccgagaccattccgtatggagagccgggaataagttcccctgtcagtggaggatgggatacttcaacctgggggttgaaatcaaacactgaacctcagagtccaccaatagcctctcctaaagcaatcacaaagccagttcggaggactgtggtcgatgaatctgaaaatttcttcagtgcctttctctcgccaactgatgtccagaccattcagaagagtccagtggtatcaaaacctccagcaaaatcacaacgaccagaagaagaagtgaaaagcagcttacatgaatccttgcacattggccagtcaagaactcctgaaacaactgaatcacaagtaaaagactcttctttgtgtgtttcaggggaaactctggcagcaggtacttcatcacctaaaactgaaggcaagcacgaagaaactgttaataaagaatcggatatgaaggtgccaactgtaagtttgaaagtatctgaaagtgtaattgatgtgaaaacaactatggaaagtatatctaatacgtctacgcagtctctcacagcagaaacaaaggacatagctttggaacctaaggaacaaaaacatgaagacaggcagagcaatacaccttctcctcctgttagtaccttttcatcaggtacttctaccaccagtgatattgaagttttagatcatgaaagtgtaataagtgagagctcagcgagctcgagacaagagactacagattcaaaatcaagtcttcacttgatgcagacatcttttcagcttctctctgcatctgcttgtcctgaatataatcgtttagatgatttccaaaaactcactgagagttgctgttcatctgatgcttttgaaagaatagactcatttagtgtacagtcattagatagccggagtgtaagtgaaatcaattcagatgatgaattgtcaggcaagggatatgctttagtgcctattatagttaattcttcaactccaaagtctaaaacagttgaatctgctgaaggaaaatctgaagaagtaaatgaaacattagttatacccactgaggaagcagaaatggaagaaagtggacgaagtgcaactcctgttaactgtgaacagcctgatatcttggtttcttctacaccaataaatgaaggacagactgtgttagacaaggtggctgagcagtgtgaacctgctgaaagtcagccagaagcactttctgagaaggaagatgtttgcaagacagttgaatttctgaatgaaaagctggaaaaaagggaggctcagttattatctcttagtaaggaaaaagcacttctagaagaagcttttgataacctgaaagatgaaatgttcagagtgaaagaagaaagcagtagcatttcttccttgaaagatgagtttactcaaagaattgcagaagcagaaaagaaagttcaactagcctgcaaagagagagatgctgctaaaaaggaaatcaaaaacataaaagaagaacttgccactagattaaatagtagtgaaactgcagaccttttgaaagagaaagatgagcagatccgagggttaatggaagaaggagaaaaactttcaaaacagcagctgcacaattctaacatcatcaagaaattaagagctaaagacaaggagaatgaaaatatggttgcaaagctgaacaaaaaagttaaagagctagaagaggagttgcagcatttgaaacaggtccttgatggcaaagaagaggttgagaaacaacatagagaaaatattaaaaaactaaattccatggtagaacgccaagagaaagatcttggccgtcttcaggtagacatggatgaacttgaagaaaagaaccgaagtattcaggctgccctggatagtgcatacaaagaacttactgatcttcacaaagccaatgctgcaaaggatagtgaggcacaggaagctgctctgagccgtgaaatgaaagctaaagaagaactttctgcagcattagagaaggcccaagaagaagcccgtcagcagcaagaaacattagccattcaagtgggggaccttaggcttgcattgcagcgtacagaacaagcggctgccagaaaggaggattatttacgccatgagatcggtgaacttcagcagagactccaggaagcagagaatcgaaaccaggaactgagtcaaagtgtttcatcaacaacaagaccattgcttcgacaaatagaaaatttgcaagcaaccctgggatcccagacatcgtcgtgggagaaattagagaagaatctttctgataggcttggtgaatcccagaccttgctggcagcagcagttgagagagaacgtgcagctacagaagaactccttgctaacaaaattcagatgtcttccatggagtcacagaattctcttttaagacaggaaaacagtagatttcaagcccagctagaatcagagaaaaataggctgtgtaaactggaggatgagaacaataggtaccaggttgaattggaaaacctaaaagatgaatatgtaagaacacttgaagagacgaggaaagaaaagacattgttgaatagtcagttagaaatggaaagaatgaaagttgaacaagaaaggaagaaagccatttttactcaagaaacaataaaagaaaaggaacgcaagccattttctgtttctagcactcccaccatgtcacgctcaagttcaataagtggtgttgatatggcaggactacagacatcttttctgtctcaggatgagtctcatgatcactcatttggaccaatgcctatatcagcaaatggaagcaatctttatgatgctgtaaggatgggagcaggatcaagcataattgaaaacctacagtctcagctaaagctaagggaaggggaaatcactcatttacagtaaaccttataaacggtatacctctcaggaaagttgggaccgtttttctgccactgtttcctttacttaagaaagagctagctcaaggttatatgttgacatgtctatttcaaa

SEQ ID NO: 361910 - DNA, 223 bp, Homo sapiens
caagaaaatatcaaatggttttactggcaagatctgccaaatattcaagaaacaagtaatttcaattttggacagaattttccagagaagagaaaatgggaagagggttgttcctcattttatgaagctagtatacacatcagtgccaacatttgacaagggaagtttgaaaaaggaaaatcaccgactaatctctcccatgagcagagacttaaaaaattct

SEQ ID NO: 361911 - DNA, 466 bp, Homo sapiens
gcctcatttgtatctgttatatgaaagttttaatcaccataaatatatttacaatgaagttggaaaatggaatttccccacctccttggatttgatttttctgttttactttatttctaaaagttacgaagctgggcatggtggctcacacctgtaatcccagcactttgggaggctgaggtgggcggataaccggagatcagaagtttgagaaaagcctggccaacatggcgaaaccccatttctactaaaaaacaaacaaaacaaaacaaacaaaaaacaaaaattagctgggtgttgtggtgggtgcctgtaatcccagctacttgggaggctgaggcaggagaatcccttgcgcctgtgatgcagaggttgcagtgagccaagatcgcaccactacactctagcttgggcaatagaacaaggctgtatctcaaaagaaaaaccacccccaaaaaacaaaaaa

SEQ ID NO: 361912 - DNA, 448 bp, Homo sapiens
tttgcggtcgcactagaggatccccgcctggaccctctctacaagtgcagctttttatagaaattctgaacagatatatctatttttatgaaaaggaaaatgatgcggtaacaattcaggttttaaaccagcttatccaaaagattcgagaagacctcccgaatcttgaatccagtgaagaaacagagcagattaacaaacattttcataacacactggagcatttgcgcttgcggcgggaatcaccagaatccgaggggccaatttatgaaggtctcatcctttaaaaaggaaatagctcaccatactcctttccatgtacatccagtgagggtccaggcgcctggaccctctctcaattctaattggaccctaaatctaaagtcttacaaaacttttgtcttacaaattcaggagttcctggcatggcacagtggaaacaaatctg

SEQ ID NO: 361913 - DNA, 353 bp, Homo sapiens
  misc_feature (335)..(335): n is a, c, g, or t
ttgctccctggggactctaaaactaggtgctattgaaacttctaaaactcctagtttttagaagtttccatagccaccatggtcaaaaccagaagctatattttgcatatttggactcagccatccattaagaacccatgttgtcctctggacatatttatcaatataattgggttttaaatagtataaaagaaaacttgtgatctatataatttatgtatcaccttcattgtaaatttagcaggaaatgcatcacaattatgatttttttttttgcaccagtgaaacaataaagatgctattgaaacttctaaaactaggggtaccggctcgantcgtatctgctctttctt

SEQ ID NO: 361914 - DNA, 5148 bp, Homo sapiens
agcgtcacatgaccgcgggaggctacgcgcggggcgggtgctgcttgctgcaggctctggggagtcgccatgcctacaacacagcagtcccctcaggatgagcaggaaaagctcttggatgaagccatacaggctgtgaaggtccagtcattccaaatgaagagatgcctggacaaaaacaagcttatggatgctctaaaacatgcttctaatatgcttggtgaactccggacttctatgttatcaccaaagagttactatgaactttatatggccatttctgatgaactgcactacttggaggtctacctgacagatgagtttgctaaaggaaggaaagtggcagatctctacgaacttgtacagtatgctggaaacattatcccaaggctttaccttttgatcacagttggagttgtatatgtcaagtcatttcctcagtccaggaaggatattttgaaagatttggtagaaatgtgccgtggtgtgcaacatcccttgaggggtctgtttcttcgaaattaccttcttcagtgtaccagaaatatcttacctgatgaaggagagccaacagatgaagaaacaactggtgacatcagtgattccatggattttgtactgctcaactttgcagaaatgaacaagctctgggtgcgaatgcagcatcagggacatagccgagatagagaaaaaagagaacgagaaagacaagaactgagaattttagtgggaacaaatttggtgcgcctcagtcagttggaaggtgtaaatgtggaacgttacaaacagattgttttgactggcatattggagcaagttgtaaactgtagggatgctttggctcaagaatatctcatggagtgtattattcaggttttccctgatgaatttcacctccagactttgaatccttttcttcgggcctgtgctgagttacaccagaatgtaaatgtgaagaacataatcattgctttaattgatagattagctttatttgctcaccgtgaagatggacctggaatcccagcggatattaaactttttgatatattttcacagcaggtggctacagtgatacagtctagacaagacatgccttcagaggatgttgtatctttacaagtctctctgattaatcttgccatgaaatgttaccctgatcgtgtggactatgttgataaagttctagaaacaacagtggagatattcaataagctcaaccttgaacatattgctaccagtagtgcagtttcaaaggaactcaccagacttttgaaaataccagttgacacttacaacaatattttaacagtcttgaaattaaaacattttcacccactctttgagtactttgactacgagtccagaaagagcatgagttgttatgtgcttagtaatgttctggattataacacagaaattgtctctcaagaccaggtggattccataatgaatttggtatccacgttgattcaagatcagccagatcaacctgtagaagaccctgatccagaagattttgctgatgagcagagccttgtgggccgcttcattcatctgctgcgctctgaggaccctgaccagcagtacttgattttgaacacagcacgaaaacattttggagctggtggaaatcagcggattcgcttcacactgccacctttggtatttgcagcttaccagctggcttttcgatataaagagaattctaaagtggatgacaaatgggaaaagaaatgccagaagattttttcatttgcccaccagactatcagtgctttgatcaaagcagagctggcagaattgcccttaagactttttcttcaaggagcactagctgctggggaaattggttttgaaaatcatgagacagtcgcatatgaattcatgtcccaggcattttctctgtatgaagatgaaatcagcgattccaaagcacagctagctgccatcaccttgatcattggcacttttgaaaggatgaagtgcttcagtgaagagaatcatgaacctctgaggactcagtgtgcccttgctgcatccaaacttctaaagaaacctgatcagggccgagctgtgagcacctgtgcacatctcttctggtctggcagaaacacggacaaaaatggggaggagcttcacggaggcaagagggtaatggagtgcctaaaaaaagctctaaaaatagcaaatcagtgcatggacccctctctacaagtgcagctttttatagaaattctgaacagatatatctatttttatgaaaaggaaaatgatgcggtaacaattcaggttttaaaccagcttatccaaaagattcgagaagacctcccgaatcttgaatccagtgaagaaacagagcagattaacaaacattttcataacacactggagcatttgcgcttgcggcgggaatcaccagaatccgaggggccaatttatgaaggtctcatcctttaaaaaggaaatagctcaccatactcctttccatgtacatccagtgagggttttattacgctaggtttcccttccatagattgtgcctttcagaaatgctgaggtaggtttcccatttcttacctgtgatgtgttttacccagcacctccggacactcaccttcaggaccttaataaaattattcacttggtaagtgttcaagtctttctgatcaccccaagtagcatgactgatctgcaatttaaaattcctgtgatctgtaagcacttatcttggctactaatgaagctctccttttttttgtttgtttgtttgcttcattgttgattgtgtattttcttcattcctggggagtactaacccaaaagcgtctgtctcttgttttctagtccagtttgagattaatttagaagaaaggaatactgtatgtgaaattcatcttgggctttcccctaaattgcaagataaggccatgtgtaagattttccctaaaactagaatatattaatgcatgtttgagaattttaaagcaccatggtcaaaaccagaagctatattttgcatatttggactcagccatccattaagaacccatgttgtcctctggacatatttatcaatataattgggttttaaatagtataaaagaaaacttgtgatctatataatttatgtatcaccttcattgtaaatttagcaggaaatgcatcacaattatgatttttttttttgcaccagtgaaacaataaagatgctattaacaattttggagctttttttcccctttcatactatctttaattgataaaaagaactagtagtatggctatagagtttaatagtcattctcatatattcacagagctcacttaactctagttttaagcacttgttgaacaaggcagcatctactcttttagtcatttataccccttttctttcctcaactttaccctgcttttcccaaggcatgatgaattcacataaaccccccaaaggctcaccactgatactagttacctactatataataaaccatcccaaaacttactgtcttaaaacagcaaacatttatctcacaggtctctggatcaggaatttgggagcagcttagctggtggttctggcaaagagtgtggtgtaaggttgcaaacaagatactggttggggctgcagtcatctgatgctttgactggggctgacttttctgctcactgacctggctgttaggcagaggccccagttcctcttcttgagggcagaggccccagttcctctccttgagggcagaggcctaagttcctttccttgagggcagaggccccagttcctctccttgacggcccttccatagagtgtcctcacagcatggtggctggctttcccctgagtatgaaagcaagaaggaaaccacagtgcctttcagtggcctccctgtggaagtgacatgctcatttttgccttattctgtaagtggggagtcactaagtctagcctatattcaagggtaaggagagttaagctccacctcttaaagggaaaatttatagacattttcaaatgactacatcacttaacccctcaccatctgccctcccattgctagcacttgatgactagcccttgctgggctttacatgaacagatgtttcccaaagttataaaattagtaccactaaaatgtatcaaatgttaagccattctgtggtatgtcatagtccagcaaaccctttctgttctttgtaggtgttagtttaccccgtataaacctgattatggcttgacatgtccatattatttacatgttttgtgaaatacaactggaatagtagaaaagacatgagtcaagaacacttgagttggagagcttggtttgcaagtaaggtaatgtcagtacagtgtgtaaattatctcttattttctgggttgaggtaaacccaattttaaaaataataaaccaacaaaagtaaataaaagtgaaacaaaagcactgctagtatccttaacttacagattttttttgttgaacaaaaactgggtaccagatatagttaggcactgaatctaaaggtgaagaagatcatagcctctagcttcaagaacgttagtctgctgtgaagacagacctgtagttacagaagatggtaagggtttgtgcaggagagcagtgaagaagagctttgagggattggggatggggaagttctgcagagggttgtatgaattctcatggaacatcaagtccaatagtttatttagccttctgaggccagtgctttggcctgcagtcccaggctcctcagacccatgggctgaagcaagttatactcttggctgcctgtagtgaaatagatatttagaaattgacttagcatttaaaaccctttatagcaatttgacagagtaattttatgtctattggatgtaataaatatttggctttgtttccatgtacatccagtgagggttttattacgctaggtttcccttccatagattgtgcctttcaaaaatgctgaggtaggtttcccatttcttacctgtgatgtgttttacccagcacctccgcacacataacattcaggaccttaataaaattattcacttggtaagtgttcaagtctttctgatcaccccaagtagcatgactgatctgcaatttaaaattcctgtgatctgtaaaaaaaaaa

SEQ ID NO: 361915 - DNA, 3215 bp, Homo sapiens
  misc_feature (2837)..(2837): n is a, c, g, or t
agcgtcacatgaccgcgggaggctacgcgcggggcgggtgctgcttgctgcaggctctggggagtcgccatgcctacaacacagcagtcccctcaggatgagcaggaaaagctcttggatgaagccatacaggctgtgaaggtccagtcattccaaatgaagagatgcctggacaaaaacaagcttatggatgctctaaaacatgcttctaatatgcttggtgaactccggacttctatgttatcaccaaagagttactatgaactttatatggccatttctgatgaactgcactacttggaggtctacctgacagatgagtttgctaaaggaaggaaagtggcagatctctacgaacttgtacagtatgctggaaacattatcccaaggctttaccttttgatcacagttggagttgtatatgtcaagtcatttcctcagtccaggaaggatattttgaaagatttggtagaaatgtgccgtggtgtgcaacatcccttgaggggtctgtttcttcgaaattaccttcttcagtgtaccagaaatatcttacctgatgaaggagagccaacagatgaagaaacaactggtgacatcagtgattccatggattttgtactgctcaactttgcagaaatgaacaagctctgggtgcgaatgcagcatcagggacatagccgagatagagaaaaaagagaacgagaaagacaagaactgagaattttagtgggaacaaatttggtgcgcctcagtcagttggaaggtgtaaatgtggaacgttacaaacagattgttttgactggcatattggagcaagttgtaaactgtagggatgctttggctcaagaatatctcatggagtgtattattcaggttttccctgatgaatttcacctccagactttgaatccttttcttcgggcctgtgctgagttacaccagaatgtaaatgtgaagaacataatcattgctttaattgatagattagctttatttgctcaccgtgaagatggacctggaatcccagcggatattaaactttttgatatattttcacagcaggtggctacagtgatacagtctagacaagacatgccttcagaggatgttgtatctttacaagtctctctgattaatcttgccatgaaatgttaccctgatcgtgtggactatgttgataaagttctagaaacaacagtggagatattcaataagctcaaccttgaacatattgctaccagtagtgcagtttcaaaggaactcaccagacttttgaaaataccagttgacacttacaacaatattttaacagtcttgaaattaaaacattttcacccactctttgagtactttgactacgagtccagaaagagcatgagttgttatgtgcttagtaatgttctggattataacacagaaattgtctctcaagaccaggtggattccataatgaatttggtatccacgttgattcaagatcagccagatcaacctgtagaagaccctgatccagaagattttgctgatgagcagagccttgtgggccgcttcattcatctgctgcgctctgaggaccctgaccagcagtacttgattttgaacacagcacgaaaacattttggagctggtggaaatcagcggattcgcttcacactgccacctttggtatttgcagcttaccagctggcttttcgatataaagagaattctaaagtggatgacaaatgggaaaagaaatgccagaagattttttcatttgcccaccagactatcagtgctttgatcaaagcagagctggcagaattgcccttaagactttttcttcaaggagcactagctgctggggaaattggttttgaaaatcatgagacagtcgcatatgaattcatgtcccaggcattttctctgtatgaagatgaaatcagcgattccaaagcacagctagctgccatcaccttgatcattggcacttttgaaaggatgaagtgcttcagtgaagagaatcatgaacctctgaggactcagtgtgcccttgctgcatccaaacttctaaagaaacctgatcagggccgagctgtgagcacctgtgcacatctcttctggtctggcagaaacacggacaaaaatggggaggagcttcacggaggcaagagggtaatggagtgcctaaaaaaagctctaaaaatagcaaatcagtgcatggacccctctctacaagtgcagctttttatagaaattctgaacagatatatctatttttatgaaaaggaaaatgatgcggtaacaattcaggttttaaaccagcttatccaaaagattcgagaagacctcccgaatcttgaatccagtgaagaaacagagcagattaacaaacattttcataacacactggagcatttgcgcttgcggcgggaatcaccagaatccgaggggccaatttatgaaggtctcatcctttaaaaaggaaatagctcaccatactcctttccatgtacatccagtgagggttttattacgctaggtttcccttccatagattgtgcctttcagaaatgctgaggtaggtttcccatttcttacctgtgatgtgttttacccagcacctccggacactcaccttcaggaccttaataaaattattcacttggtaagtgttcaagtctttctgatcaccccaagtagcatgactgatctgcaatttaaaattcctgtgatctgtaaaaaaaaaaaaaaaaaaaaaaaaaacaaaacccacttttttgggggccaaaaaggaacgcccccctttttagggcgggggaggggccccactgggtggatggggtattttctccacntccggggggagtattaccccaaaaggcgtttggtctcctggttatacaaggcagcagttggggacaatcaactttcgaacacagcacggcgactcccggggcgttggtagacactcccccttgtgggggtttccccccatagattgaggcaaagaataaggcgccccgttgttgtaaaaatttctccccttaaaagcgaaaaaattttttcagaacgggccctgtcgtgggacaaacacttttacaacggcgaccccaggggtgtacaacccaagacgcatattattttccggcaactaactggggcacactcaccgcatcttcattttaaaaaccccctgtgtgtggtctcgcgagaacatttttttccacattatg

SEQ ID NO: 361916 - DNA, 5125 bp, Homo sapiens
agcgtcacatgaccgcgggaggctacgcgcggggcgggtgctgcttgctgcaggctctggggagtcgccatgcctacaacacagcagtcccctcaggatgagcaggaaaagctcttggatgaagccatacaggctgtgaaggtccagtcattccaaatgaagagatgcctgacacaagcttatggatgctctgagttactatgaactttatatggccatttctgatgaactgcactacttggaggtctacctgacagatgagtttgctaaaggaaggaaagtggcagatctctacgaacttgtacagtatgctggaaacattatcccaaggctttaccttttgatcacagttggagttgtatatgtcaagtcatttcctcagtccaggaaggatattttgaaagatttggtagaaatgtgccgtggtgtgcaacatcccttgaggggtctgtttcttcgaaattaccttcttcagtgtaccagaaatatcttacctgatgaaggagagccaacagatgaagaaacaactggtgacatcagtgattccatggattttgtactgctcaactttgcagaaatgaacaagctctgggtgcgaatgcagcatcagggacatagccgagatagagaaaaaagagaacgagaaagacaagaactgagaattttagtgggaacaaatttggtgcgcctcagtcagttggaaggtgtaaatgtggaacgttacaaacagattgttttgactggcatattggagcaagttgtaaactgtagggatgctttggctcaagaatatctcatggagtgtattattcaggttttccctgatgaatttcacctccagactttgaatccttttcttcgggcctgtgctgagttacaccagaatgtaaatgtgaagaacataatcattgctttaattgatagattagctttatttgctcaccgtgaagatggacctggaatcccagcggatattaaactttttgatatattttcacagcaggtggctacagtgatacagtctagacaagacatgccttcagaggatgttgtatctttacaagtctctctgattaatcttgccatgaaatgttaccctgatcgtgtggactatgttgataaagttctagaaacaacagtggagatattcaataagctcaaccttgaacatattgctaccagtagtgcagtttcaaaggaactcaccagacttttgaaaataccagttgacacttacaacaatattttaacagtcttgaaattaaaacattttcacccactctttgagtactttgactacgagtccagaaagagcatgagttgttatgtgcttagtaatgttctggattataacacagaaattgtctctcaagaccaggtggattccataatgaatttggtatccacgttgattcaagatcagccagatcaacctgtagaagaccctgatccagaagattttgctgatgagcagagccttgtgggccgcttcattcatctgctgcgctctgaggaccctgaccagcagtacttgattttgaacacagcacgaaaacattttggagctggtggaaatcagcggattcgcttcacactgccacctttggtatttgcagcttaccagctggcttttcgatataaagagaattctaaagtggatgacaaatgggaaaagaaatgccagaagattttttcatttgcccaccagactatcagtgctttgatcaaagcagagctggcagaattgcccttaagactttttcttcaaggagcactagctgctggggaaattggttttgaaaatcatgagacagtcgcatatgaattcatgtcccaggcattttctctgtatgaagatgaaatcagcgattccaaagcacagctagctgccatcaccttgatcattggcacttttgaaaggatgaagtgcttcagtgaagagaatcatgaacctctgaggactcagtgtgcccttgctgcatccaaacttctaaagaaacctgatcagggccgagctgtgagcacctgtgcacatctcttctggtctggcagaaacacggacaaaaatggggaggagcttcacggaggcaagagggtaatggagtgcctaaaaaaagctctaaaaatagcaaatcagtgcatggacccctctctacaagtgcagctttttatagaaattctgaacagatatatctatttttatgaaaaggaaaatgatgcggtaacaattcaggttttaaaccagcttatccaaaagattcgagaagacctcccgaatcttgaatccagtgaagaaacagagcagattaacaaacattttcataacacactggagcatttgcgcttgcggcgggaatcaccagaatccgaggggccaatttatgaaggtctcatcctttaaaaaggaaatagctcaccatactcctttccatgtacatccagtgagggttttattacgctaggtttcccttccatagattgtgcctttcagaaatgctgaggtaggtttcccatttcttacctgtgatgtgttttacccagcacctccggacactcaccttcaggaccttaataaaattattcacttggtaagtgttcaagtctttctgatcaccccaagtagcatgactgatctgcaatttaaaattcctgtgatctgtaaaaaaaaaaaaaaaaaaaaaaaaaacaaaacccacaagcacttatcttggctactaatgaagctctccttttttttgtttgtttgtttgcttcattgttgattgtgtattttcttcattcctggggagtactaacccaaaagcgtctgtctcttgttttctagtccagtttgagattaatttagaagaaaggaatactgtatgtgaaattcatcttgggctttcccctaaattgcaagataaggccatgtgtaagattttccctaaaactagaatatattaatgcatgtttgagaattttaaagcaccatggtcaaaaccagaagctatattttgcatatttggactcagccatccattaagaacccatgttgtcctctggacatatttatcaatataattgggttttaaatagtataaaagaaaacttgtgatctatataatttatgtatcaccttcattgtaaatttagcaggaaatgcatcacaattatgatttttttttttgcaccagtgaaacaataaagatgctattaacaattttggagctttttttcccctttcatactatctttaattgataaaaagaactagtagtatggctatagagtttaatagtcattctcatatattcacagagctcacttaactctagttttaagcacttgttgaacaaggcagcatctactcttttagtcatttataccccttttctttcctcaactttaccctgcttttcccaaggcatgatgaattcacataaaccccccaaaggctcaccactgatactagttacctactatataataaaccatcccaaaacttactgtcttaaaacagcaaacatttatctcacaggtctctggatcaggaatttgggagcagcttagctggtggttctggcaaagagtgtggtgtaaggttgcaaacaagatactggttggggctgcagtcatctgatgctttgactggggctgacttttctgctcactgacctggctgttaggcagaggccccagttcctcttcttgagggcagaggccccagttcctctccttgagggcagaggcctaagttcctttccttgagggcagaggccccagttcctctccttgacggcccttccatagagtgtcctcacagcatggtggctggctttcccctgagtatgaaagcaagaaggaaaccacagtgcctttcagtggcctccctgtggaagtgacatgctcatttttgccttattctgtaagtggggagtcactaagtctagcctatattcaagggtaaggagagttaagctccacctcttaaagggaaaatttatagacattttcaaatgactacatcacttaacccctcaccatctgccctcccattgctagcacttgatgactagcccttgctgggctttacatgaacagatgtttcccaaagttataaaattagtaccactaaaatgtatcaaatgttaagccattctgtggtatgtcatagtccagcaaaccctttctgttctttgtaggtgttagtttaccccgtataaacctgattatggcttgacatgtccatattatttacatgttttgtgaaatacaactggaatagtagaaaagacatgagtcaagaacacttgagttggagagcttggtttgcaagtaaggtaatgtcagtacagtgtgtaaattatctcttattttctgggttgaggtaaacccaattttaaaaataataaaccaacaaaagtaaataaaagtgaaacaaaagcactgctagtatccttaacttacagattttttttgttgaacaaaaactgggtaccagatatagttaggcactgaatctaaaggtgaagaagatcatagcctctagcttcaagaacgttagtctgctgtgaagacagacctgtagttacagaagatggtaagggtttgtgcaggagagcagtgaagaagagctttgagggattggggatggggaagttctgcagagggttgtatgaattctcatggaacatcaagtccaatagtttatttagccttctgaggccagtgctttggcctgcagtcccaggctcctcagacccatgggctgaagcaagttatactcttggctgcctgtagtgaaatagatatttagaaattgacttagcatttaaaaccctttatagcaatttgacagagtaattttatgtctattggatgtaataaatatttggctttgtttccatgtacatccagtgagggttttattacgctaggtttcccttccatagattgtgcctttcaaaaatgctgaggtaggtttcccatttcttacctgtgatgtgttttacccagcacctccgcacacataacattcaggaccttaataaaattattcacttggtaagtgttcaagtctttctgatcaccccaagtagcatgactgatctgcaatttaaaattcctgtgatctgtaaaaaaaaaa

SEQ ID NO: 361917 - DNA, 6821 bp, Homo sapiens
cccaaagtgctgggatacagatgtgagccaccacgcccagccacacaacatgtcttaaagtggattacttaatcttttgtgccacaactttttagcctttttagaaatacaaacgaaaaaaccactctcataagaagggccttactaggatttgtatttgtatgtttcagtgacttttgggctgttcacatgatcccctcacactaaaactttctttgatgccttcttacttcattgtgcccagactatgatgatgaaataattctcattttccatatccaaatagttacatagttataaagctaatgtgtatactaaaaagggctcacttgagaaaatcgatgttccttcaggcctcatactttagctcttctttctagctttcttcagtactttatcagatccctagttactgttctattcttaactcttctgctttatatcctgtgtgctattgtttttccgtcttgaatctttagtctttccctctcccaatccttcctttcaaccccactgtgctattctgcctgttcatcctaaaaagctttatctctgctctgcttccctcatggactatttgtcaaaatttatactctatcccataacttttaaattctgcctctataattcctttgcagtatctctaatataacttagtgacagttacaaagtataatttcctctgtatctttttttacgctcagtttgttgcagttcaccctgttgactgtgtccaactctttgtaactcttttctgcggagtggtatttcactcatagccttttcacctctcattgcttttttatcagtctctgcttcctctatgtatatccttaaatataaaagacagtctggcttaatggctgccttcttcagagtcagatttgctgtatttccaccacatagctattgtttaaccgtgcccaagttattttcctttttgaattttcgtttcagataggaaaagtggagatactttagacttattcctcaggagagtatatttgcattaatcctttcaactattatccctgtgaatttacatctgcatcttggattcttttctgaacacctaatacatgtctgtccttataccagacatttctacttttatgttgcaggcactcctcaaattgaaaatgtcagaaaatgaactcacatttccaaattttcctgtctactgtttaccttgtttcactttactttctctagaactagaaactcttggctgcaacttcaaagttacctttaactattggttttcttctgtgcctccacatccaataacttgccagttctctaccattctgtctcatggtcatttttatttttatggagacagtgtctgtgttgcgagactggtcttgaactcctggcctcaagcaattttcctgccttggcctcccaaagtgctgagattatgggcctaccaaatctctcaacttccttcatagtcctgtgctttaatgcactagaccatatactgttacccaaacataccatgcacttctatgcctctagtcctagctcatgttctttttttttctagcttaaaatacccctttataaattttaaacaaaattggtgtatatagttcttgctttttaaaatttcagcccataaacattttgtgattaactatccttctcatcttttaatacggtccctttcatgaagctttcctcaatctttcccagtgctcattcattgataattactcccttgtctgctctctttggtatattacttgcatcttcttttagtacttctgtgtgccttgcatttcatttagctatttgtggtttattttcaccattctacaactcttattttaatgtggtcgtagatgggaaatgtcttagagagttttgtttctctgaagggaagttgttagatctatgtcatatgttaaagtaaatggcattttagaattaagaaggggtgtatttcctcctgtgctagattgcataattcttgagtacgaggaccatgtttttttgtttttgtttttcaattccccatgtcttgtcttcattcttccctacgtcgtttttttttccttttcccactcttcatacattcatctaaccagtcacagactttctcagtagcaaaaagataattcagatgagatcaggcacgatcagggttgtatggccatagacaaaaagaatggaaattagcaacttttgaacagaattacagtgaaaatgctgcatatttaaacttgtggattagaacaaaaacatagcatagagaatatataggttttaatgattacattagaaaattaggctggaaatgaatgagttaagcatttatccagaaactctaaaaaaaagagagagaactgagaattttagtgggaacaaatttggtgcgcctcagtcagttggaaggtgtaaatgtggaacgttacaaacagattgttttgactggcatattggagcaagttgtaaactgtagggatgctttggctcaagaatatctcatggagtgtattattcaggttttccctgatgaatttcacctccagactttgaatccttttcttcgggcctgtgctgagttacaccagaatgtaaatgtgaagaacataatcattgctttaattgatagattagctttatttgctcaccgtgaagatggacctggaatcccagcggatattaaactttttgatatattttcacagcaggtggctacagtgatacagtctagacaagacatgccttcagaggatgttgtatctttacaagtctctctgattaatcttgccatgaaatgttaccctgatcgtgtggactatgttgataaagttctagaaacaacagtggagatattcaataagctcaaccttgaacatattgctaccagtagtgcagtttcaaaggaactcaccagacttttgaaaataccagttgacacttacaacaatattttaacagtcttgaaattaaaacattttcacccactctttgagtactttgactacgagtccagaaagagcatgagttgttatgtgcttagtaatgttctggattataacacagaaattgtctctcaagaccaggtggattccataatgaatttggtatccacgttgattcaagatcagccagatcaacctgtagaagaccctgatccagaagattttgctgatgagcagagccttgtgggccgcttcattcatctgctgcgctctgaggaccctgaccagcagtacttgattttgaacacagcacgaaaacattttggagctggtggaaatcagcggattcgcttcacactgccacctttggtatttgcagcttaccagctggcttttcgatataaagagaattctaaagtggatgacaaatgggaaaagaaatgccagaagattttttcatttgcccaccagactatcagtgctttgatcaaagcagagctggcagaattgcccttaagactttttcttcaaggagcactagctgctggggaaattggttttgaaaatcatgagacagtcgcatatgaattcatgtcccaggcattttctctgtatgaagatgaaatcagcgattccaaagcacagctagctgccatcaccttgatcattggcacttttgaaaggatgaagtgcttcagtgaagagaatcatgaacctctgaggactcagtgtgcccttgctgcatccaaacttctaaagaaacctgatcagggccgagctgtgagcacctgtgcacatctcttctggtctggcagaaacacggacaaaaatggggaggagcttcacggaggcaagagggtaatggagtgcctaaaaaaagctctaaaaatagcaaatcagtgcatggacccctctctacaagtgcagctttttatagaaattctgaacagatatatctatttttatgaaaaggaaaatgatgcggtaacaattcaggttttaaaccagcttatccaaaagattcgagaagacctcccgaatcttgaatccagtgaagaaacagagcagattaacaaacattttcataacacactggagcatttgcgcttgcggcgggaatcaccagaatccgaggggccaatttatgaaggtctcatcctttaaaaaggaaatagctcaccatactcctttccatgtacatccagtgagggttttattacgctaggtttcccttccatagattgtgcctttcagaaatgctgaggtaggtttcccatttcttacctgtgatgtgttttacccagcacctccggacactcaccttcaggaccttaataaaattattcacttggtaagtgttcaagtctttctgatcaccccaagtagcatgactgatctgcaatttaaaattcctgtgatctgtaaaaaaaaaaaaaaaaaaaaaaaaaacaaaacccacaagcacttatcttggctactaatgaagctctccttttttttgtttgtttgtttgcttcattgttgattgtgtattttcttcattcctggggagtactaacccaaaagcgtctgtctcttgttttctagtccagtttgagattaatttagaagaaaggaatactgtatgtgaaattcatcttgggctttcccctaaattgcaagataaggccatgtgtaagattttccctaaaactagaatatattaatgcatgtttgagaattttaaagcaccatggtcaaaaccagaagctatattttgcatatttggactcagccatccattaagaacccatgttgtcctctggacatatttatcaatataattgggttttaaatagtataaaagaaaacttgtgatctatataatttatgtatcaccttcattgtaaatttagcaggaaatgcatcacaattatgatttttttttttgcaccagtgaaacaataaagatgctattaacaattttggagctttttttcccctttcatactatctttaattgataaaaagaactagtagtatggctatagagtttaatagtcattctcatatattcacagagctcacttaactctagttttaagcacttgttgaacaaggcagcatctactcttttagtcatttataccccttttctttcctcaactttaccctgcttttcccaaggcatgatgaattcacataaaccccccaaaggctcaccactgatactagttacctactatataataaaccatcccaaaacttactgtcttaaaacagcaaacatttatctcacaggtctctggatcaggaatttgggagcagcttagctggtggttctggcaaagagtgtggtgtaaggttgcaaacaagatactggttggggctgcagtcatctgatgctttgactggggctgacttttctgctcactgacctggctgttaggcagaggccccagttcctcttcttgagggcagaggccccagttcctctccttgagggcagaggcctaagttcctttccttgagggcagaggccccagttcctctccttgacggcccttccatagagtgtcctcacagcatggtggctggctttcccctgagtatgaaagcaagaaggaaaccacagtgcctttcagtggcctccctgtggaagtgacatgctcatttttgccttattctgtaagtggggagtcactaagtctagcctatattcaagggtaaggagagttaagctccacctcttaaagggaaaatttatagacattttcaaatgactacatcacttaacccctcaccatctgccctcccattgctagcacttgatgactagcccttgctgggctttacatgaacagatgtttcccaaagttataaaattagtaccactaaaatgtatcaaatgttaagccattctgtggtatgtcatagtccagcaaaccctttctgttctttgtaggtgttagtttaccccgtataaacctgattatggcttgacatgtccatattatttacatgttttgtgaaatacaactggaatagtagaaaagacatgagtcaagaacacttgagttggagagcttggtttgcaagtaaggtaatgtcagtacagtgtgtaaattatctcttattttctgggttgaggtaaacccaattttaaaaataataaaccaacaaaagtaaataaaagtgaaacaaaagcactgctagtatccttaacttacagattttttttgttgaacaaaaactgggtaccagatatagttaggcactgaatctaaaggtgaagaagatcatagcctctagcttcaagaacgttagtctgctgtgaagacagacctgtagttacagaagatggtaagggtttgtgcaggagagcagtgaagaagagctttgagggattggggatggggaagttctgcagagggttgtatgaattctcatggaacatcaagtccaatagtttatttagccttctgaggccagtgctttggcctgcagtcccaggctcctcagacccatgggctgaagcaagttatactcttggctgcctgtagtgaaatagatatttagaaattgacttagcatttaaaaccctttatagcaatttgacagagtaattttatgtctattggatgtaataaatatttggctttgtttccatgtacatccagtgagggttttattacgctaggtttcccttccatagattgtgcctttcaaaaatgctgaggtaggtttcccatttcttacctgtgatgtgttttacccagcacctccgcacacataacattcaggaccttaataaaattattcacttggtaagtgttcaagtctttctgatcaccccaagtagcatgactgatctgcaatttaaaattcctgtgatctgtaaaaaaaaaa

SEQ ID NO: 361918 - DNA, 4686 bp, Homo sapiens
gtggaacgtacctgtagtcccagcactcaggaggcttgaggtgggaggatgacttgagcctaggaggtggatgttgcattgagtggagattgtgccacttcactccagcctgggcaaccgaacaagaccttgtctcaaaaagaaaaaagcttttaaagtttagaagtgaagtcttggtgagaaaaatctcaaatacgattttcaagttagtagttcaaatgcgttactagaggaatagcttaagattttgaaaacagattttaacccttatgtgtgttttttctcttttagattgttttgactggcatattggagcaagttgtaaactgtagggatgctttggctcaagaatatctcatggagtgtattattcaggttttccctgatgaatttcacctccagactttgaatccttttcttcgggcctgtgctgagttacaccagaatgtaaatgtgaagaacataatcattgctttaattgatagattagctttatttgctcaccgtgaagatggacctggaatcccagcggatattaaactttttgatatattttcacagcaggtggctacagtgatacagtctagacaagacatgccttcagaggatgttgtatctttacaagtctctctgattaatcttgccatgaaatgttaccctgatcgtgtggactatgttgataaagttctagaaacaacagtggagatattcaataagctcaaccttgaacatattgctaccagtagtgcagtttcaaaggaactcaccagacttttgaaaataccagttgacacttacaacaatattttaacagtcttgaaattaaaacattttcacccactctttgagtactttgactacgagtccagaaagagcatgagttgttatgtgcttagtaatgttctggattataacacagaaattgtctctcaagaccaggtggattccataatgaatttggtatccacgttgattcaagatcagccagatcaacctgtagaagaccctgatccagaagattttgctgatgagcagagccttgtgggccgcttcattcatctgctgcgctctgaggaccctgaccagcagtacttgattttgaacacagcacgaaaacattttggagctggtggaaatcagcggattcgcttcacactgccacctttggtatttgcagcttaccagctggcttttcgatataaagagaattctaaagtggatgacaaatgggaaaagaaatgccagaagattttttcatttgcccaccagactatcagtgctttgatcaaagcagagctggcagaattgcccttaagactttttcttcaaggagcactagctgctggggaaattggttttgaaaatcatgagacagtcgcatatgaattcatgtcccaggcattttctctgtatgaagatgaaatcagcgattccaaagcacagctagctgccatcaccttgatcattggcacttttgaaaggatgaagtgcttcagtgaagagaatcatgaacctctgaggactcagtgtgcccttgctgcatccaaacttctaaagaaacctgatcagggccgagctgtgagcacctgtgcacatctcttctggtctggcagaaacacggacaaaaatggggaggagcttcacggaggcaagagggtaatggagtgcctaaaaaaagctctaaaaatagcaaatcagtgcatggacccctctctacaagtgcagctttttatagaaattctgaacagatatatctatttttatgaaaaggaaaatgatgcggtaacaattcaggttttaaaccagcttatccaaaagattcgagaagacctcccgaatcttgaatccagtgaagaaacagagcagattaacaaacattttcataacacactggagcatttgcgcttgcggcgggaatcaccagaatccgaggggccaatttatgaaggtctcatcctttaaaaaggaaatagctcaccatactcctttccatgtacatccagtgagggttttattacgctaggtttcccttccatagattgtgcctttcagaaatgctgaggtaggtttcccatttcttacctgtgatgtgttttacccagcacctccggacactcaccttcaggaccttaataaaattattcacttggtaagtgttcaagtctttctgatcaccccaagtagcatgactgatctgcaatttaaaattcctgtgatctgtaaaaaaaaaaaaaaaaaaaaaaaaaacaaaacccacaagcacttatcttggctactaatgaagctctccttttttttgtttgtttgtttgcttcattgttgattgtgtattttcttcattcctggggagtactaacccaaaagcgtctgtctcttgttttctagtccagtttgagattaatttagaagaaaggaatactgtatgtgaaattcatcttgggctttcccctaaattgcaagataaggccatgtgtaagattttccctaaaactagaatatattaatgcatgtttgagaattttaaagcaccatggtcaaaaccagaagctatattttgcatatttggactcagccatccattaagaacccatgttgtcctctggacatatttatcaatataattgggttttaaatagtataaaagaaaacttgtgatctatataatttatgtatcaccttcattgtaaatttagcaggaaatgcatcacaattatgatttttttttttgcaccagtgaaacaataaagatgctattaacaattttggagctttttttcccctttcatactatctttaattgataaaaagaactagtagtatggctatagagtttaatagtcattctcatatattcacagagctcacttaactctagttttaagcacttgttgaacaaggcagcatctactcttttagtcatttataccccttttctttcctcaactttaccctgcttttcccaaggcatgatgaattcacataaaccccccaaaggctcaccactgatactagttacctactatataataaaccatcccaaaacttactgtcttaaaacagcaaacatttatctcacaggtctctggatcaggaatttgggagcagcttagctggtggttctggcaaagagtgtggtgtaaggttgcaaacaagatactggttggggctgcagtcatctgatgctttgactggggctgacttttctgctcactgacctggctgttaggcagaggccccagttcctcttcttgagggcagaggccccagttcctctccttgagggcagaggcctaagttcctttccttgagggcagaggccccagttcctctccttgacggcccttccatagagtgtcctcacagcatggtggctggctttcccctgagtatgaaagcaagaaggaaaccacagtgcctttcagtggcctccctgtggaagtgacatgctcatttttgccttattctgtaagtggggagtcactaagtctagcctatattcaagggtaaggagagttaagctccacctcttaaagggaaaatttatagacattttcaaatgactacatcacttaacccctcaccatctgccctcccattgctagcacttgatgactagcccttgctgggctttacatgaacagatgtttcccaaagttataaaattagtaccactaaaatgtatcaaatgttaagccattctgtggtatgtcatagtccagcaaaccctttctgttctttgtaggtgttagtttaccccgtataaacctgattatggcttgacatgtccatattatttacatgttttgtgaaatacaactggaatagtagaaaagacatgagtcaagaacacttgagttggagagcttggtttgcaagtaaggtaatgtcagtacagtgtgtaaattatctcttattttctgggttgaggtaaacccaattttaaaaataataaaccaacaaaagtaaataaaagtgaaacaaaagcactgctagtatccttaacttacagattttttttgttgaacaaaaactgggtaccagatatagttaggcactgaatctaaaggtgaagaagatcatagcctctagcttcaagaacgttagtctgctgtgaagacagacctgtagttacagaagatggtaagggtttgtgcaggagagcagtgaagaagagctttgagggattggggatggggaagttctgcagagggttgtatgaattctcatggaacatcaagtccaatagtttatttagccttctgaggccagtgctttggcctgcagtcccaggctcctcagacccatgggctgaagcaagttatactcttggctgcctgtagtgaaatagatatttagaaattgacttagcatttaaaaccctttatagcaatttgacagagtaattttatgtctattggatgtaataaatatttggctttgtttccatgtacatccagtgagggttttattacgctaggtttcccttccatagattgtgcctttcaaaaatgctgaggtaggtttcccatttcttacctgtgatgtgttttacccagcacctccgcacacataacattcaggaccttaataaaattattcacttggtaagtgttcaagtctttctgatcaccccaagtagcatgactgatctgcaatttaaaattcctgtgatctgtaaaaaaaaaa

SEQ ID NO: 361919 - DNA, 2650 bp, Homo sapiens
agcgtcacatgaccgcgggaggctacgcgcggggcgggtgctgcttgctgcaggctctggggagtcgccatgcctacaacacagcagtcccctcaggatgagcaggaaaagctcttggatgaagccatacaggctgtgaaggtccagtcattccaaatgaagagatgcctggacaaaaacaagcttatggatgctctaaaacatgcttctaatatgcttggtgaactccggacttctatgttatcaccaaagagttactatgaactttatatggccatttctgatgaactgcactacttggaggtctacctgacagatgagtttgctaaaggaaggaaagtggcagatctctacgaacttgtacagtatgctggaaacattatcccaaggctttaccttttgatcacagttggagttgtatatgtcaagtcatttcctcagtccaggaaggatattttgaaagatttggtagaaatgtgccgtggtgtgcaacatcccttgaggggtctgtttcttcgaaattaccttcttcagtgtaccagaaatatcttacctgatgaaggagagccaacagatgaagaaacaactggtgacatcagtgattccatggattttgtactgctcaactttgcagaaatgaacaagctctgggtgcgaatgcagcatcagggacatagccgagatagagaaaaaagagaacgagaaagacaagaactgagaattttagtgggaacaaatttggtgcgcctcagtcagttggaaggtgtaaatgtggaacgttacaaacagattgttttgactggcatattggagcaagttgtaaactgtagggatgctttggctcaagaatatctcatggagtgtattattcaggttttccctgatgaatttcacctccagactttgaatccttttcttcgggcctgtgctgagttacaccagaatgtaaatgtgaagaacataatcattgctttaattgatagattagctttatttgctcaccgtgaagatggacctggaatcccagcggatattaaactttttgatatattttcacagcaggtggctacagtgatacagtctagacaagacatgccttcagaggatgttgtatctttacaagtctctctgattaatcttgccatgaaatgttaccctgatcgtgtggactatgttgataaagttctagaaacaacagtggagatattcaataagctcaaccttgaacatattgctaccagtagtgcagtttcaaaggaactcaccagacttttgaaaataccagttgacacttacaacaatattttaacagtcttgaaattaaaacattttcacccactctttgagtactttgactacgagtccagaaagagcatgagttgttatgtgcttagtaatgttctggattataacacagaaattgtctctcaagaccaggtggattccataatgaatttggtatccacgttgattcaagatcagccagatcaacctgtagaagaccctgatccagaagattttgctgatgagcagagccttgtgggccgcttcattcatctgctgcgctctgaggaccctgaccagcagtacttgattttgaacacagcacgaaaacattttggagctggtggaaatcagcggattcgcttcacactgccacctttggtatttgcagcttaccagctggcttttcgatataaagagaattctaaagtggatgacaaatgggaaaagaaatgccagaagattttttcatttgcccaccagactatcagtgctttgatcaaagcagagctggcagaattgcccttaagactttttcttcaaggagcactagctgctggggaaattggttttgaaaatcatgagacagtcgcatatgaattcatgtcccaggcattttctctgtatgaagatgaaatcagcgattccaaagcacagctagctgccatcaccttgatcattggcacttttgaaaggatgaagtgcttcagtgaagagaatcatgaacctctgaggactcagtgtgcccttgctgcatccaaacttctaaagaaacctgatcagggccgagctgtgagcacctgtgcacatctcttctggtctggcagaaacacggacaaaaatggggaggagcttcacggaggcaagagggtaatggagtgcctaaaaaaagctctaaaaatagcaaatcagtgcatggacccctctctacaagtgcagctttttatagaaattctgaacagatatatctatttttatgaaaaggaaaatgatgcggtaacaattcaggttttaaaccagcttatccaaaagattcgagaagacctcccgaatcttgaatccagtgaagaaacagagcagattaacaaacattttcataacacactggagcatttgcgcttgcggcgggaatcaccagaatccgaggggccaatttatgaaggtctcatcctttaaaaaggaaatagctcaccatactcctttccatgtacatccagtgagggttttattacgctaggtttcccttccatagattgtgcctttcagaaatgctgaggtaggtttcccatttcttacctgtgatgtgttttacccagcacctccggacactcaccttcaggaccttaataaaattattcacttggta

SEQ ID NO: 361920 - DNA, 3753 bp, Homo sapiens
gacaacttgaggagataagaaatatgtaaattgcctaccataaagtatggtacattgtatatattcacaaaatgttagcaatgatgattagagcccacatttatttcacaaatgattaatcagagtttggaaatttttttttctttaatgcttttgggtcagattttgaacacagcacgaaaacattttggagctggtggaaatcagcggattcgcttcacactgccacctttggtatttgcagcttaccagctggcttttcgatataaagagaattctaaagtggatgacaaatgggaaaagaaatgccagaagattttttcatttgcccaccagactatcagtgctttgatcaaagcagagctggcagaattgcccttaagactttttcttcaaggagcactagctgctggggaaattggttttgaaaatcatgagacagtcgcatatgaattcatgtcccaggcattttctctgtatgaagatgaaatcagcgattccaaagcacagctagctgccatcaccttgatcattggcacttttgaaaggatgaagtgcttcagtgaagagaatcatgaacctctgaggactcagtgtgcccttgctgcatccaaacttctaaagaaacctgatcagggccgagctgtgagcacctgtgcacatctcttctggtctggcagaaacacggacaaaaatggggaggagcttcacggaggcaagagggtaatggagtgcctaaaaaaagctctaaaaatagcaaatcagtgcatggacccctctctacaagtgcagctttttatagaaattctgaacagatatatctatttttatgaaaaggaaaatgatgcggtaacaattcaggttttaaaccagcttatccaaaagattcgagaagacctcccgaatcttgaatccagtgaagaaacagagcagattaacaaacattttcataacacactggagcatttgcgcttgcggcgggaatcaccagaatccgaggggccaatttatgaaggtctcatcctttaaaaaggaaatagctcaccatactcctttccatgtacatccagtgagggttttattacgctaggtttcccttccatagattgtgcctttcagaaatgctgaggtaggtttcccatttcttacctgtgatgtgttttacccagcacctccggacactcaccttcaggaccttaataaaattattcacttggtaagtgttcaagtctttctgatcaccccaagtagcatgactgatctgcaatttaaaattcctgtgatctgtaaaaaaaaaaaaaaaaaaaaaaaaaacaaaacccacaagcacttatcttggctactaatgaagctctccttttttttgtttgtttgtttgcttcattgttgattgtgtattttcttcattcctggggagtactaacccaaaagcgtctgtctcttgttttctagtccagtttgagattaatttagaagaaaggaatactgtatgtgaaattcatcttgggctttcccctaaattgcaagataaggccatgtgtaagattttccctaaaactagaatatattaatgcatgtttgagaattttaaagcaccatggtcaaaaccagaagctatattttgcatatttggactcagccatccattaagaacccatgttgtcctctggacatatttatcaatataattgggttttaaatagtataaaagaaaacttgtgatctatataatttatgtatcaccttcattgtaaatttagcaggaaatgcatcacaattatgatttttttttttgcaccagtgaaacaataaagatgctattaacaattttggagctttttttcccctttcatactatctttaattgataaaaagaactagtagtatggctatagagtttaatagtcattctcatatattcacagagctcacttaactctagttttaagcacttgttgaacaaggcagcatctactcttttagtcatttataccccttttctttcctcaactttaccctgcttttcccaaggcatgatgaattcacataaaccccccaaaggctcaccactgatactagttacctactatataataaaccatcccaaaacttactgtcttaaaacagcaaacatttatctcacaggtctctggatcaggaatttgggagcagcttagctggtggttctggcaaagagtgtggtgtaaggttgcaaacaagatactggttggggctgcagtcatctgatgctttgactggggctgacttttctgctcactgacctggctgttaggcagaggccccagttcctcttcttgagggcagaggccccagttcctctccttgagggcagaggcctaagttcctttccttgagggcagaggccccagttcctctccttgacggcccttccatagagtgtcctcacagcatggtggctggctttcccctgagtatgaaagcaagaaggaaaccacagtgcctttcagtggcctccctgtggaagtgacatgctcatttttgccttattctgtaagtggggagtcactaagtctagcctatattcaagggtaaggagagttaagctccacctcttaaagggaaaatttatagacattttcaaatgactacatcacttaacccctcaccatctgccctcccattgctagcacttgatgactagcccttgctgggctttacatgaacagatgtttcccaaagttataaaattagtaccactaaaatgtatcaaatgttaagccattctgtggtatgtcatagtccagcaaaccctttctgttctttgtaggtgttagtttaccccgtataaacctgattatggcttgacatgtccatattatttacatgttttgtgaaatacaactggaatagtagaaaagacatgagtcaagaacacttgagttggagagcttggtttgcaagtaaggtaatgtcagtacagtgtgtaaattatctcttattttctgggttgaggtaaacccaattttaaaaataataaaccaacaaaagtaaataaaagtgaaacaaaagcactgctagtatccttaacttacagattttttttgttgaacaaaaactgggtaccagatatagttaggcactgaatctaaaggtgaagaagatcatagcctctagcttcaagaacgttagtctgctgtgaagacagacctgtagttacagaagatggtaagggtttgtgcaggagagcagtgaagaagagctttgagggattggggatggggaagttctgcagagggttgtatgaattctcatggaacatcaagtccaatagtttatttagccttctgaggccagtgctttggcctgcagtcccaggctcctcagacccatgggctgaagcaagttatactcttggctgcctgtagtgaaatagatatttagaaattgacttagcatttaaaaccctttatagcaatttgacagagtaattttatgtctattggatgtaataaatatttggctttgtttccatgtacatccagtgagggttttattacgctaggtttcccttccatagattgtgcctttcaaaaatgctgaggtaggtttcccatttcttacctgtgatgtgttttacccagcacctccgcacacataacattcaggaccttaataaaattattcacttggtaagtgttcaagtctttctgatcaccccaagtagcatgactgatctgcaatttaaaattcctgtgatctgtaaaaaaaaaa

SEQ ID NO: 361921 - DNA, 1746 bp, Homo sapiens
  misc_feature (1736)..(1736): n is a, c, g, or t
agcgtcacatgaccgcgggaggctacgcgcggggcgggtgctgcttgctgcaggctctggggagtcgccatgcctacaacacagcagtcccctcaggatgagcaggaaaagctcttggatgaagccatacaggctgtgaaggtccagtcattccaaatgaagagatgcctggacaaaaacaagcttatggatgctctaaaacatgcttctaatatgcttggtgaactccggacttctatgttatcaccaaagagttactatgaactttatatggccatttctgatgaactgcactacttggaggtctacctgacagatgagtttgctaaaggaaggaaagtggcagatctctacgaacttgtacagtatgctggaaacattatcccaaggctttaccttttgatcacagttggagttgtatatgtcaagtcatttcctcagtccaggaaggatattttgaaagatttggtagaaatgtgccgtggtgtgcaacatcccttgaggggtctgtttcttcgaaattaccttcttcagtgtaccagaaatatcttacctgatgaaggagagccaacagatgaagaaacaactggtgacatcagtgattccatggattttgtactgctcaactttgcagaaatgaacaagctctgggtgcgaatgcagcatcagggacatagccgagatagagaaaaaagagaacgagaaagacaagaactgagaattttagtgggaacaaatttggtgcgcctcagtcagttggaaggtgtaaatgtggaacgttacaaacagattgttttgactggcatattggagcaagttgtaaactgtagggatgctttggctcaagaatatctcatggagtgtattattcaggttttccctgatgaatttcacctccagactttgaatccttttcttcgggcctgtgctgagttacaccagaatgtaaatgtgaagaacataatcattgctttaattgatagattagctttatttgctcaccgtgaagatggacctggaatcccagcggatattaaactttttgatatattttcacagcaggtggctacagtgatacagtctagacaagacatgccttcagaggatgttgtatctttacaagtctctctgattaatcttgccatgaaatgttaccctgatcgtgtggactatgttgataaagttctagaaacaacagtggagatattcaataagctcaaccttgaacatattgctaccagtagtgcagtttcaaaggaactcaccagacttttgaaaataccagttgacacttacaacaatattttaacagtcttgaaattaaaacattttcacccactctttgagtactttgactacgagtccagaaagagcatgagttgttatgtgcttagtaatgttctggattataacacagaaattgtctctcaagaccaggtggattccataatgaatttggtatccacgttgattcaagatcagccagatcaacctgtagaagaccctgatccagaagattttgctgatgagcagagccttgtgggccgcttcattcatctgctgcgctctgaggaccctgaccagcagtacttgattttgaacacagcacgaaaacattttggagctggtggaaatcagcggattcgcttcacactgccacctttggtatttgcagcttaccagctggcttttcgatataaagagaattctaaagtggatcatttcggggggggatnctctaggaga

SEQ ID NO: 361922 - DNA, 3157 bp, Homo sapiens
cacctagtttatgcagtttgtgtttctgccagtaccagatagagatgtgcacaggtgctcacagctcggccctgtatcaggcagaaacacggacaaaaatggggaggagcttcacggaggcaagagggtaatggagtgcctaaaaaaagctctaaaaatagcaaatcagtgcatggacccctctctacaagtgcagctttttatagaaattctgaacagatatatctatttttatgaaaaggaaaatgatgcggtaacaattcaggttttaaaccagcttatccaaaagattcgagaagacctcccgaatcttgaatccagtgaagaaacagagcagattaacaaacattttcataacacactggagcatttgcgcttgcggcgggaatcaccagaatccgaggggccaatttatgaaggtctcatcctttaaaaaggaaatagctcaccatactcctttccatgtacatccagtgagggttttattacgctaggtttcccttccatagattgtgcctttcagaaatgctgaggtaggtttcccatttcttacctgtgatgtgttttacccagcacctccggacactcaccttcaggaccttaataaaattattcacttggtaagtgttcaagtctttctgatcaccccaagtagcatgactgatctgcaatttaaaattcctgtgatctgtaaaaaaaaaaaaaaaaaaaaaaaaaacaaaacccacaagcacttatcttggctactaatgaagctctccttttttttgtttgtttgtttgcttcattgttgattgtgtattttcttcattcctggggagtactaacccaaaagcgtctgtctcttgttttctagtccagtttgagattaatttagaagaaaggaatactgtatgtgaaattcatcttgggctttcccctaaattgcaagataaggccatgtgtaagattttccctaaaactagaatatattaatgcatgtttgagaattttaaagcaccatggtcaaaaccagaagctatattttgcatatttggactcagccatccattaagaacccatgttgtcctctggacatatttatcaatataattgggttttaaatagtataaaagaaaacttgtgatctatataatttatgtatcaccttcattgtaaatttagcaggaaatgcatcacaattatgatttttttttttgcaccagtgaaacaataaagatgctattaacaattttggagctttttttcccctttcatactatctttaattgataaaaagaactagtagtatggctatagagtttaatagtcattctcatatattcacagagctcacttaactctagttttaagcacttgttgaacaaggcagcatctactcttttagtcatttataccccttttctttcctcaactttaccctgcttttcccaaggcatgatgaattcacataaaccccccaaaggctcaccactgatactagttacctactatataataaaccatcccaaaacttactgtcttaaaacagcaaacatttatctcacaggtctctggatcaggaatttgggagcagcttagctggtggttctggcaaagagtgtggtgtaaggttgcaaacaagatactggttggggctgcagtcatctgatgctttgactggggctgacttttctgctcactgacctggctgttaggcagaggccccagttcctcttcttgagggcagaggccccagttcctctccttgagggcagaggcctaagttcctttccttgagggcagaggccccagttcctctccttgacggcccttccatagagtgtcctcacagcatggtggctggctttcccctgagtatgaaagcaagaaggaaaccacagtgcctttcagtggcctccctgtggaagtgacatgctcatttttgccttattctgtaagtggggagtcactaagtctagcctatattcaagggtaaggagagttaagctccacctcttaaagggaaaatttatagacattttcaaatgactacatcacttaacccctcaccatctgccctcccattgctagcacttgatgactagcccttgctgggctttacatgaacagatgtttcccaaagttataaaattagtaccactaaaatgtatcaaatgttaagccattctgtggtatgtcatagtccagcaaaccctttctgttctttgtaggtgttagtttaccccgtataaacctgattatggcttgacatgtccatattatttacatgttttgtgaaatacaactggaatagtagaaaagacatgagtcaagaacacttgagttggagagcttggtttgcaagtaaggtaatgtcagtacagtgtgtaaattatctcttattttctgggttgaggtaaacccaattttaaaaataataaaccaacaaaagtaaataaaagtgaaacaaaagcactgctagtatccttaacttacagattttttttgttgaacaaaaactgggtaccagatatagttaggcactgaatctaaaggtgaagaagatcatagcctctagcttcaagaacgttagtctgctgtgaagacagacctgtagttacagaagatggtaagggtttgtgcaggagagcagtgaagaagagctttgagggattggggatggggaagttctgcagagggttgtatgaattctcatggaacatcaagtccaatagtttatttagccttctgaggccagtgctttggcctgcagtcccaggctcctcagacccatgggctgaagcaagttatactcttggctgcctgtagtgaaatagatatttagaaattgacttagcatttaaaaccctttatagcaatttgacagagtaattttatgtctattggatgtaataaatatttggctttgtttccatgtacatccagtgagggttttattacgctaggtttcccttccatagattgtgcctttcaaaaatgctgaggtaggtttcccatttcttacctgtgatgtgttttacccagcacctccgcacacataacattcaggaccttaataaaattattcacttggtaagtgttcaagtctttctgatcaccccaagtagcatgactgatctgcaatttaaaattcctgtgatctgtaaaaaaaaaa

SEQ ID NO: 361923 - DNA, 2559 bp, Homo sapiens
ggggtcccccggggggtggggggggggcgcccccgccgcgcccccgggagcccccgcccccccccaaaaaaaaaaaaaaaaaaaaaaaaaaaaaaaaaaaaaaaaaaaaaaaaaaaaaaacaaaacccacaagcacttatcttggctactaatgaagctctccttttttttgtttgtttgtttgcttcattgttgattgtgtattttcttcattcctggggagtactaacccaaaagcgtctgtctcttgttttctagtccagtttgagattaatttagaagaaaggaatactgtatgtgaaattcatcttgggctttcccctaaattgcaagataaggccatgtgtaagattttccctaaaactagaatatattaatgcatgtttgagaattttaaagcaccatggtcaaaaccagaagctatattttgcatatttggactcagccatccattaagaacccatgttgtcctctggacatatttatcaatataattgggttttaaatagtataaaagaaaacttgtgatctatataatttatgtatcaccttcattgtaaatttagcaggaaatgcatcacaattatgatttttttttttgcaccagtgaaacaataaagatgctattaacaattttggagctttttttcccctttcatactatctttaattgataaaaagaactagtagtatggctatagagtttaatagtcattctcatatattcacagagctcacttaactctagttttaagcacttgttgaacaaggcagcatctactcttttagtcatttataccccttttctttcctcaactttaccctgcttttcccaaggcatgatgaattcacataaaccccccaaaggctcaccactgatactagttacctactatataataaaccatcccaaaacttactgtcttaaaacagcaaacatttatctcacaggtctctggatcaggaatttgggagcagcttagctggtggttctggcaaagagtgtggtgtaaggttgcaaacaagatactggttggggctgcagtcatctgatgctttgactggggctgacttttctgctcactgacctggctgttaggcagaggccccagttcctcttcttgagggcagaggccccagttcctctccttgagggcagaggcctaagttcctttccttgagggcagaggccccagttcctctccttgacggcccttccatagagtgtcctcacagcatggtggctggctttcccctgagtatgaaagcaagaaggaaaccacagtgcctttcagtggcctccctgtggaagtgacatgctcatttttgccttattctgtaagtggggagtcactaagtctagcctatattcaagggtaaggagagttaagctccacctcttaaagggaaaatttatagacattttcaaatgactacatcacttaacccctcaccatctgccctcccattgctagcacttgatgactagcccttgctgggctttacatgaacagatgtttcccaaagttataaaattagtaccactaaaatgtatcaaatgttaagccattctgtggtatgtcatagtccagcaaaccctttctgttctttgtaggtgttagtttaccccgtataaacctgattatggcttgacatgtccatattatttacatgttttgtgaaatacaactggaatagtagaaaagacatgagtcaagaacacttgagttggagagcttggtttgcaagtaaggtaatgtcagtacagtgtgtaaattatctcttattttctgggttgaggtaaacccaattttaaaaataataaaccaacaaaagtaaataaaagtgaaacaaaagcactgctagtatccttaacttacagattttttttgttgaacaaaaactgggtaccagatatagttaggcactgaatctaaaggtgaagaagatcatagcctctagcttcaagaacgttagtctgctgtgaagacagacctgtagttacagaagatggtaagggtttgtgcaggagagcagtgaagaagagctttgagggattggggatggggaagttctgcagagggttgtatgaattctcatggaacatcaagtccaatagtttatttagccttctgaggccagtgctttggcctgcagtcccaggctcctcagacccatgggctgaagcaagttatactcttggctgcctgtagtgaaatagatatttagaaattgacttagcatttaaaaccctttatagcaatttgacagagtaattttatgtctattggatgtaataaatatttggctttgtttccatgtacatccagtgagggttttattacgctaggtttcccttccatagattgtgcctttcaaaaatgctgaggtaggtttcccatttcttacctgtgatgtgttttacccagcacctccgcacacataacattcaggaccttaataaaattattcacttggtaagtgttcaagtctttctgatcaccccaagtagcatgactgatctgcaatttaaaattcctgtgatctgtaaaaaaaaaa

SEQ ID NO: 361924 - DNA, 2234 bp, Homo sapiens
ttgctccctggggactctaaaactaggtgctattgaaacttctaaaactcctagtttttagaagtttccatagccaccatggtcaaaaccagaagctatattttgcatatttggactcagccatccattaagaacccatgttgtcctctggacatatttatcaatataattgggttttaaatagtataaaagaaaacttgtgatctatataatttatgtatcaccttcattgtaaatttagcaggaaatgcatcacaattatgatttttttttttgcaccagtgaaacaataaagatgctattaacaattttggagctttttttcccctttcatactatctttaattgataaaaagaactagtagtatggctatagagtttaatagtcattctcatatattcacagagctcacttaactctagttttaagcacttgttgaacaaggcagcatctactcttttagtcatttataccccttttctttcctcaactttaccctgcttttcccaaggcatgatgaattcacataaaccccccaaaggctcaccactgatactagttacctactatataataaaccatcccaaaacttactgtcttaaaacagcaaacatttatctcacaggtctctggatcaggaatttgggagcagcttagctggtggttctggcaaagagtgtggtgtaaggttgcaaacaagatactggttggggctgcagtcatctgatgctttgactggggctgacttttctgctcactgacctggctgttaggcagaggccccagttcctcttcttgagggcagaggccccagttcctctccttgagggcagaggcctaagttcctttccttgagggcagaggccccagttcctctccttgacggcccttccatagagtgtcctcacagcatggtggctggctttcccctgagtatgaaagcaagaaggaaaccacagtgcctttcagtggcctccctgtggaagtgacatgctcatttttgccttattctgtaagtggggagtcactaagtctagcctatattcaagggtaaggagagttaagctccacctcttaaagggaaaatttatagacattttcaaatgactacatcacttaacccctcaccatctgccctcccattgctagcacttgatgactagcccttgctgggctttacatgaacagatgtttcccaaagttataaaattagtaccactaaaatgtatcaaatgttaagccattctgtggtatgtcatagtccagcaaaccctttctgttctttgtaggtgttagtttaccccgtataaacctgattatggcttgacatgtccatattatttacatgttttgtgaaatacaactggaatagtagaaaagacatgagtcaagaacacttgagttggagagcttggtttgcaagtaaggtaatgtcagtacagtgtgtaaattatctcttattttctgggttgaggtaaacccaattttaaaaataataaaccaacaaaagtaaataaaagtgaaacaaaagcactgctagtatccttaacttacagattttttttgttgaacaaaaactgggtaccagatatagttaggcactgaatctaaaggtgaagaagatcatagcctctagcttcaagaacgttagtctgctgtgaagacagacctgtagttacagaagatggtaagggtttgtgcaggagagcagtgaagaagagctttgagggattggggatggggaagttctgcagagggttgtatgaattctcatggaacatcaagtccaatagtttatttagccttctgaggccagtgctttggcctgcagtcccaggctcctcagacccatgggctgaagcaagttatactcttggctgcctgtagtgaaatagatatttagaaattgacttagcatttaaaaccctttatagcaatttgacagagtaattttatgtctattggatgtaataaatatttggctttgtttccatgtacatccagtgagggttttattacgctaggtttcccttccatagattgtgcctttcaaaaatgctgaggtaggtttcccatttcttacctgtgatgtgttttacccagcacctccgcacacataacattcaggaccttaataaaattattcacttggtaagtgttcaagtctttctgatcaccccaagtagcatgactgatctgcaatttaaaattcctgtgatctgtaaaaaaaaaa

SEQ ID NO: 361925 - DNA, 2041 bp, Homo sapiens
cagccccaaccagtatcttgtttgcaacctcacaccacactctttgccagaaccaccagctaagctgctcccaaattcctgatccagagacctgtgagataaatgtttgctgttttaagacagtaagttttgggatggtttattatatagtaggtcactagtatcagtggtgagcctttggggagtttaatagtcattctcatatattcacagagctcacttaactctagttttaagcacttgttgaacaaggcagcatctactcttttagtcatttataccccttttctttcctcaactttaccctgcttttcccaaggcatgatgaattcacataaaccccccaaaggctcaccactgatactagttacctactatataataaaccatcccaaaacttactgtcttaaaacagcaaacatttatctcacaggtctctggatcaggaatttgggagcagcttagctggtggttctggcaaagagtgtggtgtaaggttgcaaacaagatactggttggggctgcagtcatctgatgctttgactggggctgacttttctgctcactgacctggctgttaggcagaggccccagttcctcttcttgagggcagaggccccagttcctctccttgagggcagaggcctaagttcctttccttgagggcagaggccccagttcctctccttgacggcccttccatagagtgtcctcacagcatggtggctggctttcccctgagtatgaaagcaagaaggaaaccacagtgcctttcagtggcctccctgtggaagtgacatgctcatttttgccttattctgtaagtggggagtcactaagtctagcctatattcaagggtaaggagagttaagctccacctcttaaagggaaaatttatagacattttcaaatgactacatcacttaacccctcaccatctgccctcccattgctagcacttgatgactagcccttgctgggctttacatgaacagatgtttcccaaagttataaaattagtaccactaaaatgtatcaaatgttaagccattctgtggtatgtcatagtccagcaaaccctttctgttctttgtaggtgttagtttaccccgtataaacctgattatggcttgacatgtccatattatttacatgttttgtgaaatacaactggaatagtagaaaagacatgagtcaagaacacttgagttggagagcttggtttgcaagtaaggtaatgtcagtacagtgtgtaaattatctcttattttctgggttgaggtaaacccaattttaaaaataataaaccaacaaaagtaaataaaagtgaaacaaaagcactgctagtatccttaacttacagattttttttgttgaacaaaaactgggtaccagatatagttaggcactgaatctaaaggtgaagaagatcatagcctctagcttcaagaacgttagtctgctgtgaagacagacctgtagttacagaagatggtaagggtttgtgcaggagagcagtgaagaagagctttgagggattggggatggggaagttctgcagagggttgtatgaattctcatggaacatcaagtccaatagtttatttagccttctgaggccagtgctttggcctgcagtcccaggctcctcagacccatgggctgaagcaagttatactcttggctgcctgtagtgaaatagatatttagaaattgacttagcatttaaaaccctttatagcaatttgacagagtaattttatgtctattggatgtaataaatatttggctttgtttccatgtacatccagtgagggttttattacgctaggtttcccttccatagattgtgcctttcaaaaatgctgaggtaggtttcccatttcttacctgtgatgtgttttacccagcacctccgcacacataacattcaggaccttaataaaattattcacttggtaagtgttcaagtctttctgatcaccccaagtagcatgactgatctgcaatttaaaattcctgtgatctgtaaaaaaaaaa

SEQ ID NO: 361926 - DNA, 5184 bp, Homo sapiens
agcgtcacatgaccgcgggaggctacgcgcggggcgggtgctgcttgctgcaggctctggggagtcgccatgcctacaacacagcagtcccctcaggatgagcaggaaaagctcttggatgaagccatacaggctgtgaaggtccagtcattccaaatgaagagatgcctggacaaaaacaagcttatggatgctctaaaacatgcttctaatatgcttggtgaactccggacttctatgttatcaccaaagagttactatgaactttatatggccatttctgatgaactgcactacttggaggtctacctgacagatgagtttgctaaaggaaggaaagtggcagatctctacgaacttgtacagtatgctggaaacattatcccaaggctttaccttttgatcacagttggagttgtatatgtcaagtcatttcctcagtccaggaaggatattttgaaagatttggtagaaatgtgccgtggtgtgcaacatcccttgaggggtctgtttcttcgaaattaccttcttcagtgtaccagaaatatcttacctgatgaaggagagccaacagatgaagaaacaactggtgacatcagtgattccatggattttgtactgctcaactttgcagaaatgaacaagctctgggtgcgaatgcagcatcagggacatagccgagatagagaaaaaagagaacgagaaagacaagaactgagaattttagtgggaacaaatttggtgcgcctcagtcagttggaaggtgtaaatgtggaacgttacaaacagattgttttgactggcatattggagcaagttgtaaactgtagggatgctttggctcaagaatatctcatggagtgtattattcaggttttccctgatgaatttcacctccagactttgaatccttttcttcgggcctgtgctgagttacaccagaatgtaaatgtgaagaacataatcattgctttaattgatagattagctttatttgctcaccgtgaagatggacctggaatcccagcggatattaaactttttgatatattttcacagcaggtggctacagtgatacagtctagacaagacatgccttcagaggatgttgtatctttacaagtctctctgattaatcttgccatgaaatgttaccctgatcgtgtggactatgttgataaagttctagaaacaacagtggagatattcaataagctcaaccttgaacatattgctaccagtagtgcagtttcaaaggaactcaccagacttttgaaaataccagttgacacttacaacaatattttaacagtcttgaaattaaaacattttcacccactctttgagtactttgactacgagtccagaaagagcatgagttgttatgtgcttagtaatgttctggattataacacagaaattgtctctcaagaccaggtggattccataatgaatttggtatccacgttgattcaagatcagccagatcaacctgtagaagaccctgatccagaagattttgctgatgagcagagccttgtgggccgcttcattcatctgctgcgctctgaggaccctgaccagcagtacttgattttgaacacagcacgaaaacattttggagctggtggaaatcagcggattcgcttcacactgccacctttggtatttgcagcttaccagctggcttttcgatataaagagaattctaaagtggatgacaaatgggaaaagaaatgccagaagattttttcatttgcccaccagactatcagtgctttgatcaaagcagagctggcagaattgcccttaagactttttcttcaaggagcactagctgctggggaaattggttttgaaaatcatgagacagtcgcatatgaattcatgtcccaggcattttctctgtatgaagatgaaatcagcgattccaaagcacagctagctgccatcaccttgatcattggcacttttgaaaggatgaagtgcttcagtgaagagaatcatgaacctctgaggactcagtgtgcccttgctgcatccaaacttctaaagaaacctgatcagggccgagctgtgagcacctgtgcacatctcttctggtctggcagaaacacggacaaaaatggggaggagcttcacggaggcaagagggtaatggagtgcctaaaaaaagctctaaaaatagcaaatcagtgcatggacccctctctacaagtgcagctttttatagaaattctgaacagatatatctatttttatgaaaaggaaaatgatgcggtaacaattcaggttttaaaccagcttatccaaaagattcgagaagacctcccgaatcttgaatccagtgaagaaacagagcagattaacaaacattttcataacacactggagcatttgcgcttgcggcgggaatcaccagaatccgaggggccaatttatgaaggtctcatcctttaaaaaggaaatagctcaccatactcctttccatgtacatccagtgagggttttattacgctaggtttcccttccatagattgtgcctttcagaaatgctgaggtaggtttcccatttcttacctgtgatgtgttttacccagcacctccggacactcaccttcaggaccttaataaaattattcacttggtaagtgttcaagtctttctgatcaccccaagtagcatgactgatctgcaatttaaaattcctgtgatctgtaaaaaaaaaaaaaaaaaaaaaaaaaacaaaacccacaagcacttatcttggctactaatgaagctctccttttttttgtttgtttgtttgcttcattgttgattgtgtattttcttcattcctggggagtactaacccaaaagcgtctgtctcttgttttctagtccagtttgagattaatttagaagaaaggaatactgtatgtgaaattcatcttgggctttcccctaaattgcaagataaggccatgtgtaagattttccctaaaactagaatatattaatgcatgtttgagaattttaaagcaccatggtcaaaaccagaagctatattttgcatatttggactcagccatccattaagaacccatgttgtcctctggacatatttatcaatataattgggttttaaatagtataaaagaaaacttgtgatctatataatttatgtatcaccttcattgtaaatttagcaggaaatgcatcacaattatgatttttttttttgcaccagtgaaacaataaagatgctattaacaattttggagctttttttcccctttcatactatctttaattgataaaaagaactagtagtatggctatagagtttaatagtcattctcatatattcacagagctcacttaactctagttttaagcacttgttgaacaaggcagcatctactcttttagtcatttataccccttttctttcctcaactttaccctgcttttcccaaggcatgatgaattcacataaaccccccaaaggctcaccactgatactagttacctactatataataaaccatcccaaaacttactgtcttaaaacagcaaacatttatctcacaggtctctggatcaggaatttgggagcagcttagctggtggttctggcaaagagtgtggtgtaaggttgcaaacaagatactggttggggctgcagtcatctgatgctttgactggggctgacttttctgctcactgacctggctgttaggcagaggccccagttcctcttcttgagggcagaggccccagttcctctccttgagggcagaggcctaagttcctttccttgagggcagaggccccagttcctctccttgacggcccttccatagagtgtcctcacagcatggtggctggctttcccctgagtatgaaagcaagaaggaaaccacagtgcctttcagtggcctccctgtggaagtgacatgctcatttttgccttattctgtaagtggggagtcactaagtctagcctatattcaagggtaaggagagttaagctccacctcttaaagggaaaatttatagacattttcaaatgactacatcacttaacccctcaccatctgccctcccattgctagcacttgatgactagcccttgctgggctttacatgaacagatgtttcccaaagttataaaattagtaccactaaaatgtatcaaatgttaagccattctgtggtatgtcatagtccagcaaaccctttctgttctttgtaggtgttagtttaccccgtataaacctgattatggcttgacatgtccatattatttacatgttttgtgaaatacaactggaatagtagaaaagacatgagtcaagaacacttgagttggagagcttggtttgcaagtaaggtaatgtcagtacagtgtgtaaattatctcttattttctgggttgaggtaaacccaattttaaaaataataaaccaacaaaagtaaataaaagtgaaacaaaagcactgctagtatccttaacttacagattttttttgttgaacaaaaactgggtaccagatatagttaggcactgaatctaaaggtgaagaagatcatagcctctagcttcaagaacgttagtctgctgtgaagacagacctgtagttacagaagatggtaagggtttgtgcaggagagcagtgaagaagagctttgagggattggggatggggaagttctgcagagggttgtatgaattctcatggaacatcaagtccaatagtttatttagccttctgaggccagtgctttggcctgcagtcccaggctcctcagacccatgggctgaagcaagttatactcttggctgcctgtagtgaaatagatatttagaaattgacttagcatttaaaaccctttatagcaatttgacagagtaattttatgtctattggatgtaataaatatttggctttgtttccatgtacatccagtgagggttttattacgctaggtttcccttccatagattgtgcctttcaaaaatgctgaggtaggtttcccatttcttacctgtgatgtgttttacccagcacctccgcacacataacattcaggaccttaataaaattattcacttggtaagtgttcaagtctttctgatcaccccaagtagcatgactgatctgcaatttaaaattcctgtgatctgtaaaaaaaaaa

SEQ ID NO: 361927 - DNA, 3303 bp, Homo sapiens
  misc_feature (3285)..(3285): n is a, c, g, or t
agcgtcacatgaccgcgggaggctacgcgcggggcgggtgctgcttgctgcaggctctggggagtcgccatgcctacaacacagcagtcccctcaggatgagcaggaaaagctcttggatgaagccatacaggctgtgaaggtccagtcattccaaatgaagagatgcctggacaaaaacaagcttatggatgctctaaaacatgcttctaatatgcttggtgaactccggacttctatgttatcaccaaagagttactatgaactttatatggccatttctgatgaactgcactacttggaggtctacctgacagatgagtttgctaaaggaaggaaagtggcagatctctacgaacttgtacagtatgctggaaacattatcccaaggctttaccttttgatcacagttggagttgtatatgtcaagtcatttcctcagtccaggaaggatattttgaaagatttggtagaaatgtgccgtggtgtgcaacatcccttgaggggtctgtttcttcgaaattaccttcttcagtgtaccagaaatatcttacctgatgaaggagagccaacagatgaagaaacaactggtgacatcagtgattccatggattttgtactgctcaactttgcagaaatgaacaagctctgggtgcgaatgcagcatcagggacatagccgagatagagaaaaaagagaacgagaaagacaagaactgagaattttagtgggaacaaatttggtgcgcctcagtcagttggaaggtgtaaatgtggaacgttacaaacagattgttttgactggcatattggagcaagttgtaaactgtagggatgctttggctcaagaatatctcatggagtgtattattcaggttttccctgatgaatttcacctccagactttgaatccttttcttcgggcctgtgctgagttacaccagaatgtaaatgtgaagaacataatcattgctttaattgatagattagctttatttgctcaccgtgaagatggacctggaatcccagcggatattaaactttttgatatattttcacagcaggtggctacagtgatacagtctagacaagacatgccttcagaggatgttgtatctttacaagtctctctgattaatcttgccatgaaatgttaccctgatcgtgtggactatgttgataaagttctagaaacaacagtggagatattcaataagctcaaccttgaacatattgctaccagtagtgcagtttcaaaggaactcaccagacttttgaaaataccagttgacacttacaacaatattttaacagtcttgaaattaaaacattttcacccactctttgagtactttgactacgagtccagaaagagcatgagttgttatgtgcttagtaatgttctggattataacacagaaattgtctctcaagaccaggtggattccataatgaatttggtatccacgttgattcaagatcagccagatcaacctgtagaagaccctgatccagaagattttgctgatgagcagagccttgtgggccgcttcattcatctgctgcgctctgaggaccctgaccagcagtacttgattttgaacacagcacgaaaacattttggagctggtggaaatcagcggattcgcttcacactgccacctttggtatttgcagcttaccagctggcttttcgatataaagagaattctaaagtggatgacaaatgggaaaagaaatgccagaagattttttcatttgcccaccagactatcagtgctttgatcaaagcagagctggcagaattgcccttaagactttttcttcaaggagcactagctgctggggaaattggttttgaaaatcatgagacagtcgcatatgaattcatgtcccaggcattttctctgtatgaagatgaaatcagcgattccaaagcacagctagctgccatcaccttgatcattggcacttttgaaaggatgaagtgcttcagtgaagagaatcatgaacctctgaggactcagtgtgcccttgctgcatccaaacttctaaagaaacctgatcagggccgagctgtgagcacctgtgcacatctcttctggtctggcagaaacacggacaaaaatggggaggagcttcacggaggcaagagggtaatggagtgcctaaaaaaagctctaaaaatagcaaatcagtgcatggacccctctctacaagtgcagctttttatagaaattctgaacagatatatctatttttatgaaaaggaaaatgatgcggtaacaattcaggttttaaaccagcttatccaaaagattcgagaagacctcccgaatcttgaatccagtgaagaaacagagcagattaacaaacattttcataacacactggagcatttgcgcttgcggcgggaatcaccagaatccgaggggccaatttatgaaggtctcatcctttaaaaaggaaatagctcaccatactcctttccatgtacatccagtgagggttttattacgctaggtttcccttccatagattgtgcctttcagaaatgctgaggtaggtttcccatttcttacctgtgatgtgttttacccagcacctccggacactcaccttcaggaccttaataaaattattcacttggtaagtgttcaagtctttctgatcaccccaagtagcatgactgatctgcaatttaaaattcctgtgatctgtaaaaaaaaaaaaaaaaaaaaaaaaaacaaaacccacaagcacttatcttggctactaatgaagctctccttttttttgtttgtttgtttgcttcattgttgattgtgtattttcttcattcctggggagtactaacccaaaagcgtctgtctcttgttttctagtccagtttgagattaatttagaagaaaggaatactgtatgtgaaattcatcttgggctttcccctaaattgcaagataaggccatgtgtaagattttccctaaaactagaatatattaatgcatgtttgagaattttaaagcaccatggtcaaaaccagaagctatattttgcatatttggactcagccatccattaagaacccatgttgtcctctggacatatttatcaatataattgggttttaaatagtataaaagaaaacttgtgatctatataatttatgtatcaccttcattgtaaatttagcaggaaatgcatcacaattatgatttttttttttgcaccagtgaaacaataaagatgctattgaaacttctaaaactaggggtaccggctcgantcgtatctgctctttctt

SEQ ID NO: 361928 - DNA, 5919 bp, Homo sapiens
agggggcagtggcacctgggtcgaccctccttgtagcccctgctctctcccaccgccccgcactccagcgagtggagaaggggccccacagaccgttcgggattaagaccagcccgatttggcctgcgggataggggacagcaggaggaaggccgcgggcaggctgatccgggccggggtgggcggcggctcttggctgcggccgttgctgagagacggggcggcctctctgtggggttgacttggcatgtaggctttggggtccatgaaggcctgcggcctcctttaagtggaatcggtcacctgcctaccacgaggggaccggtagtcctaggtctgagcgtctggcccccggggcgcgtggaggccctgagactcggaggtggcgccgggacccgcccagatgttgcgtttctacctttgtgcctagttgtgctcggccgtccccacgccctcctggaggggtcgcagtgattccttggcctttcttggcctcatacccgccttcggctgcagtgtttgtcagcgagttctggggacctgcttacatgaatttcctggaaggactcaggctgtcttctaatcctgacggtcgcaaaggagactgattgtttactttagcatttgtgcattgggcgcaccttgcctcttttgtctcgccattgataaaatccaagtatttgacttgctggaagcagtacttctccttagggcccgtctatgacggcagcaaatcgtggtgtggctgttggccggtaaacttgaacttcctcaaaatgtgaatctttgtgtctggttcccacaaagcctacaacacagcagtcccctcaggatgagcaggaaaagctcttggatgaagccatacaggctgtgaaggtccagtcattccaaatgaagagatgcctggacaaaaacaagcttatggatgctctaaaacatgcttctaatatgcttggtgaactccggacttctatgttatcaccaaagagttactatgaactttatatggccatttctgatgaactgcactacttggaggtctacctgacagatgagtttgctaaaggaaggaaagtggcagatctctacgaacttgtacagtatgctggaaacattatcccaaggctttaccttttgatcacagttggagttgtatatgtcaagtcatttcctcagtccaggaaggatattttgaaagatttggtagaaatgtgccgtggtgtgcaacatcccttgaggggtctgtttcttcgaaattaccttcttcagtgtaccagaaatatcttacctgatgaaggagagccaacagatgaagaaacaactggtgacatcagtgattccatggattttgtactgctcaactttgcagaaatgaacaagctctgggtgcgaatgcagcatcagggacatagccgagatagagaaaaaagagaacgagaaagacaagaactgagaattttagtgggaacaaatttggtgcgcctcagtcagttggaaggtgtaaatgtggaacgttacaaacagattgttttgactggcatattggagcaagttgtaaactgtagggatgctttggctcaagaatatctcatggagtgtattattcaggttttccctgatgaatttcacctccagactttgaatccttttcttcgggcctgtgctgagttacaccagaatgtaaatgtgaagaacataatcattgctttaattgatagattagctttatttgctcaccgtgaagatggacctggaatcccagcggatattaaactttttgatatattttcacagcaggtggctacagtgatacagtctagacaagacatgccttcagaggatgttgtatctttacaagtctctctgattaatcttgccatgaaatgttaccctgatcgtgtggactatgttgataaagttctagaaacaacagtggagatattcaataagctcaaccttgaacatattgctaccagtagtgcagtttcaaaggaactcaccagacttttgaaaataccagttgacacttacaacaatattttaacagtcttgaaattaaaacattttcacccactctttgagtactttgactacgagtccagaaagagcatgagttgttatgtgcttagtaatgttctggattataacacagaaattgtctctcaagaccaggtggattccataatgaatttggtatccacgttgattcaagatcagccagatcaacctgtagaagaccctgatccagaagattttgctgatgagcagagccttgtgggccgcttcattcatctgctgcgctctgaggaccctgaccagcagtacttgattttgaacacagcacgaaaacattttggagctggtggaaatcagcggattcgcttcacactgccacctttggtatttgcagcttaccagctggcttttcgatataaagagaattctaaagtggatgacaaatgggaaaagaaatgccagaagattttttcatttgcccaccagactatcagtgctttgatcaaagcagagctggcagaattgcccttaagactttttcttcaaggagcactagctgctggggaaattggttttgaaaatcatgagacagtcgcatatgaattcatgtcccaggcattttctctgtatgaagatgaaatcagcgattccaaagcacagctagctgccatcaccttgatcattggcacttttgaaaggatgaagtgcttcagtgaagagaatcatgaacctctgaggactcagtgtgcccttgctgcatccaaacttctaaagaaacctgatcagggccgagctgtgagcacctgtgcacatctcttctggtctggcagaaacacggacaaaaatggggaggagcttcacggaggcaagagggtaatggagtgcctaaaaaaagctctaaaaatagcaaatcagtgcatggacccctctctacaagtgcagctttttatagaaattctgaacagatatatctatttttatgaaaaggaaaatgatgcggtaacaattcaggttttaaaccagcttatccaaaagattcgagaagacctcccgaatcttgaatccagtgaagaaacagagcagattaacaaacattttcataacacactggagcatttgcgcttgcggcgggaatcaccagaatccgaggggccaatttatgaaggtctcatcctttaaaaaggaaatagctcaccatactcctttccatgtacatccagtgagggttttattacgctaggtttcccttccatagattgtgcctttcagaaatgctgaggtaggtttcccatttcttacctgtgatgtgttttacccagcacctccggacactcaccttcaggaccttaataaaattattcacttggtaagtgttcaagtctttctgatcaccccaagtagcatgactgatctgcaatttaaaattcctgtgatctgtaaaaaaaaaaaaaaaaaaaaaaaaaacaaaacccacaagcacttatcttggctactaatgaagctctccttttttttgtttgtttgtttgcttcattgttgattgtgtattttcttcattcctggggagtactaacccaaaagcgtctgtctcttgttttctagtccagtttgagattaatttagaagaaaggaatactgtatgtgaaattcatcttgggctttcccctaaattgcaagataaggccatgtgtaagattttccctaaaactagaatatattaatgcatgtttgagaattttaaagcaccatggtcaaaaccagaagctatattttgcatatttggactcagccatccattaagaacccatgttgtcctctggacatatttatcaatataattgggttttaaatagtataaaagaaaacttgtgatctatataatttatgtatcaccttcattgtaaatttagcaggaaatgcatcacaattatgatttttttttttgcaccagtgaaacaataaagatgctattaacaattttggagctttttttcccctttcatactatctttaattgataaaaagaactagtagtatggctatagagtttaatagtcattctcatatattcacagagctcacttaactctagttttaagcacttgttgaacaaggcagcatctactcttttagtcatttataccccttttctttcctcaactttaccctgcttttcccaaggcatgatgaattcacataaaccccccaaaggctcaccactgatactagttacctactatataataaaccatcccaaaacttactgtcttaaaacagcaaacatttatctcacaggtctctggatcaggaatttgggagcagcttagctggtggttctggcaaagagtgtggtgtaaggttgcaaacaagatactggttggggctgcagtcatctgatgctttgactggggctgacttttctgctcactgacctggctgttaggcagaggccccagttcctcttcttgagggcagaggccccagttcctctccttgagggcagaggcctaagttcctttccttgagggcagaggccccagttcctctccttgacggcccttccatagagtgtcctcacagcatggtggctggctttcccctgagtatgaaagcaagaaggaaaccacagtgcctttcagtggcctccctgtggaagtgacatgctcatttttgccttattctgtaagtggggagtcactaagtctagcctatattcaagggtaaggagagttaagctccacctcttaaagggaaaatttatagacattttcaaatgactacatcacttaacccctcaccatctgccctcccattgctagcacttgatgactagcccttgctgggctttacatgaacagatgtttcccaaagttataaaattagtaccactaaaatgtatcaaatgttaagccattctgtggtatgtcatagtccagcaaaccctttctgttctttgtaggtgttagtttaccccgtataaacctgattatggcttgacatgtccatattatttacatgttttgtgaaatacaactggaatagtagaaaagacatgagtcaagaacacttgagttggagagcttggtttgcaagtaaggtaatgtcagtacagtgtgtaaattatctcttattttctgggttgaggtaaacccaattttaaaaataataaaccaacaaaagtaaataaaagtgaaacaaaagcactgctagtatccttaacttacagattttttttgttgaacaaaaactgggtaccagatatagttaggcactgaatctaaaggtgaagaagatcatagcctctagcttcaagaacgttagtctgctgtgaagacagacctgtagttacagaagatggtaagggtttgtgcaggagagcagtgaagaagagctttgagggattggggatggggaagttctgcagagggttgtatgaattctcatggaacatcaagtccaatagtttatttagccttctgaggccagtgctttggcctgcagtcccaggctcctcagacccatgggctgaagcaagttatactcttggctgcctgtagtgaaatagatatttagaaattgacttagcatttaaaaccctttatagcaatttgacagagtaattttatgtctattggatgtaataaatatttggctttgtttccatgtacatccagtgagggttttattacgctaggtttcccttccatagattgtgcctttcaaaaatgctgaggtaggtttcccatttcttacctgtgatgtgttttacccagcacctccgcacacataacattcaggaccttaataaaattattcacttggtaagtgttcaagtctttctgatcaccccaagtagcatgactgatctgcaatttaaaattcctgtgatctgtaaaaaaaaaa

SEQ ID NO: 361929 - DNA, 5144 bp, Homo sapiens
agcgtcacatgaccgcgggaggctacgcgcggggcgggtgctgcttgctgcaggctctggggagtcgccatgcctacaacacagcagtcccctcaggatgagcaggaaaagctcttggatgaagccatacaggctgtgaaggtccagtcattccaaatgaagagatgcctggacaaaaacaagcttatggatgctctaaaacatgcttctaatatgcttggtgaactccggacttctatgttatcaccaaagagttactatgaactttatatggccatttctgatgaactgcactacttggaggtctacctgacagatgagtttgctaaaggaaggaaagtggcagatctctacgaacttgtacagtatgctggaaacattatcccaaggctttaccttttgatcacagttggagttgtatatgtcaagtcatttcctcagtccaggaaggatattttgaaagatttggtagaaatgtgccgtggtgtgcaacatcccttgaggggtctgtttcttcgaaattaccttcttcagtgtaccagaaatatcttacctgatgaaggagagccaacagatgaagaaacaactggtgacatcagtgattccatggattttgtactgctcaactttgcagaaatgaacaagctctgggtgcgaatgcagcatcagggacatagccgagatagagaaaaaagagaacgagaaagacaagtcagttggaaggtgtaaatgtggaacgttacaaacagattgttttgactggcatattggagcaagttgtaaactgtagggatgctttggctcaagaatatctcatggagtgtattattcaggttttccctgatgaatttcacctccagactttgaatccttttcttcgggcctgtgctgagttacaccagaatgtaaatgtgaagaacataatcattgctttaattgatagattagctttatttgctcaccgtgaagatggacctggaatcccagcggatattaaactttttgatatattttcacagcaggtggctacagtgatacagtctagacaagacatgccttcagaggatgttgtatctttacaagtctctctgattaatcttgccatgaaatgttaccctgatcgtgtggactatgttgataaagttctagaaacaacagtggagatattcaataagctcaaccttgaacatattgctaccagtagtgcagtttcaaaggaactcaccagacttttgaaaataccagttgacacttacaacaatattttaacagtcttgaaattaaaacattttcacccactctttgagtactttgactacgagtccagaaagagcatgagttgttatgtgcttagtaatgttctggattataacacagaaattgtctctcaagaccaggtggattccataatgaatttggtatccacgttgattcaagatcagccagatcaacctgtagaagaccctgatccagaagattttgctgatgagcagagccttgtgggccgcttcattcatctgctgcgctctgaggaccctgaccagcagtacttgattttgaacacagcacgaaaacattttggagctggtggaaatcagcggattcgcttcacactgccacctttggtatttgcagcttaccagctggcttttcgatataaagagaattctaaagtggatgacaaatgggaaaagaaatgccagaagattttttcatttgcccaccagactatcagtgctttgatcaaagcagagctggcagaattgcccttaagactttttcttcaaggagcactagctgctggggaaattggttttgaaaatcatgagacagtcgcatatgaattcatgtcccaggcattttctctgtatgaagatgaaatcagcgattccaaagcacagctagctgccatcaccttgatcattggcacttttgaaaggatgaagtgcttcagtgaagagaatcatgaacctctgaggactcagtgtgcccttgctgcatccaaacttctaaagaaacctgatcagggccgagctgtgagcacctgtgcacatctcttctggtctggcagaaacacggacaaaaatggggaggagcttcacggaggcaagagggtaatggagtgcctaaaaaaagctctaaaaatagcaaatcagtgcatggacccctctctacaagtgcagctttttatagaaattctgaacagatatatctatttttatgaaaaggaaaatgatgcggtaacaattcaggttttaaaccagcttatccaaaagattcgagaagacctcccgaatcttgaatccagtgaagaaacagagcagattaacaaacattttcataacacactggagcatttgcgcttgcggcgggaatcaccagaatccgaggggccaatttatgaaggtctcatcctttaaaaaggaaatagctcaccatactcctttccatgtacatccagtgagggttttattacgctaggtttcccttccatagattgtgcctttcagaaatgctgaggtaggtttcccatttcttacctgtgatgtgttttacccagcacctccggacactcaccttcaggaccttaataaaattattcacttggtaagtgttcaagtctttctgatcaccccaagtagcatgactgatctgcaatttaaaattcctgtgatctgtaaaaaaaaaaaaaaaaaaaaaaaaaacaaaacccacaagcacttatcttggctactaatgaagctctccttttttttgtttgtttgtttgcttcattgttgattgtgtattttcttcattcctggggagtactaacccaaaagcgtctgtctcttgttttctagtccagtttgagattaatttagaagaaaggaatactgtatgtgaaattcatcttgggctttcccctaaattgcaagataaggccatgtgtaagattttccctaaaactagaatatattaatgcatgtttgagaattttaaagcaccatggtcaaaaccagaagctatattttgcatatttggactcagccatccattaagaacccatgttgtcctctggacatatttatcaatataattgggttttaaatagtataaaagaaaacttgtgatctatataatttatgtatcaccttcattgtaaatttagcaggaaatgcatcacaattatgatttttttttttgcaccagtgaaacaataaagatgctattaacaattttggagctttttttcccctttcatactatctttaattgataaaaagaactagtagtatggctatagagtttaatagtcattctcatatattcacagagctcacttaactctagttttaagcacttgttgaacaaggcagcatctactcttttagtcatttataccccttttctttcctcaactttaccctgcttttcccaaggcatgatgaattcacataaaccccccaaaggctcaccactgatactagttacctactatataataaaccatcccaaaacttactgtcttaaaacagcaaacatttatctcacaggtctctggatcaggaatttgggagcagcttagctggtggttctggcaaagagtgtggtgtaaggttgcaaacaagatactggttggggctgcagtcatctgatgctttgactggggctgacttttctgctcactgacctggctgttaggcagaggccccagttcctcttcttgagggcagaggccccagttcctctccttgagggcagaggcctaagttcctttccttgagggcagaggccccagttcctctccttgacggcccttccatagagtgtcctcacagcatggtggctggctttcccctgagtatgaaagcaagaaggaaaccacagtgcctttcagtggcctccctgtggaagtgacatgctcatttttgccttattctgtaagtggggagtcactaagtctagcctatattcaagggtaaggagagttaagctccacctcttaaagggaaaatttatagacattttcaaatgactacatcacttaacccctcaccatctgccctcccattgctagcacttgatgactagcccttgctgggctttacatgaacagatgtttcccaaagttataaaattagtaccactaaaatgtatcaaatgttaagccattctgtggtatgtcatagtccagcaaaccctttctgttctttgtaggtgttagtttaccccgtataaacctgattatggcttgacatgtccatattatttacatgttttgtgaaatacaactggaatagtagaaaagacatgagtcaagaacacttgagttggagagcttggtttgcaagtaaggtaatgtcagtacagtgtgtaaattatctcttattttctgggttgaggtaaacccaattttaaaaataataaaccaacaaaagtaaataaaagtgaaacaaaagcactgctagtatccttaacttacagattttttttgttgaacaaaaactgggtaccagatatagttaggcactgaatctaaaggtgaagaagatcatagcctctagcttcaagaacgttagtctgctgtgaagacagacctgtagttacagaagatggtaagggtttgtgcaggagagcagtgaagaagagctttgagggattggggatggggaagttctgcagagggttgtatgaattctcatggaacatcaagtccaatagtttatttagccttctgaggccagtgctttggcctgcagtcccaggctcctcagacccatgggctgaagcaagttatactcttggctgcctgtagtgaaatagatatttagaaattgacttagcatttaaaaccctttatagcaatttgacagagtaattttatgtctattggatgtaataaatatttggctttgtttccatgtacatccagtgagggttttattacgctaggtttcccttccatagattgtgcctttcaaaaatgctgaggtaggtttcccatttcttacctgtgatgtgttttacccagcacctccgcacacataacattcaggaccttaataaaattattcacttggtaagtgttcaagtctttctgatcaccccaagtagcatgactgatctgcaatttaaaattcctgtgatctgtaaaaaaaaaa

SEQ ID NO: 361930 - DNA, 4284 bp, Homo sapiens
  misc_feature (1)..(1): n is a, c, g, or t
ngagttacaccagaatgattatgttcttcacatttacattctggtgtaactgtgaagaacataatcattgctttaattgatagattagctttatttgctcaccgtgaagatggacctggaatcccagcggatattaaactttttgatatattttcacagcaggtggctacagtgatacagtctagacaagacatgccttcagaggatgttgtatctttacaagtctctctgattaatcttgccatgaaatgttaccctgatcgtgtggactatgttgataaagttctagaaacaacagtggagatattcaataagctcaaccttgaacatattgctaccagtagtgcagtttcaaaggaactcaccagacttttgaaaataccagttgacacttacaacaatattttaacagtcttgaaattaaaacattttcacccactctttgagtactttgactacgagtccagaaagagcatgagttgttatgtgcttagtaatgttctggattataacacagaaattgtctctcaagaccaggtggattccataatgaatttggtatccacgttgattcaagatcagccagatcaacctgtagaagaccctgatccagaagattttgctgatgagcagagccttgtgggccgcttcattcatctgctgcgctctgaggaccctgaccagcagtacttgattttgaacacagcacgaaaacattttggagctggtggaaatcagcggattcgcttcacactgccacctttggtatttgcagcttaccagctggcttttcgatataaagagaattctaaagtggatgacaaatgggaaaagaaatgccagaagattttttcatttgcccaccagactatcagtgctttgatcaaagcagagctggcagaattgcccttaagactttttcttcaaggagcactagctgctggggaaattggttttgaaaatcatgagacagtcgcatatgaattcatgtcccaggcattttctctgtatgaagatgaaatcagcgattccaaagcacagctagctgccatcaccttgatcattggcacttttgaaaggatgaagtgcttcagtgaagagaatcatgaacctctgaggactcagtgtgcccttgctgcatccaaacttctaaagaaacctgatcagggccgagctgtgagcacctgtgcacatctcttctggtctggcagaaacacggacaaaaatggggaggagcttcacggaggcaagagggtaatggagtgcctaaaaaaagctctaaaaatagcaaatcagtgcatggacccctctctacaagtgcagctttttatagaaattctgaacagatatatctatttttatgaaaaggaaaatgatgcggtaacaattcaggttttaaaccagcttatccaaaagattcgagaagacctcccgaatcttgaatccagtgaagaaacagagcagattaacaaacattttcataacacactggagcatttgcgcttgcggcgggaatcaccagaatccgaggggccaatttatgaaggtctcatcctttaaaaaggaaatagctcaccatactcctttccatgtacatccagtgagggttttattacgctaggtttcccttccatagattgtgcctttcagaaatgctgaggtaggtttcccatttcttacctgtgatgtgttttacccagcacctccggacactcaccttcaggaccttaataaaattattcacttggtaagtgttcaagtctttctgatcaccccaagtagcatgactgatctgcaatttaaaattcctgtgatctgtaaaaaaaaaaaaaaaaaaaaaaaaaacaaaacccacaagcacttatcttggctactaatgaagctctccttttttttgtttgtttgtttgcttcattgttgattgtgtattttcttcattcctggggagtactaacccaaaagcgtctgtctcttgttttctagtccagtttgagattaatttagaagaaaggaatactgtatgtgaaattcatcttgggctttcccctaaattgcaagataaggccatgtgtaagattttccctaaaactagaatatattaatgcatgtttgagaattttaaagcaccatggtcaaaaccagaagctatattttgcatatttggactcagccatccattaagaacccatgttgtcctctggacatatttatcaatataattgggttttaaatagtataaaagaaaacttgtgatctatataatttatgtatcaccttcattgtaaatttagcaggaaatgcatcacaattatgatttttttttttgcaccagtgaaacaataaagatgctattaacaattttggagctttttttcccctttcatactatctttaattgataaaaagaactagtagtatggctatagagtttaatagtcattctcatatattcacagagctcacttaactctagttttaagcacttgttgaacaaggcagcatctactcttttagtcatttataccccttttctttcctcaactttaccctgcttttcccaaggcatgatgaattcacataaaccccccaaaggctcaccactgatactagttacctactatataataaaccatcccaaaacttactgtcttaaaacagcaaacatttatctcacaggtctctggatcaggaatttgggagcagcttagctggtggttctggcaaagagtgtggtgtaaggttgcaaacaagatactggttggggctgcagtcatctgatgctttgactggggctgacttttctgctcactgacctggctgttaggcagaggccccagttcctcttcttgagggcagaggccccagttcctctccttgagggcagaggcctaagttcctttccttgagggcagaggccccagttcctctccttgacggcccttccatagagtgtcctcacagcatggtggctggctttcccctgagtatgaaagcaagaaggaaaccacagtgcctttcagtggcctccctgtggaagtgacatgctcatttttgccttattctgtaagtggggagtcactaagtctagcctatattcaagggtaaggagagttaagctccacctcttaaagggaaaatttatagacattttcaaatgactacatcacttaacccctcaccatctgccctcccattgctagcacttgatgactagcccttgctgggctttacatgaacagatgtttcccaaagttataaaattagtaccactaaaatgtatcaaatgttaagccattctgtggtatgtcatagtccagcaaaccctttctgttctttgtaggtgttagtttaccccgtataaacctgattatggcttgacatgtccatattatttacatgttttgtgaaatacaactggaatagtagaaaagacatgagtcaagaacacttgagttggagagcttggtttgcaagtaaggtaatgtcagtacagtgtgtaaattatctcttattttctgggttgaggtaaacccaattttaaaaataataaaccaacaaaagtaaataaaagtgaaacaaaagcactgctagtatccttaacttacagattttttttgttgaacaaaaactgggtaccagatatagttaggcactgaatctaaaggtgaagaagatcatagcctctagcttcaagaacgttagtctgctgtgaagacagacctgtagttacagaagatggtaagggtttgtgcaggagagcagtgaagaagagctttgagggattggggatggggaagttctgcagagggttgtatgaattctcatggaacatcaagtccaatagtttatttagccttctgaggccagtgctttggcctgcagtcccaggctcctcagacccatgggctgaagcaagttatactcttggctgcctgtagtgaaatagatatttagaaattgacttagcatttaaaaccctttatagcaatttgacagagtaattttatgtctattggatgtaataaatatttggctttgtttccatgtacatccagtgagggttttattacgctaggtttcccttccatagattgtgcctttcaaaaatgctgaggtaggtttcccatttcttacctgtgatgtgttttacccagcacctccgcacacataacattcaggaccttaataaaattattcacttggtaagtgttcaagtctttctgatcaccccaagtagcatgactgatctgcaatttaaaattcctgtgatctgtaaaaaaaaaa

SEQ ID NO: 361931 - DNA, 4347 bp, Homo sapiens
agcgtcacatgaccgcgggaggctacgcgcggggcgggtgctgcttgctgcaggctctggggagtcgccatgcctacaacacagcagtcccctcaggatgagcaggaaaagctcttggatgaagccatacaggctgtgaaggtccagtcattccaaatgaagagatgcctggacaaaaacaagcttatggatgctctaaaacatgcttctaatatgcttggtgaactccggacttctatgttatcaccaaagagttactatgaactttatatggccatttctgatgaactgcactacttggaggtctacctgacagatgagtttgctaaaggaaggaaagtggcagatctctacgaacttgtacagtatgctggaaacattatcccaaggcttattgctaccagtagtgcagtttcaaaggaactcaccagacttttgaaaataccagttgacacttacaacaatattttaacagtcttgaaattaaaacattttcacccactctttgagtactttgactacgagtccagaaagagcatgagttgttatgtgcttagtaatgttctggattataacacagaaattgtctctcaagaccaggtggattccataatgaatttggtatccacgttgattcaagatcagccagatcaacctgtagaagaccctgatccagaagattttgctgatgagcagagccttgtgggccgcttcattcatctgctgcgctctgaggaccctgaccagcagtacttgattttgaacacagcacgaaaacattttggagctggtggaaatcagcggattcgcttcacactgccacctttggtatttgcagcttaccagctggcttttcgatataaagagaattctaaagtggatgacaaatgggaaaagaaatgccagaagattttttcatttgcccaccagactatcagtgctttgatcaaagcagagctggcagaattgcccttaagactttttcttcaaggagcactagctgctggggaaattggttttgaaaatcatgagacagtcgcatatgaattcatgtcccaggcattttctctgtatgaagatgaaatcagcgattccaaagcacagctagctgccatcaccttgatcattggcacttttgaaaggatgaagtgcttcagtgaagagaatcatgaacctctgaggactcagtgtgcccttgctgcatccaaacttctaaagaaacctgatcagggccgagctgtgagcacctgtgcacatctcttctggtctggcagaaacacggacaaaaatggggaggagcttcacggaggcaagagggtaatggagtgcctaaaaaaagctctaaaaatagcaaatcagtgcatggacccctctctacaagtgcagctttttatagaaattctgaacagatatatctatttttatgaaaaggaaaatgatgcggtaacaattcaggttttaaaccagcttatccaaaagattcgagaagacctcccgaatcttgaatccagtgaagaaacagagcagattaacaaacattttcataacacactggagcatttgcgcttgcggcgggaatcaccagaatccgaggggccaatttatgaaggtctcatcctttaaaaaggaaatagctcaccatactcctttccatgtacatccagtgagggttttattacgctaggtttcccttccatagattgtgcctttcagaaatgctgaggtaggtttcccatttcttacctgtgatgtgttttacccagcacctccggacactcaccttcaggaccttaataaaattattcacttggtaagtgttcaagtctttctgatcaccccaagtagcatgactgatctgcaatttaaaattcctgtgatctgtaaaaaaaaaaaaaaaaaaaaaaaaaacaaaacccacaagcacttatcttggctactaatgaagctctccttttttttgtttgtttgtttgcttcattgttgattgtgtattttcttcattcctggggagtactaacccaaaagcgtctgtctcttgttttctagtccagtttgagattaatttagaagaaaggaatactgtatgtgaaattcatcttgggctttcccctaaattgcaagataaggccatgtgtaagattttccctaaaactagaatatattaatgcatgtttgagaattttaaagcaccatggtcaaaaccagaagctatattttgcatatttggactcagccatccattaagaacccatgttgtcctctggacatatttatcaatataattgggttttaaatagtataaaagaaaacttgtgatctatataatttatgtatcaccttcattgtaaatttagcaggaaatgcatcacaattatgatttttttttttgcaccagtgaaacaataaagatgctattaacaattttggagctttttttcccctttcatactatctttaattgataaaaagaactagtagtatggctatagagtttaatagtcattctcatatattcacagagctcacttaactctagttttaagcacttgttgaacaaggcagcatctactcttttagtcatttataccccttttctttcctcaactttaccctgcttttcccaaggcatgatgaattcacataaaccccccaaaggctcaccactgatactagttacctactatataataaaccatcccaaaacttactgtcttaaaacagcaaacatttatctcacaggtctctggatcaggaatttgggagcagcttagctggtggttctggcaaagagtgtggtgtaaggttgcaaacaagatactggttggggctgcagtcatctgatgctttgactggggctgacttttctgctcactgacctggctgttaggcagaggccccagttcctcttcttgagggcagaggccccagttcctctccttgagggcagaggcctaagttcctttccttgagggcagaggccccagttcctctccttgacggcccttccatagagtgtcctcacagcatggtggctggctttcccctgagtatgaaagcaagaaggaaaccacagtgcctttcagtggcctccctgtggaagtgacatgctcatttttgccttattctgtaagtggggagtcactaagtctagcctatattcaagggtaaggagagttaagctccacctcttaaagggaaaatttatagacattttcaaatgactacatcacttaacccctcaccatctgccctcccattgctagcacttgatgactagcccttgctgggctttacatgaacagatgtttcccaaagttataaaattagtaccactaaaatgtatcaaatgttaagccattctgtggtatgtcatagtccagcaaaccctttctgttctttgtaggtgttagtttaccccgtataaacctgattatggcttgacatgtccatattatttacatgttttgtgaaatacaactggaatagtagaaaagacatgagtcaagaacacttgagttggagagcttggtttgcaagtaaggtaatgtcagtacagtgtgtaaattatctcttattttctgggttgaggtaaacccaattttaaaaataataaaccaacaaaagtaaataaaagtgaaacaaaagcactgctagtatccttaacttacagattttttttgttgaacaaaaactgggtaccagatatagttaggcactgaatctaaaggtgaagaagatcatagcctctagcttcaagaacgttagtctgctgtgaagacagacctgtagttacagaagatggtaagggtttgtgcaggagagcagtgaagaagagctttgagggattggggatggggaagttctgcagagggttgtatgaattctcatggaacatcaagtccaatagtttatttagccttctgaggccagtgctttggcctgcagtcccaggctcctcagacccatgggctgaagcaagttatactcttggctgcctgtagtgaaatagatatttagaaattgacttagcatttaaaaccctttatagcaatttgacagagtaattttatgtctattggatgtaataaatatttggctttgtttccatgtacatccagtgagggttttattacgctaggtttcccttccatagattgtgcctttcaaaaatgctgaggtaggtttcccatttcttacctgtgatgtgttttacccagcacctccgcacacataacattcaggaccttaataaaattattcacttggtaagtgttcaagtctttctgatcaccccaagtagcatgactgatctgcaatttaaaattcctgtgatctgtaaaaaaaaaa

SEQ ID NO: 361932 - DNA, 1782 bp, Homo sapiens
agcgtcacatgaccgcgggaggctacgcgcggggcgggtgctgcttgctgcaggctctggggagtcgccatgcctacaacacagcagtcccctcaggatgagcaggaaaagctcttggatgaagccatacaggctgtgaaggtccagtcattccaaatgaagagatgcctggacaaaaacaagcttatggatgctctaaaacatgcttctaatatgcttggtgaactccggacttctatgttatcaccaaagagttactatgaactttatatggccatttctgatgaactgcactacttggaggtctacctgacagatgagtttgctaaaggaaggaaagtggcagatctctacgaacttgtacagtatgctggaaacattatcccaaggctttaccttttgatcacagttggagttgtatatgtcaagtcatttcctcagtccaggaaggatattttgaaagatttggtagaaatgtgccgtggtgtgcaacatcccttgaggggtctgtttcttcgaaattaccttcttcagtgtaccagaaatatcttacctgatgaaggagagccaacagatgaagaaacaactggtgacatcagtgattccatggattttgtactgctcaactttgcagaaatgaacaagctctgggtgcgaatgcagcatcagggacatagccgagatagagaaaaaagagaacgagaaagacaagaactgagaattttagtgggaacaaatttggtgcgcctcagtcagttggaaggtgtaaatgtggaacgttacaaacagattgttttgactggcatattggagcaagttgtaaactgtagggatgctttggctcaagaatatctcatggagtgtattattcaggttttccctgatgaatttcacctccagactttgaatccttttcttcgggcctgtgctgagttacaccagaatgtaaatgtgaagaacataatcattgctttaattgatagattagctttatttgctcaccgtgaagatggacctggaatcccagcggatattaaactttttgatatattttcacagcaggtggctacagtgatacagtctagacaagacatgccttcagaggatgttgtatctttacaagtctctctgattaatcttgccatgaaatgttaccctgatcgtgtggactatgttgataaagttctagaaacaacagtggagatattcaataagctcaaccttgaacatattgctaccagtagtgcagtttcaaaggaactcaccagacttttgaaaataccagttgacacttacaacaatattttaacagtcttgaaattaaaacattttcacccactctttgagtactttgactacgagtccagaaagagcatgagttgttatgtgcttagtaatgttctggattataacacagaaattgtctctcaagaccaggtggattccataatgaatttggtatccacgttgattcaagatcagccagatcaacctgtagaagaccctgatccagaagattttgctgatgagcagagccttgtgggccgcttcattcatctgctgcgctctgaggaccctgaccagcagtacttgattttgaacacagcacgaaaacattttggagctggtggaaatcagcggattcgcttcacactgccacctttggtatttgcagcttaccagctggcttttcgatataaagagaattctaaagtggattccatttggggattccatttggggattccatttggggattccatttggggggattccatttgg

SEQ ID NO: 361933 - DNA, 1457 bp, Homo sapiens
agcgtcacatgaccgcgggaggctacgcgcggggcgggtgctgcttgctgcaggctctggggagtcgccatgcctacaacacagcagtcccctcaggatgagcaggaaaagctcttggatgaagccatacaggctgtgaaggtccagtcattccaaatgaagagatgcctggacaaaaacaagcttatggatgctctaaaacatgcttctaatatgcttggtgaactccggacttctatgttatcaccaaagagttactatgaactttatatggccatttctgatgaactgcactacttggaggtctacctgacagatgagtttgctaaaggaaggaaagtggcagatctctacgaacttgtacagtatgctggaaacattatcccaaggctttaccttttgatcacagttggagttgtatatgtcaagtcatttcctcagtccaggaaggatattttgaaagatttggtagaaatgtgccgtggtgtgcaacatcccttgaggggtctgtttcttcgaaattaccttcttcagtgtaccagaaatatcttacctgatgaaggagagccaacagatgaagaaacaactggtgacatcagtgattccatggattttgtactgctcaactttgcagaaatgaacaagctctgggtgcgaatgcagcatcagggacatagccgagatagagaaaaaagagaacgagaaagacaagaactgagaattttagtgggaacaaatttggtgcgcctcagtcagttggaaggtgtaaatgtggaacgttacaaacagattgttttgactggcatattggagcaagttgtaaactgtagggatgctttggctcaagaatatctcatggagtgtattattcaggttttccctgatgaatttcacctccagactttgaatccttttcttcgggcctgtgctgagttacaccagaatgtaaatgtgaagaacataatcattgctttaattgatagattagctttatttgctcaccgtgaagatggacctggaatcccagcggatattaaactttttgatatattttcacagcaggtggctacagtgatacagtctagacaagacatgccttcagaggatgttgtatctttacaagtctctctgattaatcttgccatgaaatgttaccctgatcgtgtggactatgttgataaagttctagaaacaacagtggagatattcaataagctcaaccttgaacatattgctaccagtagtgcagtttcaaaggaactcaccagacttttgaaaataccagttgacacttacaacaatattttaacagtcttgaaattaaaacattttcacccactctttgagtactttgactacgagtccagaaagagcatgagttgttatgtgcttagtaatgttctggattataacacagaaattgtctctcaagaccaggtaagagaatacctacgtgc

SEQ ID NO: 361934 - DNA, 299 bp, Homo sapiens
actattactaagtcccctgccccaggaaggtcctgggtcacttgcagcaggagagagcagcagtctttctgccagtacatcagtctcagattcatcccagaaaaaagaagagcacaattattctctttttgtctccgacaacttgggtgaacagccaactaaatgcagtcctgaagaagatgaggaggacgaggaggatgttgatgatgaggaccatgatgaaggattcggcagtgagcattacatcattatataatggtacttcctcaagttgctgggtgacagtgagactccatctc

SEQ ID NO: 361935 - DNA, 5263 bp, Homo sapiens
gtcaggaaggacataaacaaaacaaacccgaggcagcatggagaggggccgtggcccctgcagcggaaccggacccagtccctgagccgcccctacacccacagacagcatcgcacagaattattttaaaaaaaagcagtgatccaagcaattgaattggaagcactctggggaaacctgctgtttattgtggaaatcatcttcgatcttggaattgaaagtaaagctggaaaggaatttacaaacaagaaaaaaaagaagtttggaatcggattcacaggatctgggcttggaaatgcctcagcctagtgtaagcggaatggatccgcctttcggggatgcctttcgaagccacaccttttcggaacaaactctgatgagcacagatctcttagcaaacagttcggatccagatttcatgtatgaactggtcatgatgaaggattcggcagtgagcatgaactgtctgaaaatgaggaggaggaagaagaggaagaggattatgaagatgacaaggatgatgatattagtgatactttctctgaaccaggctatgaaaatgattctgtagaagacctgaaggaggtgacttcaatatcttcacggaagagaggtaaaagaagatacttctgggagtatagtgaacaacttacaccatcacagcaagagaggatgctgagaccatctgagtggaaccgagatactttgccaagtaatatgtatcagaaaaatggcttacatcatggaaaatatgcagtaaagaagtcacggagaactgatgtagaagacctgactccaaatcctaaaaaactcctccagataggcaatgaacttcggaaactgaataaggtgattagtgacctgactccagtcagtgagcttcccttaacagcccgaccaaggtcaaggaaggaaaaaaataagctggcttccagagcttgtcggttaaagaagaaagcccagtatgaagctaataaagtgaaattatggggcctcaacacagaatatgataatttattgtttgtaatcaactccatcaagcaagagattgtaaaccgggtacagaatccaagagatgagagaggacccaacatggggcagaagcttgaaatcctcattaaagatactctcggtctaccagttgctgggcaaacctcagaatttgttaaccaagtgttagagaagactgcagaagggaatcccactggaggccttgtaggattaaggataccaacatcaaaggtgtaatcagcctcattggaccactggtcagaaatgtctgcgttttgtcacgttatccattgtaaattttcattctgttttgcatgtcagttagcattatgtaaacatttacaattaggttacattgttttaagaactaagtagcataagtgaagcatgatccaaaatacttgattattgcattttcagagcataaaccatgattaaaactgctactggcatcagaattgaaaatcatatgtttaagtaaatgttaggtacagattacaaaaatctgttaaagcaaaacattttggaggagtgaaatagtaaaatgccaagtattgtggcagatttatgctctgaaccacacaaaaaaattgaggaagcatttttttaaacagtcggtttaaattgtttttagaattattgctttttgttctaattttccacaaccattaatctcacttgtatatggcacacccagcacttgtgcctgtgggccatattagatgttcattgtcagagctcaagatgatatatataaatatatatatatatatatatatatatacacacacacacaaatgtctgtgcaagtaagaaaaaaaaagcatattctttgtgccttgtattttggggaaactctaaaactggtaatattttgtatgatgaaaaccctaatgagaaaaaacaagatatatagatggaaaaattatggggtttaaatgtttttttgttccaactctttttcagattttttgaatgtatataggactatgttgaaatgtagatatatgccacagagtctgtgtattgtataaaaaacaaaacaaaaaacaacaaaaaaaagatggctctagaaaactcatatttcggtacttgaccggaagaagacaaatacttgcacattattgcgattgttttattttttgtaccaaagacaaatgcaactgatatggcaaactgccagtctaagtaaagttttgcacagcttacatgatactgtatgaatgtatgaaaaaaaaggagaaaaaaaagaaaaaaaaaggtcagggttagggatcttactgaactgtgaattttatttctgtttgggtccaattatctacagaaggagcatccatacatacaaatattattttgctgttcctctagttcgcttccatagtagataagttggtggccatttagatgtcttttatttctgcacttattgtaggaaattttaatatatttcattttagtaagctattgataaaatagtttttgactttgaaaattaaaatgtttatttagcttattgtagtatacttccaccagacaacaaaatagattatttttattgtattatgtatatatatatatgtaaagaaagaaaaaagctaaaaatatctaattctttagttgccacttttccgattgatgtattattgtgcatgtaatattttcaaagatcaacacaggctaaaacaaaaacaatttatagatttttatatttttgtacaggtattttcaaactagcttcttcaaacttaacatgtgacttattcttctatagtttctagaattgagaaacattaacacatttagtttttaggtgctcttttttgctcatataaaacagcttcattagtcagtgttttaactgtgttcaagctttacctcttgatgagaaatttcttatgtcaaggcagcattataaaccttcccccacagatttttccatcctgtctctcttactgttttattctcaaatcttgtgctttgaactctgaaaactggtggcttaaaaactaaaaaaagaaaaaaagcatatttagcaaggaaaaaaataccaaaaatttcaggcatagctgctggaaaaattatctatttctccattacccactgtaggatttcttttttaattatactttgactataaagtgtcaaagtataatttgttcttttcttttactttgttaccccatttgtaagctatagcatatgaagctatatatatagcttgtgaaggtttgatctagaacacccagtaacaaatgaacaatgttgcttacctgcttctttgacatcttaaaaaagaaatccaaggaggattgtaaggattgtcttaccaccttagctgaactgtgatgcacaagatttttctatgtgtttggtggaaatgtacctggtttgtacattcacgctaaacagatgataagctcaagtctgatggtttaatagaatgtaagttcatcgtttaaagcttttcctttttaggttggagaaggcaaaacacaggcttgcaagttggaagtatatgaagtcttgacagagtgtgtctggtaaattgaaaagtgtttcaaactatggcagttttgcaatcaggtgaaaatcacctcatgatattcagctgataaggtttataaaattgcccctttctagctgctctgttaggaattctggtttttgatacttttttcctgtctgcaaaccagaatttgattttttggtcttgcatttcaaaaaaaaaaagactttgaatctgtttagtagattccatatctttgagtttcagtgttttatatgtactacttaagttaaatagttaaaagcttttaaatagttgagctttttaatgttgacactttattttgtacctatttatatatgtatgtatatcttagaaaagcactttgttaaaaaaaaattgcattttatatgattcctgccatttgctgctaaatctgggctggtcagaatgctgcagcgatacttgatctatataaaaacctggcagtaaaatgtagagtgaaagttaaatcctcttgctgttttaactttatcataaagatgacataggcaagctgtgcagctttacattttaaccaggggactctgtggcatttaaaaccgtctagaaatggttgtactttaatgccagtaataatctgcttcctctattgtcattaaaatatatacgtttagtgtatcacacaaaccaatcttataagggtaatgtaaaaaccccaacaattgtacatgttctgtttttgaaaattgtggcatgtatttttgggtgaagatcattagagaagagttctctaaaggttttctgtgttcatacatggtatacagatagctcataatgaagtccagaatcttacttttaagtgaaggcattgtgaattcacctcaagtaaacccattgttccaaagcaattataaactttgactctagtactactatgatttaaaaaaaaaaaaaaccaacaaaaaccttttttcctagtttcagatacactggattctttatagagtttgtctccatatgaaagcatgctgtccagtcgctcttgttaagatcttgtctgagttttgaattgggtgccacacttttccagtcaatataattgcttgttctactgtaccatgtatgattcttgtcctttcctatatccttcatgacagattatgatgtggctttatattgtgccttacttgtacatttaaaactaaacgtcttcattcccttccacttcctacatctttaactttgacctttttggtaagagaatcagaactattacaaaagcatcatgaaggatttcagatgggtatggtttcaaattccctctctttatagttattttatatttgtatgaaagaccagttttggatggtctttgaatataggggggaaagattagcagtaatttcactacatcccttttctctgactttcatgcatttctcatacatcttctttctgatgcttgactttatttgcttcctagcaatagtctgcatttaaagaaaggtgtgttcaattcatcagcttgaaattgactatttcatttttccaggattttttaggagaagagtacccattttgttttataaaaacagatgacaagtctctttaaaagaaacagaagtacagtacttttgaaatacaatgctgttagtttggatttctttttatatatatatataatattcatacaatgatctgatgtttgccttcattaataaagctgttagtttattcaccaaa

SEQ ID NO: 361936 - DNA, 4987 bp, Homo sapiens
actattactaagtcccctgccccaggaaggtcctgggtcacttgcagcaggagagagcagcagtctttctgccagtacatcagtctcagattcatcccagaaaaaagaagagcacaattattctctttttgtctccgacaacttgggtgaacagccaactaaatgcagtcctgaagaagatgaggaggacgaggaggatgttgatgatgaggaccatgatgaaggattcggcagtgagcatgaactgtctgaaaatgaggaggaggaagaagaggaagaggattatgaagatgacaaggatgatgatattagtgatactttctctgaaccaggctatgaaaatgattctgtagaagacctgaaggaggtgacttcaatatcttcacggaagagaggtaaaagaagatacttctgggagtatagtgaacaacttacaccatcacagcaagagaggatgctgagaccatctgagtggaaccgagatactttgccaagtaatatgtatcagaaaaatggcttacatcatggaaaatatgcagtaaagaagtcacggagaactgatgtagaagacctgactccaaatcctaaaaaactcctccagataggcaatgaacttcggaaactgaataaggtgattagtgacctgactccagtcagtgagcttcccttaacagcccgaccaaggtcaaggaaggaaaaaaataagctggcttccagagcttgtcggttaaagaagaaagcccagtatgaagctaataaagtgaaattatggggcctcaacacagaatatgataatttattgtttgtaatcaactccatcaagcaagagattgtaaaccgggtacagaatccaagagatgagagaggacccaacatggggcagaagcttgaaatcctcattaaagatactctcggtctaccagttgctgggcaaacctcagaatttgttaaccaagtgttagagaagactgcagaagggaatcccactggaggccttgtaggattaaggataccaacatcaaaggtgtaatcagcctcattggaccactggtcagaaatgtctgcgttttgtcacgttatccattgtaaattttcattctgttttgcatgtcagttagcattatgtaaacatttacaattaggttacattgttttaagaactaagtagcataagtgaagcatgatccaaaatacttgattattgcattttcagagcataaaccatgattaaaactgctactggcatcagaattgaaaatcatatgtttaagtaaatgttaggtacagattacaaaaatctgttaaagcaaaacattttggaggagtgaaatagtaaaatgccaagtattgtggcagatttatgctctgaaccacacaaaaaaattgaggaagcatttttttaaacagtcggtttaaattgtttttagaattattgctttttgttctaattttccacaaccattaatctcacttgtatatggcacacccagcacttgtgcctgtgggccatattagatgttcattgtcagagctcaagatgatatatataaatatatatatatatatatatatatatacacacacacacaaatgtctgtgcaagtaagaaaaaaaaagcatattctttgtgccttgtattttggggaaactctaaaactggtaatattttgtatgatgaaaaccctaatgagaaaaaacaagatatatagatggaaaaattatggggtttaaatgtttttttgttccaactctttttcagattttttgaatgtatataggactatgttgaaatgtagatatatgccacagagtctgtgtattgtataaaaaacaaaacaaaaaacaacaaaaaaaagatggctctagaaaactcatatttcggtacttgaccggaagaagacaaatacttgcacattattgcgattgttttattttttgtaccaaagacaaatgcaactgatatggcaaactgccagtctaagtaaagttttgcacagcttacatgatactgtatgaatgtatgaaaaaaaaggagaaaaaaaagaaaaaaaaaggtcagggttagggatcttactgaactgtgaattttatttctgtttgggtccaattatctacagaaggagcatccatacatacaaatattattttgctgttcctctagttcgcttccatagtagataagttggtggccatttagatgtcttttatttctgcacttattgtaggaaattttaatatatttcattttagtaagctattgataaaatagtttttgactttgaaaattaaaatgtttatttagcttattgtagtatacttccaccagacaacaaaatagattatttttattgtattatgtatatatatatatgtaaagaaagaaaaaagctaaaaatatctaattctttagttgccacttttccgattgatgtattattgtgcatgtaatattttcaaagatcaacacaggctaaaacaaaaacaatttatagatttttatatttttgtacaggtattttcaaactagcttcttcaaacttaacatgtgacttattcttctatagtttctagaattgagaaacattaacacatttagtttttaggtgctcttttttgctcatataaaacagcttcattagtcagtgttttaactgtgttcaagctttacctcttgatgagaaatttcttatgtcaaggcagcattataaaccttcccccacagatttttccatcctgtctctcttactgttttattctcaaatcttgtgctttgaactctgaaaactggtggcttaaaaactaaaaaaagaaaaaaagcatatttagcaaggaaaaaaataccaaaaatttcaggcatagctgctggaaaaattatctatttctccattacccactgtaggatttcttttttaattatactttgactataaagtgtcaaagtataatttgttcttttcttttactttgttaccccatttgtaagctatagcatatgaagctatatatatagcttgtgaaggtttgatctagaacacccagtaacaaatgaacaatgttgcttacctgcttctttgacatcttaaaaaagaaatccaaggaggattgtaaggattgtcttaccaccttagctgaactgtgatgcacaagatttttctatgtgtttggtggaaatgtacctggtttgtacattcacgctaaacagatgataagctcaagtctgatggtttaatagaatgtaagttcatcgtttaaagcttttcctttttaggttggagaaggcaaaacacaggcttgcaagttggaagtatatgaagtcttgacagagtgtgtctggtaaattgaaaagtgtttcaaactatggcagttttgcaatcaggtgaaaatcacctcatgatattcagctgataaggtttataaaattgcccctttctagctgctctgttaggaattctggtttttgatacttttttcctgtctgcaaaccagaatttgattttttggtcttgcatttcaaaaaaaaaaagactttgaatctgtttagtagattccatatctttgagtttcagtgttttatatgtactacttaagttaaatagttaaaagcttttaaatagttgagctttttaatgttgacactttattttgtacctatttatatatgtatgtatatcttagaaaagcactttgttaaatgctgcagcgatacttgatctatataaaaacctggcagtaaaatgtagagtgaaagttaaatcctcttgctgttttaactttatcataaagatgacataggcaagctgtgcagctttacattttaaccaggggactctgtggcatttaaaaccgtctagaaatggttgtactttaatgccagtaataatctgcttcctctattgtcattaaaatatatacgtttagtgtatcacacaaaccaatcttataagggtaatgtaaaaaccccaacaattgtacatgttctgtttttgaaaattgtggcatgtatttttgggtgaagatcattagagaagagttctctaaaggttttctgtgttcatacatggtatacagatagctcataatgaagtccagaatcttacttttaagtgaaggcattgtgaattcacctcaagtaaacccattgttccaaagcaattataaactttgactctagtactactatgatttaaaaaaaaaaaaaaccaacaaaaaccttttttcctagtttcagatacactggattctttatagagtttgtctccatatgaaagcatgctgtccagtcgctcttgttaagatcttgtctgagttttgaattgggtgccacacttttccagtcaatataattgcttgttctactgtaccatgtatgattcttgtcctttcctatatccttcatgacagattatgatgtggctttatattgtgccttacttgtacatttaaaactaaacgtcttcattcccttccacttcctacatctttaactttgacctttttggtaagagaatcagaactattacaaaagcatcatgaaggatttcagatgggtatggtttcaaattccctctctttatagttattttatatttgtatgaaagaccagttttggatggtctttgaatataggggggaaagattagcagtaatttcactacatcccttttctctgactttcatgcatttctcatacatcttctttctgatgcttgactttatttgcttcctagcaatagtctgcatttaaagaaaggtgtgttcaattcatcagcttgaaattgactatttcatttttccaggattttttaggagaagagtacccattttgttttataaaaacagatgacaagtctctttaaaagaaacagaagtacagtacttttgaaatacaatgctgttagtttggatttctttttatatatatatataatattcatacaatgatctgatgtttgccttcattaataaagctgttagtttattcaccaaa

SEQ ID NO: 361937 - DNA, 2704 bp, Homo sapiens
gcggccgcctactactactaaattcgcggccgcgtcgacgaaaaaagctaaaaatatctaattctttagttgccacttttccgattgatgtattattgtgcatgtaatattttcaaagatcaacacaggctaaaacaaaaacaatttatagatttttatatttttgtacaggtattttcaaactagcttcttcaaacttaacatgtgacttattcttctatagtttctagaattgagaaacattaacacatttagtttttaggtgctcttttttgctcatataaaacagcttcattagtcagtgttttaactgtgttcaagctttacctcttgatgagaaatttcttatgtcaaggcagcattataaaccttcccccacagatttttccatcctgtctctcttactgttttattctcaaatcttgtgctttgaactctgaaaactggtggcttaaaaactaaaaaaagaaaaaaagcatatttagcaaggaaaaaaataccaaaaatttcaggcatagctgctggaaaaattatctatttctccattacccactgtaggatttcttttttaattatactttgactataaagtgtcaaagtataatttgttcttttcttttactttgttaccccatttgtaagctatagcatatgaagctatatatatagcttgtgaaggtttgatctagaacacccagtaacaaatgaacaatgttgcttacctgcttctttgacatcttaaaaaagaaatccaaggaggattgtaaggattgtcttaccaccttagctgaactgtgatgcacaagatttttctatgtgtttggtggaaatgtacctggtttgtacattcacgctaaacagatgataagctcaagtctgatggtttaatagaatgtaagttcatcgtttaaagcttttcctttttaggttggagaaggcaaaacacaggcttgcaagttggaagtatatgaagtcttgacagagtgtgtctggtaaattgaaaagtgtttcaaactatggcagttttgcaatcaggtgaaaatcacctcatgatattcagctgataaggtttataaaattgcccctttctagctgctctgttaggaattctggtttttgatacttttttcctgtctgcaaaccagaatttgattttttggtcttgcatttcaaaaaaaaaaagactttgaatctgtttagtagattccatatctttgagtttcagtgttttatatgtactacttaagttaaatagttaaaagcttttaaatagttgagctttttaatgttgacactttattttgtacctatttatatatgtatgtatatcttagaaaagcactttgttaaaaaaaaattgcattttatatgattcctgccatttgctgctaaatctgggctggtcagaatgctgcagcgatacttgatctatataaaaacctggcagtaaaatgtagagtgaaagttaaatcctcttgctgttttaactttatcataaagatgacataggcaagctgtgcagctttacattttaaccaggggactctgtggcatttaaaaccgtctagaaatggttgtactttaatgccagtaataatctgcttcctctattgtcattaaaatatatacgtttagtgtatcacacaaaccaatcttataagggtaatgtaaaaaccccaacaattgtacatgttctgtttttgaaaattgtggcatgtatttttgggtgaagatcattagagaagagttctctaaaggttttctgtgttcatacatggtatacagatagctcataatgaagtccagaatcttacttttaagtgaaggcattgtgaattcacctcaagtaaacccattgttccaaagcaattataaactttgactctagtactactatgatttaaaaaaaaaaaaaaccaacaaaaaccttttttcctagtttcagatacactggattctttatagagtttgtctccatatgaaagcatgctgtccagtcgctcttgttaagatcttgtctgagttttgaattgggtgccacacttttccagtcaatataattgcttgttctactgtaccatgtatgattcttgtcctttcctatatccttcatgacagattatgatgtggctttatattgtgccttacttgtacatttaaaactaaacgtcttcattcccttccacttcctacatctttaactttgacctttttggtaagagaatcagaactattacaaaagcatcatgaaggatttcagatgggtatggtttcaaattccctctctttatagttattttatatttgtatgaaagaccagttttggatggtctttgaatataggggggaaagattagcagtaatttcactacatcccttttctctgactttcatgcatttctcatacatcttctttctgatgcttgactttatttgcttcctagcaatagtctgcatttaaagaaaggtgtgttcaattcatcagcttgaaattgactatttcatttttccaggattttttaggagaagagtacccattttgttttataaaaacagatgacaagtctctttaaaagaaacagaagtacagtacttttgaaatacaatgctgttagtttggatttctttttatatatatatataatattcatacaatgatctgatgtttgccttcattaataaagctgttagtttattcaccaaa

SEQ ID NO: 361938 - DNA, 681 bp, Homo sapiens
gtcaggaaggacataaacaaaacaaacccgaggcagcatggagaggggccgtggcccctgcagcggaaccggacccagtccctgagccgcccctacacccacagacagcatcgcacagaattattttaaaaaaaagcagtgatccaagcaattgaattggaagcactctggggaaacctgctgtttattgtggaaatcatcttcgatcttggaattgaaagtaaagctggaaaggaatttacaaacaagaaaaaaaagaagtttggaatcggattcacaggatctgggcttggaaatgcctcagcctagtgtaagcggaatggatccgcctttcggggatgcctttcgaagccacaccttttcggaacaaactctgatgagcacagatctcttagcaaacagttcggatccagatttcatgtatgaactggtcatgatgaaggattcggcagtgagcatgaactgtctgaaaatgaggaggaggaagaagaggaagaggattatgaagatgacaaggatgatgatattagtgatactttctctgaaccaggtattataatgcttgcaagcttaccagactgacctttgtattactattttgaaatagaaaggtttttgtttctgttttgtttggataatttctttattttagtttgggaattaaatgacttaaaccttgga

SEQ ID NO: 361939 - DNA, 1068 bp, Homo sapiens
gtcaggaaggacataaacaaaacaaacccgaggcagcatggagaggggccgtggcccctgcagcggaaccggacccagtccctgagccgcccctacacccacagacagcatcgcacagaattattttaaaaaaaagcagtgatccaagcaattgaattggaagcactctggggaaacctgctgtttattgtggaaatcatcttcgatcttggaattgaaagtaaagctggaaaggaatttacaaacaagaaaaaaaagaagtttggaatcggattcacaggatctgggcttggaaatgcctcagcctagtgtaagcggaatggatccgcctttcggggatgcctttcgaagccacaccttttcggaacaaactctgatgagcacagatctcttagcaaacagttcggatccagatttcatgtatgaactggtgatagagagatgaactaccaacagaatcctagagacaactttctttctttggaggactgcaaagacattgaaaatctggagtctttcacagatgtcctggataatgagggtgctttaacctcaaactgggaacagtgggatacatactgtgaagacctaacgaaatataccaaactaaccagctgtgacatctggggaacaaaagaagtggattacttgggtcttgatgacttttctagtccttaccaagatgaagaggttataagtaaaactccaactttagctcaacttaatagtgaggactcacagtctgtttctgattccctttattaccccgattcacttttcagtgtcaaacaaaatcccttaccctcttcattccctggtaaaaagatcacaagcagagcagctgctcctgtgtgttcttctaagactctgcaggctgaggtccctttgtcagactgtgtccaaaaagcaagtaaacccacttcaagcacacaaatcatggtgaagaccaacatgtatcataatgaaaaggtgaactttcatgttgaatgtaaagactatgtaaaaaaggcaaaggtaaagatcaacccagtgcaacagagccggcccttgttgagccagattcacaca

SEQ ID NO: 361940 - DNA, 5045 bp, Homo sapiens
actattactaagtcccctgccccaggaaggtcctgggtcacttgcagcaggagagagcagcagtctttctgccagtacatcagtctcagattcatcccagaaaaaagaagagcacaattattctctttttgtctccgacaacttgggtgaacagccaactaaatgcagtcctgaagaagatgaggaggacgaggaggatgttgatgatgaggaccatgatgaaggattcggcagtgagcatgaactgtctgaaaatgaggaggaggaagaagaggaagaggattatgaagatgacaaggatgatgatattagtgatactttctctgaaccaggctatgaaaatgattctgtagaagacctgaaggaggtgacttcaatatcttcacggaagagaggtaaaagaagatacttctgggagtatagtgaacaacttacaccatcacagcaagagaggatgctgagaccatctgagtggaaccgagatactttgccaagtaatatgtatcagaaaaatggcttacatcatggaaaatatgcagtaaagaagtcacggagaactgatgtagaagacctgactccaaatcctaaaaaactcctccagataggcaatgaacttcggaaactgaataaggtgattagtgacctgactccagtcagtgagcttcccttaacagcccgaccaaggtcaaggaaggaaaaaaataagctggcttccagagcttgtcggttaaagaagaaagcccagtatgaagctaataaagtgaaattatggggcctcaacacagaatatgataatttattgtttgtaatcaactccatcaagcaagagattgtaaaccgggtacagaatccaagagatgagagaggacccaacatggggcagaagcttgaaatcctcattaaagatactctcggtctaccagttgctgggcaaacctcagaatttgttaaccaagtgttagagaagactgcagaagggaatcccactggaggccttgtaggattaaggataccaacatcaaaggtgtaatcagcctcattggaccactggtcagaaatgtctgcgttttgtcacgttatccattgtaaattttcattctgttttgcatgtcagttagcattatgtaaacatttacaattaggttacattgttttaagaactaagtagcataagtgaagcatgatccaaaatacttgattattgcattttcagagcataaaccatgattaaaactgctactggcatcagaattgaaaatcatatgtttaagtaaatgttaggtacagattacaaaaatctgttaaagcaaaacattttggaggagtgaaatagtaaaatgccaagtattgtggcagatttatgctctgaaccacacaaaaaaattgaggaagcatttttttaaacagtcggtttaaattgtttttagaattattgctttttgttctaattttccacaaccattaatctcacttgtatatggcacacccagcacttgtgcctgtgggccatattagatgttcattgtcagagctcaagatgatatatataaatatatatatatatatatatatatatacacacacacacaaatgtctgtgcaagtaagaaaaaaaaagcatattctttgtgccttgtattttggggaaactctaaaactggtaatattttgtatgatgaaaaccctaatgagaaaaaacaagatatatagatggaaaaattatggggtttaaatgtttttttgttccaactctttttcagattttttgaatgtatataggactatgttgaaatgtagatatatgccacagagtctgtgtattgtataaaaaacaaaacaaaaaacaacaaaaaaaagatggctctagaaaactcatatttcggtacttgaccggaagaagacaaatacttgcacattattgcgattgttttattttttgtaccaaagacaaatgcaactgatatggcaaactgccagtctaagtaaagttttgcacagcttacatgatactgtatgaatgtatgaaaaaaaaggagaaaaaaaagaaaaaaaaaggtcagggttagggatcttactgaactgtgaattttatttctgtttgggtccaattatctacagaaggagcatccatacatacaaatattattttgctgttcctctagttcgcttccatagtagataagttggtggccatttagatgtcttttatttctgcacttattgtaggaaattttaatatatttcattttagtaagctattgataaaatagtttttgactttgaaaattaaaatgtttatttagcttattgtagtatacttccaccagacaacaaaatagattatttttattgtattatgtatatatatatatgtaaagaaagaaaaaagctaaaaatatctaattctttagttgccacttttccgattgatgtattattgtgcatgtaatattttcaaagatcaacacaggctaaaacaaaaacaatttatagatttttatatttttgtacaggtattttcaaactagcttcttcaaacttaacatgtgacttattcttctatagtttctagaattgagaaacattaacacatttagtttttaggtgctcttttttgctcatataaaacagcttcattagtcagtgttttaactgtgttcaagctttacctcttgatgagaaatttcttatgtcaaggcagcattataaaccttcccccacagatttttccatcctgtctctcttactgttttattctcaaatcttgtgctttgaactctgaaaactggtggcttaaaaactaaaaaaagaaaaaaagcatatttagcaaggaaaaaaataccaaaaatttcaggcatagctgctggaaaaattatctatttctccattacccactgtaggatttcttttttaattatactttgactataaagtgtcaaagtataatttgttcttttcttttactttgttaccccatttgtaagctatagcatatgaagctatatatatagcttgtgaaggtttgatctagaacacccagtaacaaatgaacaatgttgcttacctgcttctttgacatcttaaaaaagaaatccaaggaggattgtaaggattgtcttaccaccttagctgaactgtgatgcacaagatttttctatgtgtttggtggaaatgtacctggtttgtacattcacgctaaacagatgataagctcaagtctgatggtttaatagaatgtaagttcatcgtttaaagcttttcctttttaggttggagaaggcaaaacacaggcttgcaagttggaagtatatgaagtcttgacagagtgtgtctggtaaattgaaaagtgtttcaaactatggcagttttgcaatcaggtgaaaatcacctcatgatattcagctgataaggtttataaaattgcccctttctagctgctctgttaggaattctggtttttgatacttttttcctgtctgcaaaccagaatttgattttttggtcttgcatttcaaaaaaaaaaagactttgaatctgtttagtagattccatatctttgagtttcagtgttttatatgtactacttaagttaaatagttaaaagcttttaaatagttgagctttttaatgttgacactttattttgtacctatttatatatgtatgtatatcttagaaaagcactttgttaaaaaaaaattgcattttatatgattcctgccatttgctgctaaatctgggctggtcagaatgctgcagcgatacttgatctatataaaaacctggcagtaaaatgtagagtgaaagttaaatcctcttgctgttttaactttatcataaagatgacataggcaagctgtgcagctttacattttaaccaggggactctgtggcatttaaaaccgtctagaaatggttgtactttaatgccagtaataatctgcttcctctattgtcattaaaatatatacgtttagtgtatcacacaaaccaatcttataagggtaatgtaaaaaccccaacaattgtacatgttctgtttttgaaaattgtggcatgtatttttgggtgaagatcattagagaagagttctctaaaggttttctgtgttcatacatggtatacagatagctcataatgaagtccagaatcttacttttaagtgaaggcattgtgaattcacctcaagtaaacccattgttccaaagcaattataaactttgactctagtactactatgatttaaaaaaaaaaaaaaccaacaaaaaccttttttcctagtttcagatacactggattctttatagagtttgtctccatatgaaagcatgctgtccagtcgctcttgttaagatcttgtctgagttttgaattgggtgccacacttttccagtcaatataattgcttgttctactgtaccatgtatgattcttgtcctttcctatatccttcatgacagattatgatgtggctttatattgtgccttacttgtacatttaaaactaaacgtcttcattcccttccacttcctacatctttaactttgacctttttggtaagagaatcagaactattacaaaagcatcatgaaggatttcagatgggtatggtttcaaattccctctctttatagttattttatatttgtatgaaagaccagttttggatggtctttgaatataggggggaaagattagcagtaatttcactacatcccttttctctgactttcatgcatttctcatacatcttctttctgatgcttgactttatttgcttcctagcaatagtctgcatttaaagaaaggtgtgttcaattcatcagcttgaaattgactatttcatttttccaggattttttaggagaagagtacccattttgttttataaaaacagatgacaagtctctttaaaagaaacagaagtacagtacttttgaaatacaatgctgttagtttggatttctttttatatatatatataatattcatacaatgatctgatgtttgccttcattaataaagctgttagtttattcaccaaa

SEQ ID NO: 361941 - DNA, 3396 bp, Homo sapiens
  misc_feature (3297)..(3297): n is a, c, g, or t
actattactaagtcccctgccccaggaaggtcctgggtcacttgcagcaggagagagcagcagtctttctgccagtacatcagtctcagattcatcccagaaaaaagaagagcacaattattctctttttgtctccgacaacttgggtgaacagccaactaaatgcagtcctgaagaagatgaggaggacgaggaggatgttgatgatgaggaccatgatgaaggattcggcagtgagcatgaactgtctgaaaatgaggaggaggaagaagaggaagaggattatgaagatgacaaggatgatgatattagtgatactttctctgaaccaggctatgaaaatgattctgtagaagacctgaaggaggtgacttcaatatcttcacggaagagaggtaaaagaagatacttctgggagtatagtgaacaacttacaccatcacagcaagagaggatgctgagaccatctgagtggaaccgagatactttgccaagtaatatgtatcagaaaaatggcttacatcatggaaaatatgcagtaaagaagtcacggagaactgatgtagaagacctgactccaaatcctaaaaaactcctccagataggcaatgaacttcggaaactgaataaggtgattagtgacctgactccagtcagtgagcttcccttaacagcccgaccaaggtcaaggaaggaaaaaaataagctggcttccagagcttgtcggttaaagaagaaagcccagtatgaagctaataaagtgaaattatggggcctcaacacagaatatgataatttattgtttgtaatcaactccatcaagcaagagattgtaaaccgggtacagaatccaagagatgagagaggacccaacatggggcagaagcttgaaatcctcattaaagatactctcggtctaccagttgctgggcaaacctcagaatttgttaaccaagtgttagagaagactgcagaagggaatcccactggaggccttgtaggattaaggataccaacatcaaaggtgtaatcagcctcattggaccactggtcagaaatgtctgcgttttgtcacgttatccattgtaaattttcattctgttttgcatgtcagttagcattatgtaaacatttacaattaggttacattgttttaagaactaagtagcataagtgaagcatgatccaaaatacttgattattgcattttcagagcataaaccatgattaaaactgctactggcatcagaattgaaaatcatatgtttaagtaaatgttaggtacagattacaaaaatctgttaaagcaaaacattttggaggagtgaaatagtaaaatgccaagtattgtggcagatttatgctctgaaccacacaaaaaaattgaggaagcatttttttaaacagtcggtttaaattgtttttagaattattgctttttgttctaattttccacaaccattaatctcacttgtatatggcacacccagcacttgtgcctgtgggccatattagatgttcattgtcagagctcaagatgatatatataaatatatatatatatatatatatatatacacacacacacaaatgtctgtgcaagtaagaaaaaaaaagcatattctttgtgccttgtattttggggaaactctaaaactggtaatattttgtatgatgaaaaccctaatgagaaaaaacaagatatatagatggaaaaattatggggtttaaatgtttttttgttccaactctttttcagattttttgaatgtatataggactatgttgaaatgtagatatatgccacagagtctgtgtattgtataaaaaacaaaacaaaaaacaacaaaaaaaagatggctctagaaaactcatatttcggtacttgaccggaagaagacaaatacttgcacattattgcgattgttttattttttgtaccaaagacaaatgcaactgatatggcaaactgccagtctaagtaaagttttgcacagcttacatgatactgtatgaatgtatgaaaaaaaaggagaaaaaaaagaaaaaaaaaggtcagggttagggatcttactgaactgtgaattttatttctgtttgggtccaattatctacagaaggagcatccatacatacaaatattattttgctgttcctctagttcgcttccatagtagataagttggtggccatttagatgtcttttatttctgcacttattgtaggaaattttaatatatttcattttagtaagctattgataaaatagtttttgactttgaaaattaaaatgtttatttagcttattgtagtatacttccaccagacaacaaaatagattatttttattgtattatgtatatatatatatgtaaagaaagaaaaaagctaaaaatatctaattctttagttgccacttttccgattgatgtattattgtgcatgtaatattttcaaagatcaacacaggctaaaacaaaaacaatttatagatttttatatttttgtacaggtattttcaaactagcttcttcaaacttaacatgtgacttattcttctatagtttctagaattgagaaacattaacacatttagtttttaggtgctcttttttgctcatataaaacagcttcattagtcagtgttttaactgtgttcaagctttacctcttgatgagaaatttcttatgtcaaggcagcattataaaccttcccccacagatttttccatcctgtctctcttactgttttattctcaaatcttgtgctttgaactctgaaaactggtggcttaaaaactaaaaaaagaaaaaaagcatatttagcaaggaaaaaaataccaaaaatttcaggcatagctgctggaaaaattatctatttctccattacccactgtaggatttcttttttaattatactttgactataaagtgtcaaagtataatttgttcttttcttttactttgttaccccatttgtaagctatagcatatgaagctatatatatagcttgtgaaggtttgatctagaacacccagtaacaaatgaacaatgttgcttacctgcttctttgacatcttaaaaaagaaatccaaggaggattgtaaggattgtcttaccaccttagctgaactgtgatgcacaagatttttctatgtgtttggtggaaatgtacctggtttgtacattcacgctaaacagatgataagctcaagtctgatggtttaatagaatgtaagttcatcgtttaaagcttttcctttttaggttggagaaggaaccaggtgcagtggagntattaagcttgcccaggctcctgttcatgaaggttcccccagcggtggccggggaaccccgtatttgggagaggtaaagcccccacccggaaagttgaa

SEQ ID NO: 361942 - DNA, 1664 bp, Homo sapiens
cgccatcttgcttggagacactcgagagcggaagtagcgactgagcgcgtgcagtgggcgtgcttttctccagggagcgtcgcaaaggaggcgccggagtagggggacgcaattacacagtgaaacttggtgttcccggctagtcattcaaatcgaagctgtcgcagacctctgaacgttagtaacgcaacatgtgtttctccgcgactacagacctcgggagaggagcggtgggcaacgtgtctgtgctcggtcgaatgcgcacactccagttaggccgctggctcggacctagaaatgtttccgctttccttagtgcctgccccgcccaggccccgccccttgggccccgcccgacggctcgggagcgcgcgcggtcgcgtgcgggagggggcgggtggggaaggatcgcaggcgagattacgaggcgaggctcgcgcgcccgcccccgccctggcccccagtgcccacccggtcggcccggcacagccatgatcaaggcgatcctaatcttcaacaaccacgggaagccgcggctctccaagttctaccagccctacagtgaagatacacaacagcaaatcatcagggagactttccatttggtatctaagagagatgaaaatgtttgtaatttcctagaaggaggattattaattggaggatctgacaacaaactgatttatagacattatgcaacgttatattttgtcttctgtgtggattcttcagaaagtgaacttggcattttagatctaattcaagtatttgtggaaacattagacaaatgttttgaaaatgtctgtgagctggatttgattttccatgtagacaaggttcacaatattcttgcagaaatggtgatggggggaatggtattggagacaaatatgaatgagattgttacacaaattgatgcacaaaataagctggaaaaatctgaggctggcttagcaggagctccagcccgtgctgtatcagctgtaaagaatatgaatcttcctgagatcccaagaaatattaacattggtgacatcagtataaaagtgccaaacctgccctcttttaaataaaaatgtaaaaaggccactcccaggtaaaatccagggggaagagtcatctaagtttaccatgcagttgtttaccaaaaatagaggaggagagtcttaacttttgctcttggatttaagtcaaggtactgtatagaagttgtgtaaaatcagtatgaaagttcaatgttgctgttcttgctcagtgattttaaagaaattgagtagttcctatgtgatttttttttttcttttctaaactgcattcctgtgcccacctacggcatgcctctatgtattggctactacagtgttttaaaaagtgtttcagatatttctctaattatgtacaacctaaaatgttggtgttttgtatggatcacaagtgcagcattccttaattccttctgctatatgtcacacagttgttatttggagaaccaagtatgtattgcatgaaaacattatgacttttttctcttagtttaaataaactccaaggtaactggacttctaaagcacctttctgtttgcctgatatctactttagcaataattttttttacaaccctctgactcaacaaagtaaataaaagtatattttatcactattaa

SEQ ID NO: 361943 - DNA, 598 bp, Homo sapiens
aaagatggtaaacctctttgaattggattcttctttgatcccaacccactctaaattttggtagctagacctttaacttgaaacgatcaaattaaagaccctttcaaatattatacatgctgccttaattattatttagttgtatctccaacatctttgggggagcaggaaggaagggggggtaacaaaaacttcattgcttcaggtaggtataagtatagaggtcaatcacatttttagttgtacatcaaaaataactaacatccattaaattataaaacttctccagccctattcactatttaattgggtatggagttattcatttgtatcactcttatcattgcctgtgtagaatatacttattattaatactattctactaatttttctattatttccaattctgaattgataatccatggcttttatttcattgcttaacaatgtttgtatcctttatttagcaaatagtttacactggcctattttgtatcagtcaagatttttctcaggtaacagctttattattatttttattttaattaacaaaggtaggattacataagaaaagaaaactaaaattatgaaaagggac

SEQ ID NO: 361944 - DNA, 524 bp, Homo sapiens
  misc_feature (484)..(484): n is a, c, g, or t
gttcactgtattttttaatgtgtcactgttttctctttatagattagtatttcaaagtaaccattccataccaattcaaactaccatctggtccctaagcttgttatatgaaaatcttttatcattgtcttccattgtaagtgttttatgatgagctacacctgagttgtacattttctttttcttttatttgcttctgtatacagctggcttagcaggagctccagcccgtgctgtatcagctgtaaagaatatgaatcttcctgagatcccaagaaatattaacattggtgacatcagtataaaagtgccaaacctgccctcttttaaataaaaatgtaaaaaggccactcccaggtaaaatccagggggaagagtcatctaagtttaccatgcagttgtttaccaaaaatcacataggaactactcaatttctttaaaatcactgagcaagaacagcaacattgaactttcatactgattntacacaacttctatacagtgccttgacttaaatccaagag

SEQ ID NO: 361945 - DNA, 1700 bp, Homo sapiens
cgccatcttgcttggagacactcgagagcggaagtagcgactgagcgcgtgcagtgggcgtgcttttctccagggagcgtcgcaaaggaggcgccggagtagggggacgcaattacacagtgaaacttggtgttcccggctagtcattcaaatcgaagctgtcgcagacctctgaacgttagtaacgcaacatgtgtttctccgcgactacagacctcgggagaggagcggtgggcaacgtgtctgtgctcggtcgaatgcgcacactccagttaggccgctggctcggacctagaaatgtttccgctttccttagtgcctgccccgcccaggccccgccccttgggccccgcccgacggctcgggagcgcgcgcggtcgcgtgcgggagggggcgggtggggaaggatcgcaggcgagattacgaggcgaggctcgcgcgcccgcccccgccctggcccccagtgcccacccggtcggcccggcacagccatgatcaaggcgatcctaatcttcaacaaccacgggaagccgcggctctccaagttctaccagccctacggtatataactgggagtaaaattgccaaatcatatgagtgaagatacacaacagcaaatcatcagggagactttccatttggtatctaagagagatgaaaatgtttgtaatttcctagaaggaggattattaattggaggatctgacaacaaactgatttatagacattatgcaacgttatattttgtcttctgtgtggattcttcagaaagtgaacttggcattttagatctaattcaagtatttgtggaaacattagacaaatgttttgaaaatgtctgtgagctggatttgattttccatgtagacaaggttcacaatattcttgcagaaatggtgatggggggaatggtattggagacaaatatgaatgagattgttacacaaattgatgcacaaaataagctggaaaaatctgaggctggcttagcaggagctccagcccgtgctgtatcagctgtaaagaatatgaatcttcctgagatcccaagaaatattaacattggtgacatcagtataaaagtgccaaacctgccctcttttaaataaaaatgtaaaaaggccactcccaggtaaaatccagggggaagagtcatctaagtttaccatgcagttgtttaccaaaaatagaggaggagagtcttaacttttgctcttggatttaagtcaaggtactgtatagaagttgtgtaaaatcagtatgaaagttcaatgttgctgttcttgctcagtgattttaaagaaattgagtagttcctatgtgatttttttttttcttttctaaactgcattcctgtgcccacctacggcatgcctctatgtattggctactacagtgttttaaaaagtgtttcagatatttctctaattatgtacaacctaaaatgttggtgttttgtatggatcacaagtgcagcattccttaattccttctgctatatgtcacacagttgttatttggagaaccaagtatgtattgcatgaaaacattatgacttttttctcttagtttaaataaactccaaggtaactggacttctaaagcacctttctgtttgcctgatatctactttagcaataattttttttacaaccctctgactcaacaaagtaaataaaagtatattttatcactattaa

SEQ ID NO: 361946 - DNA, 1552 bp, Homo sapiens
cgccatcttgcttggagacactcgagagcggaagtagcgactgagcgcgtgcagtgggcgtgcttttctccagggagcgtcgcaaaggaggcgccggagtagggggacgcaattacacagtgaaacttggtgttcccggctagtcattcaaatcgaagctgtcgcagacctctgaacgttagtaacgcaacatgtgtttctccgcgactacagacctcgggagaggagcggtgggcaacgtgtctgtgctcggtcgaatgcgcacactccagttaggccgctggctcggacctagaaatgtttccgctttccttagtgcctgccccgcccaggccccgccccttgggccccgcccgacggctcgggagcgcgcgcggtcgcgtgcgggagggggcgggtggggaaggatcgcaggcgagattacgaggcgaggctcgcgcgcccgcccccgccctggcccccagtgcccacccggtcggcccggcacagccatgatcaaggcgatcctaatcttcaacaaccacgggaagccgcggctctccaagttctaccagccctacagtgaagatacacaacagcaaatcatcagggagactttccatttggtatctaagagagatgaaaatgtttgtaatttcctagaaggaggattgtatttgtggaaacattagacaaatgttttgaaaatgtctgtgagctggatttgattttccatgtagacaaggttcacaatattcttgcagaaatggtgatggggggaatggtattggagacaaatatgaatgagattgttacacaaattgatgcacaaaataagctggaaaaatctgaggctggcttagcaggagctccagcccgtgctgtatcagctgtaaagaatatgaatcttcctgagatcccaagaaatattaacattggtgacatcagtataaaagtgccaaacctgccctcttttaaataaaaatgtaaaaaggccactcccaggtaaaatccagggggaagagtcatctaagtttaccatgcagttgtttaccaaaaatagaggaggagagtcttaacttttgctcttggatttaagtcaaggtactgtatagaagttgtgtaaaatcagtatgaaagttcaatgttgctgttcttgctcagtgattttaaagaaattgagtagttcctatgtgatttttttttttcttttctaaactgcattcctgtgcccacctacggcatgcctctatgtattggctactacagtgttttaaaaagtgtttcagatatttctctaattatgtacaacctaaaatgttggtgttttgtatggatcacaagtgcagcattccttaattccttctgctatatgtcacacagttgttatttggagaaccaagtatgtattgcatgaaaacattatgacttttttctcttagtttaaataaactccaaggtaactggacttctaaagcacctttctgtttgcctgatatctactttagcaataattttttttacaaccctctgactcaacaaagtaaataaaagtatattttatcactattaa

SEQ ID NO: 361947 - DNA, 1705 bp, Homo sapiens
cgccatcttgcttggagacactcgagagcggaagtagcgactgagcgcgtgcagtgggcgtgcttttctccagggagcgtcgcaaaggaggcgccggagtagggggacgcaattacacagtgaaacttggtgttcccggctagtcattcaaatcgaagctgtcgcagacctctgaacgttagtaacgcaacatgtgtttctccgcgactacagacctcgggagaggagcggtgggcaacgtgtctgtgctcggtcgaatgcgcacactccagttaggccgctggctcggacctagaaatgtttccgctttccttagtgcctgccccgcccaggccccgccccttgggccccgcccgacggctcgggagcgcgcgcggtcgcgtgcgggagggggcgggtggggaaggatcgcaggcgagattacgaggcgaggctcgcgcgcccgcccccgccctggcccccagtgcccacccggtcggcccggcacagccatgatcaaggcgatcctaatcttcaacaaccacgggaagccgcggctctccaagttctaccagccctacagtgaagatacacaacagcaaatcatcagggagactttccatttggtatctaagagagatgaaaatgtttgtaatttcctagaaggaggattattaattggaggatctgacaacaaactgatttatagacattatgcaacgttatattttgtcttctgtgtggattcttcagaaagtgaacttggcattttagatctaattcaagtatttgtggaaacattagacaaatgttttgaaaatgtctgtgagctggatttgattttccatgtagacaaggttcacaatattcttgcagaaatggtgatggggggaatggtattggagacaaatatgaatgagattgttacacaaattgatgcacaaaataagctggaaaaatctgagacctttatctttcagtctcccagacaggacaggtagacaaggctggcttagcaggagctccagcccgtgctgtatcagctgtaaagaatatgaatcttcctgagatcccaagaaatattaacattggtgacatcagtataaaagtgccaaacctgccctcttttaaataaaaatgtaaaaaggccactcccaggtaaaatccagggggaagagtcatctaagtttaccatgcagttgtttaccaaaaatagaggaggagagtcttaacttttgctcttggatttaagtcaaggtactgtatagaagttgtgtaaaatcagtatgaaagttcaatgttgctgttcttgctcagtgattttaaagaaattgagtagttcctatgtgatttttttttttcttttctaaactgcattcctgtgcccacctacggcatgcctctatgtattggctactacagtgttttaaaaagtgtttcagatatttctctaattatgtacaacctaaaatgttggtgttttgtatggatcacaagtgcagcattccttaattccttctgctatatgtcacacagttgttatttggagaaccaagtatgtattgcatgaaaacattatgacttttttctcttagtttaaataaactccaaggtaactggacttctaaagcacctttctgtttgcctgatatctactttagcaataattttttttacaaccctctgactcaacaaagtaaataaaagtatattttatcactattaa

SEQ ID NO: 361948 - DNA, 925 bp, Homo sapiens
gttcactgtattttttaatgtgtcactgttttctctttatagattagtatttcaaagtaaccattccataccaattcaaactaccatctggtccctaagcttgttatatgaaaatcttttatcattgtcttccattgtaagtgttttatgatgagctacacctgagttgtacattttctttttcttttatttgcttctgtatacagctggcttagcaggagctccagcccgtgctgtatcagctgtaaagaatatgaatcttcctgagatcccaagaaatattaacattggtgacatcagtataaaagtgccaaacctgccctcttttaaataaaaatgtaaaaaggccactcccaggtaaaatccagggggaagagtcatctaagtttaccatgcagttgtttaccaaaaatagaggaggagagtcttaacttttgctcttggatttaagtcaaggtactgtatagaagttgtgtaaaatcagtatgaaagttcaatgttgctgttcttgctcagtgattttaaagaaattgagtagttcctatgtgatttttttttttcttttctaaactgcattcctgtgcccacctacggcatgcctctatgtattggctactacagtgttttaaaaagtgtttcagatatttctctaattatgtacaacctaaaatgttggtgttttgtatggatcacaagtgcagcattccttaattccttctgctatatgtcacacagttgttatttggagaaccaagtatgtattgcatgaaaacattatgacttttttctcttagtttaaataaactccaaggtaactggacttctaaagcacctttctgtttgcctgatatctactttagcaataattttttttacaaccctctgactcaacaaagtaaataaaagtatattttatcactattaa

SEQ ID NO: 361949 - DNA, 358 bp, Homo sapiens
agatctgttagcttttatgtatttcatgttattcttaagatggataaatgggtctgaatttagtcactactttttgaaagtcagtcctcttttttttccgaacatcctgatctttctagctctttccattcttctctcttacagacctttatctttcagtctcccagacaggacaggtagacaaggtattgctgactttgagaaatatgtactataacaaagggaaagcaaaatgatgtcaaaggcaattaattatttaggccagactcaaaaattctttgtgttaataaacccatatagtccctgtagcctattttccattctagtttctccttgtagtttcttcatcttttattgg

SEQ ID NO: 361950 - DNA, 2244 bp, Homo sapiens
cgccatcttgcttggagacactcgagagcggaagtagcgactgagcgcgtgcagtgggcgtgcttttctccagggagcgtcgcaaaggaggcgccggagtagggggacgcaattacacagtgaaacttggtgttcccggctagtcattcaaatcgaagctgtcgcagacctctgaacgttagtaacgcaacatgtgtttctccgcgactacagacctcgggagaggagcggtgggcaacgtgtctgtgctcggtcgaatgcgcacactccagttaggccgctggctcggacctagaaatgtttccgctttccttagtgcctgccccgcccaggccccgccccttgggccccgcccgacggctcgggagcgcgcgcggtcgcgtgcgggagggggcgggtggggaaggatcgcaggcgagattacgaggcgaggctcgcgcgcccgcccccgccctggcccccagtgcccacccggtcggcccggcacagccatgatcaaggcgatcctaatcttcaacaaccacgggaagccgcggctctccaagttctaccagccctacagtgaagatacacaacagcaaatcatcagggagactttccatttggtatctaagagagatgaaaatgtttgtaatttcctagaaggaggattattaattggaggatctgacaacaaactgatttatagacattatgcaacgttatattttgtcttctgtgtggattcttcagaaagtgaacttggcattttagatctaattcaagtatttgtggaaacattagacaaatgttttgaaaatgtctgtgagctggatttgattttccatgtagacaaggttcacaatattcttgcagaaatggtgatggggggaatggtattggagacaaatatgaatgagattgttacacaaattgatgcacaaaataagctggaaaaatctgaggctggcttagcaggagctccagcccgtgctgtatcagctgtaaagaatatgaatcttcctgagatcccaagaaatattaacattggtgacatcagtataaaagtgccaaacctgccctcttttaaataaaaatgtaaaaaggccactcccaggtaaaatccagggggaagagtcatctaagtttaccatgcagttgtttaccaaaaatagaggaggagagtcttaacttttgctcttggatttaagtcaaggtactgtatagaagttgtgtaaaatcagtatgaaagttcaatgttgctgttcttgctcagtgattttaaagaaattgagtagttcctatgtgatttttttttttcttttctaaactgcattcctgtgcccacctacggcatgcctctatgtattggctactacagtgttttaaaaagtgtttcagatatttctctaattatgtacaacctaaaatgttggtgttttgtatggatcacaagtgcagcattccttaattccttctgctatatgtcacacagttgttatttggagaaccaagtatgtattgcatgaaaacattatgacttttttctcttagtttaaataaactccaaggtaactggacttctaaagcacctttctgtttgcctgatatctactttagcaataattttttttacaaccctctgactcaacaaagtaaataaaagtatattttatcactattaaaaaaaaaaaaaaaaaaaaaaaaaaaaaaaaaaaaaaaaaaaaaaaaaagagggggggggccaaaaaaagacccccgggggggcccccagggaggggccacccttgtgggaaagagggggccccaaaggggggcgcgccgtaaaaattaaagcacgaggacgggcgcccgccatcgttaaaaacacaactgctgcatgacccgtcgggaaacaacagtgcgaggaccaccgtggggaccaccttccgtgggaggaagcaccccccaacctacgtgggggagggggagaacacaactattgggggaagacaaccactccccttacaaaggagagattatacaacagccccccaaggggaggaagaacatacaaacactctcagaggcgaggatcatcgggggtgcacccaaccgcgacgaatactcggccgacgcgattgaaacaattatgacgcccacgagagacaatatctatgcgagccaaactttaccagcggagcagagtcaaaacaacacgcgacactacatctacgaaactgataccaatcacacatcgacacaccgcacacccgagcgagcaac

SEQ ID NO: 361951 - DNA, 1599 bp, Homo sapiens
cgccatcttgcttggagacactcgagagcggaagtagcgactgagcgcgtgcagtgggcgtgcttttctccagggagcgtcgcaaaggaggcgccggagtagggggacgcaattacacagtgaaacttggtgttcccggctagtcattcaaatcgaagctgtcgcagacctctgaacgttagtaacgcaacatgtgtttctccgcgactacagacctcgggagaggagcggtgggcaacgtgtctgtgctcggtcgaatgcgcacactccagttaggccgctggctcggacctagaaatgtttccgctttccttagtgcctgccccgcccaggccccgccccttgggccccgcccgacggctcgggagcgcgcgcggtcgcgtgcgggagggggcgggtggggaaggatcgcaggcgagattacgaggcgaggctcgcgcgcccgcccccgccctggcccccagtgcccacccggtcggcccggcacagccatgatcaaggcgatcctaatcttcaacaaccacgggaagccgcggctctccaagttctaccagccctacagtgaagatacacaacagcaaatcatcagggagactttccatttggtatctaagagagatgaaaatgtttgtaatttcctagaaggaggattattaattggaggatctgacaacaaactgatttatagacattatgcaacgttatattttgtcttctgtgtggattcttcagaaagtgaacttggcattttagatctaattcaagtatttgtggaaacattagacaaatgttttgaaaatgtctgtgagctggatttgattttccatgtagacaaggttcacaatattcttgcagaaatggtgatggggggaatggtattggagacaaatatgaatgagattgttacacaaattgatgcacaaaataagctggaaaaatctgaggctggcttagcaggagctccagcccgtgctgtatcagctgtaaagaatatgaatcttcctgagatcccaagaaatattaacattggtgacatcagtataaaagtgccaaacctgccctcttttaaataaaaatgtaaaaaggccactcccaggtaaaatccagggggaagagtcatctaagtttaccatgcagttgtttaccaaaaatagaggaggagagtcttaacttttgctcttggatttaagtcaaggtactgtatagaagttgtgtaaaatcagtatgaaagttcaatgttgctgttcttgctcagtgattttaaagaaattgagtagttcctatgtgatttttttttttcttttctaaactgcattcctgtgcccacctacggcatgcctctatgtattggctactacagtgttttaaaaagtgtttcagatatttctctaattatgtacaacctaaaatgttggtgttttgtatggatcacaagtgcagcattccttaattccttctgctatatgtcacacagttgttatttggagaaccaagtatgtattgcatgaaaacattatgacttttttctcttagtttaaataaactccgatgcggcagatgttattctcgtttttttacaaaatgggaaatagtcactaa

SEQ ID NO: 361952 - DNA, 1753 bp, Homo sapiens
cgccatcttgcttggagacactcgagagcggaagtagcgactgagcgcgtgcagtgggcgtgcttttctccagggagcgtcgcaaaggaggcgccggagtagggggacgcaattacacagtgaaacttggtgttcccggctagtcattcaaatcgaagctgtcgcagacctctgaacgttagtaacgcaacatgtgtttctccgcgactacagacctcgggagaggagcggtgggcaacgtgtctgtgctcggtcgaatgcgcacactccagttaggccgctggctcggacctagaaatgtttccgctttccttagtgcctgccccgcccaggccccgccccttgggccccgcccgacggctcgggagcgcgcgcggtcgcgtgcgggagggggcgggtggggaaggatcgcaggcgagattacgaggcgaggctcgcgcgcccgcccccgccctggcccccagtgcccacccggtcggcccggcacagccatgatcaaggcgatcctaatcttcaacaaccacgggaagccgcggctctccaagttctaccagccctacagtgaagatacacaacagcaaatcatcagggagactttccatttggtatctaagagagatgaaaatgtttgtaatttcctagaaggaggattattaattggaggatctgacaacaaactgatttatagacattatgcaacgttatattttgtcttctgtgtggattcttcagaaagtgaacttggcattttagatctaattcaagtatttgtggaaacattagacaaatgttttgaaaatgtctgtgagctggatttgattttccatgtagacaaggttcacaatattcttgcagaaatggtgatggggggaatggtattggagacaaatatgaatgagattgttacacaaattgatgcacaaaataagctggaaaaatctgagacctttatctttcagtctcccagacaggacaggtagacaagcaaatagtttacactggcctattttgtatcagtcaagatttttctcaggctggcttagcaggagctccagcccgtgctgtatcagctgtaaagaatatgaatcttcctgagatcccaagaaatattaacattggtgacatcagtataaaagtgccaaacctgccctcttttaaataaaaatgtaaaaaggccactcccaggtaaaatccagggggaagagtcatctaagtttaccatgcagttgtttaccaaaaatagaggaggagagtcttaacttttgctcttggatttaagtcaaggtactgtatagaagttgtgtaaaatcagtatgaaagttcaatgttgctgttcttgctcagtgattttaaagaaattgagtagttcctatgtgatttttttttttcttttctaaactgcattcctgtgcccacctacggcatgcctctatgtattggctactacagtgttttaaaaagtgtttcagatatttctctaattatgtacaacctaaaatgttggtgttttgtatggatcacaagtgcagcattccttaattccttctgctatatgtcacacagttgttatttggagaaccaagtatgtattgcatgaaaacattatgacttttttctcttagtttaaataaactccaaggtaactggacttctaaagcacctttctgtttgcctgatatctactttagcaataattttttttacaaccctctgactcaacaaagtaaataaaagtatattttatcactattaa

SEQ ID NO: 361953 - DNA, 840 bp, Homo sapiens
ctgaggtgggagcatcacttaggtccaggagttcaaggctgcagtgagctatgatcacgttactgcactccagcttaggcaacagagcaaaaccctgcctccattaaaaataaacataaaacaaattaaaaaaaatgtagtgtctactatatgctagtacagcagtgagtaagagagaccagaacctgtccttagagagcttatcattctggcaggaacactcaacattactaatgaaaaagtctgggttctttgattgaaatcacataaagagtagagcactttaaaacacaaaacagttatctgccctccttgttaacagctactatggatcagagaacccatactcatcagcacattcccaaaataccctaagagcttgaggtcaacttggttttacctgtctggacacaggtaaaccaatcctcttctaaaaattattcaaataaatctccttttcttgctttaagttatccttctcataactggacaatgaaacaacccaattagatactccctggttgagaaacaattttatggagagatttatattcagtgaggttttgacaacacactttttctgcgtgattgggaagtttctacagacagaaatcaatcaagctgaaacagtttaaaatgcctaaaatgcacttctaaactcaagaagaggtcatggatagacgctagccaagacagtacaaaaagtctcccaaaaatttaaccttggctgggcacggtggctcacgcctgtaatcctagtgctttgggagactgaggcaggacagcttgagaccagggagctaaaaccagcctgagcaacgtagaagaccctgtctctaa

SEQ ID NO: 361954 - DNA, 326 bp, Homo sapiens
gtcttcagatgttgccagaagtcccttggggaacaacatagcccccacttgagaaccactgatctaatcccttcaaatcaccgtagggatctctgggggattttgcagtggtctcgggaaaatgcacagacatgtcgtattaggaaggggtagttttgggtaattgcaaggtagttgaggacatttaagggaattgtacaaggcataaagatgtcaggcttctgaagtttttttttttttttttttgagatggagtctcactctgtcaccaggctggagtgcagtggtttaatcttggctcactgcaacccctgcctcccgggttc

SEQ ID NO: 361955 - DNA, 2205 bp, Homo sapiens
  misc_feature (1683)..(1683): n is a, c, g, or t
  misc_feature (2123)..(2123): n is a, c, g, or t
  misc_feature (2204)..(2204): n is a, c, g, or t
tgaggccacttggctcttacggccacgcagggcgccgcagatgcagccggagcccgcttttccctctcaggacgacccctaggccgccagcagttccctaccgacgaaggcgactgtacagcgtccaccgcgttcgtgcccacttacccgccgccccactccgggccgccggctcgcagcaggaccagcccggctgctacggccgcggatacacgccctcaggcccggcgctgcgcagcttgcggaagctttcccggacagactcgctgccagcggattggctgcgagcagcgccaatctcacgttgcccccgggcgaggcgggactcagtgccgcgctctctgcacccgctctgccgcgcgcgtgcgtgctgggtgcgggtgcgggtgcggggttgggcctgcgcatcgggtgagacgctggctgcttgcggctagtggatggtaattgcctgcctcgcgctagcaggaagctgctctgttaaaagcgaaaatgaaacaattgcctgcggcaacagttcgactcctttcaagttctcagatcatcacttcggtggtcagtgttgtaaaagagcttattgaaaactccttggatgctggtgccacaagcgtagatgttaaactggagaactatggatttgataaaattgaggtgcgagataacggggagggtatcaaggctgttgatgcacctgtaatggcaatgaagtactacacctcaaaaataaatagtcatgaagatcttgaaaatttgacaacttacggttttcgtggagaagccttggggtcaatttgttgtatagctgaggttttaattacaacaagaacggctgctgataattttagcacccagtatgttttagatggcagtggccacatactttctcagaaaccttcacatcttggtcaaggtaagaaagtagctttgtatacaaacattctttaccttttctgtcttaattgttggtttaaaaaaaaaaagttactcggtgaatacaaatatattgctttgggcttggtcctgataaaggctagttaacttccaagtaaacattcagcctttattctagccaccaatttcttaaatatttagaattgttctcaaaaggaactgtatgagagactggacacttccatggactagttactcctctgtaaaaactaagagtatttattttaccagtgctggattaccagtgtcatcttcatatatgaagaagattaaaattttattgaaacataaaacataattgatttggtaatagtggaaataaacgataccatcaagatatgattaaataatttaaaatctatttgttaattgatggaaaacttcaaacatgcataagaagttactgtacttatcactcagtttcaataatttatcaattcattgctaaagttctttcatgtaataccctcgcccatttcttccctttctatattactttgaagcaaatacgtattgtttctacttgtaatgtagttagtgttttatatacttttatgtaatattattacattttaattgatatcttatgttttttattttattttattttattttcctgagacagggtctcactctgtcacacaggctggactgcagtggcatcatcttggttcactgcaacctctgcctcccaggctcaagtgatcctcccacctcagcctcctcagtagntgggactacaggtgcataccaccacacccggctaatttttgtatttttagtagagacagggttttgctgtgttgcccagctggcctcgaactcctgagcccaagcgatacacctgccttggcctcccagagtgctgagattacagatgtgagccactgtgttcagctgataagtgtttaaatttctctaaaaactatttacttataaaggtaaaaaagatctctttaggcttcagtttcacatatctcctttaatctttttttaataatttctagtgatgggatgattaagagactattaaagctattacctctttagagtcatgttcaaaataattattagatctgaaaagggacttgtgggttttgttgttgttgtttatccttctgcttctccaatttgtgttgtaaattcatgtttaattttgtgttccctcattncagtttatcaaagtacattctgtatattttctgtggtttttttccttcagttttaatattaaattattggattcttttttnc

SEQ ID NO: 361956 - DNA, 409 bp, Homo sapiens
  misc_feature (29)..(29): n is a, c, g, or t
aaatgagcaaggaagatctacaaccggtnattaaaaaaaaaagaaaccttgcgggagaagcagtgcgtctatccagacaattacccatgtacttatcaaaagaggacatccaagacattatctacagaatgaagcaccagtttggaaatgaaattaaagagtgtgttcatggtcgcccattttttcatcatttaacctatcttccagaaactacatgattaaatatgtttaagaagattagttaccattgaaattggttctgtcataaaacagcatgagtctggttttaaattatctttgtattatgtgtcacatggttattttttaaatgaggattcactgacttgtttttatattgaaaaaagttccacgtattgtagaaaacgtaaataaactaatatagactatt

SEQ ID NO: 361957 - DNA, 3480 bp, Homo sapiens
tgaggccacttggctcttacggccacgcagggcgccgcagatgcagccggagcccgcttttccctctcaggacgacccctaggccgccagcagttccctaccgacgaaggcgactgtacagcgtccaccgcgttcgtgcccacttacccgccgccccactccgggccgccggctcgcagcaggaccagcccggctgctacggccgcggatacacgccctcaggcccggcgctgcgcagcttgcggaagctttcccggacagactcgctgccagcggattggctgcgagcagcgccaatctcacgttgcccccgggcgaggcgggactcagtgccgcgctctctgcacccgctctgccgcgcgcgtgcgtgctgggtgcgggtgcgggtgcggggttgggcctgcgcatcgggtgagacgctggctgcttgcggctagtggatggtaattgcctgcctcgcgctagcaggaagctgctctgttaaaagcgaaaatgaaacaattgcctgcggcaacagttcgactcctttcaagttctcagatcatcacttcggtggtcagtgttgtaaaagagcttattgaaaactccttggatgctggtgccacaagcgtagatgttaaactggagaactatggatttgataaaattgaggtgcgagataacggggagggtatcaaggctgttgatgcacctgtaatggcaatgaagtactacacctcaaaaataaatagtcatgaagatcttgaaaatttgacaacttacggttttcgtggagaagccttggggtcaatttgttgtatagctgaggttttaattacaacaagaacggctgctgataattttagcacccagtatgttttagatggcagtggccacatactttctcagaaaccttcacatcttggtcaaggtacaactgtaactgctttaagattatttaagaatctacctgtaagaaagcagttttactcaactgcaaaaaaatgtaacgatgaaataaaaaagatccaagatctcctcatgagctttggtatccttaaacctgacttaaggattgtctttgtacataacaaggcagttatttggcagaaaagcagagtatcagatcacaagatggctctcatgtcagttctggggactgctgttatgaacaatatggaatcctttcagtaccactctgaagaatctcagatttatctcagtggatttcttccaaagtgtgatgcagaccactctttcactagtctttcaacaccagaaagaagtttcatcttcataaacagtcgaccagtacatcaaaaagatatcttaaagttaatccgacatcattacaatctgaaatgcctaaaggaatctactcgtttgtatcctgttttctttctgaaaatcgatgttcctacagctgatgttgatgtaaatttaacaccagataaaagccaagtattattacaaaataaggaatctgttttaattgctcttgaaaatctgatgacgacttgttatggaccattacctagtacaaattcttatgaaaataataaaacagatgtttccgcagctgacatcgttcttagtaaaacagcagaaacagatgtgctttttaataaagtggaatcatctggaaagaattattcaaatgttgatacttcagtcattccattccaaaatgatatgcataatgatgaatctggaaaaaacactgatgatgtttaaatcaccagataagtattggtgacttggttatggtcattgtagtagtgaaatttctaacattgataaaaacactaagaatgcatttcaggacatttcaatgagtaatgtatcatgggagaactctcagacggaatatagtaaaacttgttttataagttccgttaagcacacccagtcagaaaatggcaataaagaccatatagatgagagtggggaaaatgaggaagaagcaggtcttgaaaactcttcggaaatttctgcagatgagtggagcaggggaaatatacttaaaaattcagtgggagagaatattgaacctgtgaaaattttagtgcctgaaaaaagtttaccatgtaaagtaagtaataataattatccaatccctgaacaaatgaatcttaatgaagattcatgtaacaaaaaatcaaatgtaatagataataaatctggaaaagttacagcttatgatttacttagcaatcgagtaatcaagaaacccatgtcagcaagtgctctttttgttcaagatcatcgtcctcagtttctcatagaaaatcctaagactagtttagaggatgcaacactacaaattgaagaactgtggaagacattgagtgaagaggaaaaactgaaatatgaagagaaggctactaaagacttggaacgatacaatagtcaaatgaagagagccattgaacaggagtcacaaatgtcactaaaagatggcagaaaaaagataaaacccaccagcgcatggaatttggcccagaagcacaagttaaaaacctcattatctaatcaaccaaaacttgatgaactccttcagtcccaaattgaaaaaagaaggagtcaaaatattaaaatggtacagatccccttttctatgaaaaacttaaaaataaattttaagaaacaaaacaaagttgacttagaagagaaggatgaaccttgcttgatccacaatctcaggtttcctgatgcatggctaatgacatccaaaacagaggtaatgttattaaatccatatagagtagaagaagccctgctatttaaaagacttcttgagaatcataaacttcctgcagagccactggaaaagccaattatgttaacagagagtctttttaatggatctcattatttagacgttttatataaaatgacagcagatgaccaaagatacagtggatcaacttacctgtctgatcctcgtcttacagcgaatggtttcaagataaaattgataccaggagtttcaattactgaaaattacttggaaatagaaggaatggctaattgtctcccattctatggagtagcagatttaaaagaaattcttaatgctatattaaacagaaatgcaaaggaagtttatgaatgtagacctcgcaaagtgataagttatttagagggagaagcagtgcgtctatccagacaattacccatgtacttatcaaaagaggacatccaagacattatctacagaatgaagcaccagtttggaaatgaaattaaagagtgtgttcatggtcgcccattttttcatcatttaacctatcttccagaaactacatgattaaatatgtttaagaagattagttaccattgaaattggttctgtcataaaacagcatgagtctggttttaaattatctttgtattatgtgtcacatggttattttttaaatgaggattcactgacttgtttttatattgaaaaaagttccacgtattgtagaaaacgtaaataaactaatatagactatt

SEQ ID NO: 361958 - DNA, 3568 bp, Homo sapiens
tgaggccacttggctcttacggccacgcagggcgccgcagatgcagccggagcccgcttttccctctcaggacgacccctaggccgccagcagttccctaccgacgaaggcgactgtacagcgtccaccgcgttcgtgcccacttacccgccgccccactccgggccgccggctcgcagcaggaccagcccggctgctacggccgcggatacacgccctcaggcccggcgctgcgcagcttgcggaagctttcccggacagactcgctgccagcggattggctgcgagcagcgccaatctcacgttgcccccgggcgaggcgggactcagtgccgcgctctctgcacccgctctgccgcgcgcgtgcgtgctgggtgcgggtgcgggtgcggggttgggcctgcgcatcgggtgagacgctggctgcttgcggctagtggatggtaattgcctgcctcgcgctagcaggaagctgctctgttaaaagcgaaaatgaaacaattgcctgcggcaacagttcgactcctttcaagttctcagatcatcacttcggtggtcagtgttgtaaaagagcttattgaaaactccttggatgctggtgccacaagcgtagatgttaaactggagaactatggatttgataaaattgaggtgcgagataacggggagggtatcaaggctgttgatgcacctgtaatggcaatgaagtactacacctcaaaaataaatagtcatgaagatcttgaaaatttgacaacttacggttttcgtggagaagccttggggtcaatttgttgtatagctgaggttttaattacaacaagaacggctgctgataattttagcacccagtatgttttagatggcagtggccacatactttctcagaaaccttcacatcttggtcaaggtacaactgtaactgctttaagattatttaagaatctacctgtaagaaagcagttttactcaactgcaaaaaaatgtaacgatgaaataaaaaagatccaagatctcctcatgagctttggtatccttaaacctgacttaaggattgtctttgtacataacaaggcagttatttggcagaaaagcagagtatcagatcacaagatggctctcatgtcagttctggggactgctgttatgaacaatatggaatcctttcagtaccactctgaagaatctcagatttatctcagtggatttcttccaaagtgtgatgcagaccactctttcactagtctttcaacaccagaaagaagtttcatcttcataaacagtcgaccagtacatcaaaaagatatcttaaagttaatccgacatcattacaatctgaaatgcctaaaggaatctactcgtttgtatcctgttttctttctgaaaatcgatgttcctacagctgatgttgatgtaaatttaacaccagataaaagccaagtattattacaaaataaggaatctgttttaattgctcttgaaaatctgatgacgacttgttatggaccattacctagtacaaattcttatgaaaataataaaacagatgtttccgcagctgacatcgttcttagtaaaacagcagaaacagatgtgctttttaataaagtggaatcatctggaaagaattattcaaatgttgatacttcagtcattccattccaaaatgatatgcataatgatgaatctggaaaaaacactgatgatgtttaaatcaccagataagtattggtgacttggttatggtcattgtagtagtgaaatttctaacattgataaaaacactaagaatgcatttcaggacatttcaatgagtaatgtatcatgggagaactctcagacggaatatagtaaaacttgttttataagttccgttaagcacacccagtcagaaaatggcaataaagaccatatagatgagagtggggaaaatgaggaagaagcaggtcttgaaaactcttcggaaatttctgcagatgagtggagcaggggaaatatacttaaaaattcagtgggagagaatattgaacctgtgaaaattttagtgcctgaaaaaagtttaccatgtaaagtaagtaataataattatccaatccctgaacaaatgaatcttaatgaagattcatgtaacaaaaaatcaaatgtaatagataataaatctggaaaagttacagcttatgatttacttagcaatcgagtaatcaagaaacccatgtcagcaagtgctctttttgttcaagatcatcgtcctcagtttctcatagaaaatcctaagactagtttagaggatgcaacactacaaattgaagaactgtggaagacattgagtgaagaggaaaaactgaagacacttaatataaacacaaaatattatgttctggtgatctaatccagcagaaaatgagagtgaaattatacctccaatcatatacagatatgaagagaaggctactaaagacttggaacgatacaatagtcaaatgaagagagccattgaacaggagtcacaaatgtcactaaaagatggcagaaaaaagataaaacccaccagcgcatggaatttggcccagaagcacaagttaaaaacctcattatctaatcaaccaaaacttgatgaactccttcagtcccaaattgaaaaaagaaggagtcaaaatattaaaatggtacagatccccttttctatgaaaaacttaaaaataaattttaagaaacaaaacaaagttgacttagaagagaaggatgaaccttgcttgatccacaatctcaggtttcctgatgcatggctaatgacatccaaaacagaggtaatgttattaaatccatatagagtagaagaagccctgctatttaaaagacttcttgagaatcataaacttcctgcagagccactggaaaagccaattatgttaacagagagtctttttaatggatctcattatttagacgttttatataaaatgacagcagatgaccaaagatacagtggatcaacttacctgtctgatcctcgtcttacagcgaatggtttcaagataaaattgataccaggagtttcaattactgaaaattacttggaaatagaaggaatggctaattgtctcccattctatggagtagcagatttaaaagaaattcttaatgctatattaaacagaaatgcaaaggaagtttatgaatgtagacctcgcaaagtgataagttatttagagggagaagcagtgcgtctatccagacaattacccatgtacttatcaaaagaggacatccaagacattatctacagaatgaagcaccagtttggaaatgaaattaaagagtgtgttcatggtcgcccattttttcatcatttaacctatcttccagaaactacatgattaaatatgtttaagaagattagttaccattgaaattggttctgtcataaaacagcatgagtctggttttaaattatctttgtattatgtgtcacatggttattttttaaatgaggattcactgacttgtttttatattgaaaaaagttccacgtattgtagaaaacgtaaataaactaatatagactatt

SEQ ID NO: 361959 - DNA, 3363 bp, Homo sapiens
tgaggccacttggctcttacggccacgcagggcgccgcagatgcagccggagcccgcttttccctctcaggacgacccctaggccgccagcagttccctaccgacgaaggcgactgtacagcgtccaccgcgttcgtgcccacttacccgccgccccactccgggccgccggctcgcagcaggaccagcccggctgctacggccgcggatacacgccctcaggcccggcgctgcgcagcttgcggaagctttcccggacagactcgctgccagcggattggctgcgagcagcgccaatctcacgttgcccccgggcgaggcgggactcagtgccgcgctctctgcacccgctctgccgcgcgcgtgcgtgctgggtgcgggtgcgggtgcggggttgggcctgcgcatcgggtgagacgctggctgcttgcggctagtggatggtaattgcctgcctcgcgctagcaggaagctgctctgttaaaagcgaaaatgaaacaattgcctgcggcaacagttcgactcctttcaagttctcagatcatcacttcggtggtcagtgttgtaaaagagcttattgaaaactccttggatgctggtgccacaagcgtagatgttaaactggagaactatggatttgataaaattgaggtgcgagataacggggagggtatcaaggctgttgatgcacctgtaatggcaatgaagtactacacctcaaaaataaatagtcatgaagatcttgaaaatttgacaacttacggttttcgtggagaagccttggggtcaatttgttgtatagctgaggttttaattacaacaagaacggctgctgataattttagcacccagtatgttttagatggcagtggccacatactttctcagaaaccttcacatcttggtcaaggtacaactgtaactgctttaagattatttaagaatctacctgtaagaaagcagttttactcaactgcaaaaaaatgtaacgatgaaataaaaaagatccaagatctcctcatgagctttggtatccttaaacctgacttaaggattgtctttgtacataacaagatttatctcagtggatttcttccaaagtgtgatgcagaccactctttcactagtctttcaacaccagaaagaagtttcatcttcataaacagtcgaccagtacatcaaaaagatatcttaaagttaatccgacatcattacaatctgaaatgcctaaaggaatctactcgtttgtatcctgttttctttctgaaaatcgatgttcctacagctgatgttgatgtaaatttaacaccagataaaagccaagtattattacaaaataaggaatctgttttaattgctcttgaaaatctgatgacgacttgttatggaccattacctagtacaaattcttatgaaaataataaaacagatgtttccgcagctgacatcgttcttagtaaaacagcagaaacagatgtgctttttaataaagtggaatcatctggaaagaattattcaaatgttgatacttcagtcattccattccaaaatgatatgcataatgatgaatctggaaaaaacactgatgatgtttaaatcaccagataagtattggtgacttggttatggtcattgtagtagtgaaatttctaacattgataaaaacactaagaatgcatttcaggacatttcaatgagtaatgtatcatgggagaactctcagacggaatatagtaaaacttgttttataagttccgttaagcacacccagtcagaaaatggcaataaagaccatatagatgagagtggggaaaatgaggaagaagcaggtcttgaaaactcttcggaaatttctgcagatgagtggagcaggggaaatatacttaaaaattcagtgggagagaatattgaacctgtgaaaattttagtgcctgaaaaaagtttaccatgtaaagtaagtaataataattatccaatccctgaacaaatgaatcttaatgaagattcatgtaacaaaaaatcaaatgtaatagataataaatctggaaaagttacagcttatgatttacttagcaatcgagtaatcaagaaacccatgtcagcaagtgctctttttgttcaagatcatcgtcctcagtttctcatagaaaatcctaagactagtttagaggatgcaacactacaaattgaagaactgtggaagacattgagtgaagaggaaaaactgaaatatgaagagaaggctactaaagacttggaacgatacaatagtcaaatgaagagagccattgaacaggagtcacaaatgtcactaaaagatggcagaaaaaagataaaacccaccagcgcatggaatttggcccagaagcacaagttaaaaacctcattatctaatcaaccaaaacttgatgaactccttcagtcccaaattgaaaaaagaaggagtcaaaatattaaaatggtacagatccccttttctatgaaaaacttaaaaataaattttaagaaacaaaacaaagttgacttagaagagaaggatgaaccttgcttgatccacaatctcaggtttcctgatgcatggctaatgacatccaaaacagaggtaatgttattaaatccatatagagtagaagaagccctgctatttaaaagacttcttgagaatcataaacttcctgcagagccactggaaaagccaattatgttaacagagagtctttttaatggatctcattatttagacgttttatataaaatgacagcagatgaccaaagatacagtggatcaacttacctgtctgatcctcgtcttacagcgaatggtttcaagataaaattgataccaggagtttcaattactgaaaattacttggaaatagaaggaatggctaattgtctcccattctatggagtagcagatttaaaagaaattcttaatgctatattaaacagaaatgcaaaggaagtttatgaatgtagacctcgcaaagtgataagttatttagagggagaagcagtgcgtctatccagacaattacccatgtacttatcaaaagaggacatccaagacattatctacagaatgaagcaccagtttggaaatgaaattaaagagtgtgttcatggtcgcccattttttcatcatttaacctatcttccagaaactacatgattaaatatgtttaagaagattagttaccattgaaattggttctgtcataaaacagcatgagtctggttttaaattatctttgtattatgtgtcacatggttattttttaaatgaggattcactgacttgtttttatattgaaaaaagttccacgtattgtagaaaacgtaaataaactaatatagactatt

SEQ ID NO: 361960 - DNA, 3806 bp, Homo sapiens
tgaggccacttggctcttacggccacgcagggcgccgcagatgcagccggagcccgcttttccctctcaggacgacccctaggccgccagcagttccctaccgacgaaggcgactgtacagcgtccaccgcgttcgtgcccacttacccgccgccccactccgggccgccggctcgcagcaggaccagcccggctgctacggccgcggatacacgccctcaggcccggcgctgcgcagcttgcggaagctttcccggacagactcgctgccagcggattggctgcgagcagcgccaatctcacgttgcccccgggcgaggcgggactcagtgccgcgctctctgcacccgctctgccgcgcgcgtgcgtgctgggtgcgggtgcgggtgcggggttgggcctgcgcatcgggtgagacgctggctgcttgcggctagtggatggtaattgcctgcctcgcgctagcaggaagctgctctgttaaaagcgaaaatgaaacaattgcctgcggcaacagttcgactcctttcaagttctcagatcatcacttcggtggtcagtgttgtaaaagagcttattgaaaactccttggatgctggtgccacaagcgtagatgttaaactggagaactatggatttgataaaattgaggtgcgagataacggggagggtatcaaggctgttgatgcacctgtaatggcaatgaagtactacacctcaaaaataaatagtcatgaagatcttgaaaatttgacaacttacggttttcgtggagaagccttggggtcaatttgttgtatagctgaggttttaattacaacaagaacggctgctgataattttagcacccagtatgttttagatggcagtggccacatactttctcagaaaccttcacatcttggtcaaggtacaactgtaactgctttaagattatttaagaatctacctgtaagaaagcagttttactcaactgcaaaaaaatgtaacgatgaaataaaaaagatccaagatctcctcatgagctttggtatccttaaacctgacttaaggattgtctttgtacataacaaggcagttatttggcagaaaagcagagtatcagatcacaagatggctctcatgtcagttctggggactgctgttatgaacaatatggaatcctttcagtaccactctgaagaatctcagatttatctcagtggatttcttccaaagtgtgatgcagaccactctttcactagtctttcaacaccagaaagaagtttcatcttcataaacagtcgaccagtacatcaaaaagatatcttaaagttaatccgacatcattacaatctgaaatgcctaaaggaatctactcgtttgtatcctgttttctttctgaaaatcgatgttcctacagctgatgttgatgtaaatttaacaccagataaaagccaagtattattacaaaataaggaatctgttttaattgctcttgaaaatctgatgacgacttgttatggaccattacctagtacaaattcttatgaaaataataaaacagatgtttccgcagctgacatcgttcttagtaaaacagcagaaacagatgtgctttttaataaagtggaatcatctggaaagaattattcaaatgttgatacttcagtcattccattccaaaatgatatgcataatgatgaatctggaaaaaacactgatgatgtttaaatcaccagataagtattggtgacttggttatggtcattgtagtagtgaaatttctaacattgataaaaacactaagaatgcatttcaggacatttcaatgagtaatgtatcatgggagaactctcagacggaatatagtaaaacttgttttataagttccgttaagcacacccagtcagaaaatggcaataaagaccatatagatgagagtggggaaaatgaggaagaagcaggtcttgaaaactcttcggaaatttctgcagatgagtggagcaggggaaatatacttaaaaattcagtgggagagaatattgaacctgtgaaaattttagtgcctgaaaaaagtttaccatgtaaagtaagtaataataattatccaatccctgaacaaatgaatcttaatgaagattcatgtaacaaaaaatcaaatgtaatagataataaatctggaaaagttacagcttatgatttacttagcaatcgagtaatcaagaaacccatgtcagcaagtgctctttttgttcaagatcatcgtcctcagtttctcatagaaaatcctaagactagtttagaggatgcaacactacaaattgaagaactgtggaagacattgagtgaagaggaaaaactgaaatatgaagagaaggctactaaagacttggaacgatacaatagtcaaatgaagagagccattgaacaggagtcacaaatgtcactaaaagatggcagaaaaaagataaaacccaccagcgcatggaatttggcccagaagcacaagttaaaaacctcattatctaatcaaccaaaacttgatgaactccttcagtcccaaattgaaaaaagaaggagtcaaaatattaaaatggtacagatccccttttctatgaaaaacttaaaaataaattttaagaaacaaaacaaagttgacttagaagagaaggatgaaccttgcttgatccacaatctcaggtttcctgatgcatggctaatgacatccaaaacagaggtaatgttattaaatccatatagagtagaagaagccctgctatttaaaagacttcttgagaatcataaacttcctgcagagccactggaaaagccaattatgttaacagagagtctttttaatggatctcattatttagacgttttatataaaatgacagcagatgaccaaagatacagtggatcaacttacctgtctgatcctcgtcttacagcgaatggtttcaagataaaattgataccaggagtttcaattactgaaaattacttggaaatagaaggaatggctaattgtctcccattctatggagtagcagatttaaaagaaattcttaatgctatattaaacagaaatgcaaaggaagtttatgaatgtagacctcgcaaagtgataagttatttagagggagaagcagtgcgtctatccagacaattacccatgtacttatcaaaagaggacatccaagacattatctacagaatgaagcaccagtttggaaatgaaattaaagagtgtgttcatggtcgcccattttttcatcatttaacctatcttccagaaactacatgattaaatatgtttaagaagattagttaccattgaaattggttctgtcataaaacagcatgagtctggttttaaattatctttgtattatgtgtcacatggttattttttaaatgaggattcactgacttgtttttatattgaaaaaagttccacgtattgtagaaaacgtaaataaactaatatagactattaaaaaagaagaaaaaaaattggtcctctttggcctttagacggtggatgctttgcggccggttccttttactgagggtttatttattgatccctggttacttgctctgctgggccccgtcgtgtagtttgctgtaaacgtaatcagtatcatttacggccgttattttagcttctccctcttgccggtgctaatttctgatacttcttttctgttcacattgccttcactctgctttattaccacttatatgtcttgcctcttattgttcctcattaccctctcccctttgacctctctttattaagttgtttttttatgtttagg

SEQ ID NO: 361961 - DNA, 3839 bp, Homo sapiens
tgaggccacttggctcttacggccacgcagggcgccgcagatgcagccggagcccgcttttccctctcaggacgacccctaggccgccagcagttccctaccgacgaaggcgactgtacagcgtccaccgcgttcgtgcccacttacccgccgccccactccgggccgccggctcgcagcaggaccagcccggctgctacggccgcggatacacgccctcaggcccggcgctgcgcagcttgcggaagctttcccggacagactcgctgccagcggattggctgcgagcagcgccaatctcacgttgcccccgggcgaggcgggactcagtgccgcgctctctgcacccgctctgccgcgcgcgtgcgtgctgggtgcgggtgcgggtgcggggttgggcctgcgcatcgggtgagacgctggctgcttgcggctagtggatggtaattgcctgcctcgcgctagcaggaagctgctctgttaaaagcgaaaatgaaacaattgcctgcggcaacagttcgactcctttcaagttctcagatcatcacttcggtggtcagtgttgtaaaagagcttattgaaaactccttggatgctggtgccacaagcgtagatgttaaactggagaactatggatttgataaaattgaggtgcgagataacggggagggtatcaaggctgttgatgcacctgtaatggcaatgaagtactacacctcaaaaataaatagtcatgaagatcttgaaaatttgacaacttacggttttcgtggagaagccttggggtcaatttgttgtatagctgaggttttaattacaacaagaacggctgctgataattttagcacccagtatgttttagatggcagtggccacatactttctcagaaaccttcacatcttggtcaaggtacaactgtaactgctttaagattatttaagaatctacctgtaagaaagcagttttactcaactgcaaaaaaatgtaacgatgaaataaaaaagatccaagatctcctcatgagctttggtatccttaaacctgacttaaggattgtctttgtacataacaaggcagttatttggcagaaaagcagagtatcagatcacaagatggctctcatgtcagttctggggactgctgttatgaacaatatggaatcctttcagtaccactctgaagaatctcagatttatctcagtggatttcttccaaagtgtgatgcagaccactctttcactagtctttcaacaccagaaagaagtttcatcttcataaacagtcgaccagtacatcaaaaagatatcttaaagttaatccgacatcattacaatctgaaatgcctaaaggaatctactcgtttgtatcctgttttctttctgaaaatcgatgttcctacagctgatgttgatgtaaatttaacaccagataaaagccaagtattattacaaaataaggaatctgttttaattgctcttgaaaatctgatgacgacttgttatggaccattacctagtacaaattcttatgaaaataataaaacagatgtttccgcagctgacatcgttcttagtaaaacagcagaaacagatgtgctttttaataaagtggaatcatctggaaagaattattcaaatgttgatacttcagtcattccattccaaaatgatatgcataatgatgaatctggaaaaaacactgatgatgtttaaatcaccagataagtattggtgacttggttatggtcattgtagtagtgaaatttctaacattgataaaaacactaagaatgcatttcaggacatttcaatgagtaatgtatcatgggagaactctcagacggaatatagtaaaacttgttttataagttccgttaagcacacccagtcagaaaatggcaataaagaccatatagatgagagtggggaaaatgaggaagaagcaggtcttgaaaactcttcggaaatttctgcagatgagtggagcaggggaaatatacttaaaaattcagtgggagagaatattgaacctgtgaaaattttagtgcctgaaaaaagtttaccatgtaaagtaagtaataataattatccaatccctgaacaaatgaatcttaatgaagattcatgtaacaaaaaatcaaatgtaatagataataaatctggaaaagttacagcttatgatttacttagcaatcgagtaatcaagaaacccatgtcagcaagtgctctttttgttcaagatcatcgtcctcagtttctcatagaaaatcctaagactagtttagaggatgcaacactacaaattgaagaactgtggaagacattgagtgaagaggaaaaactgaaatatgaagagaaggctactaaagacttggaacgatacaatagtcaaatgaagagagccattgaacaggagtcacaaatgtcactaaaagatggcagaaaaaagataaaacccaccagcgcatggaatttggcccagaagcacaagttaaaaacctcattatctaatcaaccaaaacttgatgaactccttcagtcccaaattgaaaaaagaaggagtcaaaatattaaaatggtacagatccccttttctatgaaaaacttaaaaataaattttaagaaacaaaacaaagttgacttagaagagaaggatgaaccttgcttgatccacaatctcaggtttcctgatgcatggctaatgacatccaaaacagaggtaatgttattaaatccatatagagtagaagaagccctgctatttaaaagacttcttgagaatcataaacttcctgcagagccactggaaaagccaattatgttaacagagagtctttttaatggatctcattatttagacgttttatataaaatgacagcagatgaccaaagatacagtggatcaacttacctgtctgatcctcgtcttacagcgaatggtttcaagataaaattgataccaggagtttcaattactgaaaattacttggaaatagaaggaatggctaattgtctcccattctatggagtagcagatttaaaagaaattcttaatgctatattaaacagaaatgcaaaggaagtttatgaatgtagacctcgcaaagtgataagttatttagagggagaagcagtgcgtctatccagacaattacccatgtacttatcaaaagaggacatccaagacattatctacagaatgaagcaccagtttggaaatgaaattaaagagtgtgttcatggtcgcccattttttcatcatttaacctatcttccagaaactacatgattaaatatgtttaagaagattagttaccattgaaattggttctgtcataaaacagcatgagtctggttttaaattatctttgtattatgtgtcacatggttattttttaaatgaggattcactgacttgtttttatattgaaaaaagttccacgtattgtagaaaacgtaaataaactaatatagactattaaaaaaaaaaaacaaaacacaaaacatgtgccgggcggcctatgggcccttggaaaacagtttacaagaaccattccgatggggcgacggagccccagcaggcagcgggaccacgggccaatagggggtaccccaaggagaaccggggcccagtgacaaaagcgggccgtggggaatttcctgcaccgcagtgaaagaaaagggccgaggggggacaaacccgagaaggcgtgtcacgtgagaaccaaatccccgaagaggggccgttacccgagaagggcacaataaacggggggaatctaaacacaaaacgagggaaagtccacaggggagacgccccaaatatcctcaaataagcc

SEQ ID NO: 361962 - DNA, 3508 bp, Homo sapiens
tgaggccacttggctcttacggccacgcagggcgccgcagatgcagccggagcccgcttttccctctcaggacgacccctaggccgccagcagttccctaccgacgaaggcgactgtacagcgtccaccgcgttcgtgcccacttacccgccgccccactccgggccgccggctcgcagcaggaccagcccggctgctacggccgcggatacacgccctcaggcccggcgctgcgcagcttgcggaagctttcccggacagactcgctgccagcggattggctgcgagcagcgccaatctcacgttgcccccgggcgaggcgggactcagtgccgcgctctctgcacccgctctgccgcgcgcgtgcgtgctgggtgcgggtgcgggtgcggggttgggcctgcgcatcgggtgagacgctggctgcttgcggctagtggatggtaattgcctgcctcgcgctagcaggaagctgctctgttaaaagcgaaaatgaaacaattgcctgcggcaacagttcgactcctttcaagttctcagatcatcacttcggtggtcagtgttgtaaaagagcttattgaaaactccttggatgctggtgccacaagcgtagatgttaaactggagaactatggatttgataaaattgaggtgcgagataacggggagggtatcaaggctgttgatgcacctgtaatggcaatgaagtactacacctcaaaaataaatagtcatgaagatcttgaaaatttgacaacttacggttttcgtggagaagccttggggtcaatttgttgtatagctgaggttttaattacaacaagaacggctgctgataattttagcacccagtatgttttagatggcagtggccacatactttctcagaaaccttcacatcttggtcaaggtacaactgtaactgctttaagattatttaagaatctacctgtaagaaagcagttttactcaactgcaaaaaaatgtaacgatgaaataaaaaagatccaagatctcctcatgagctttggtatccttaaacctgacttaaggattgtctttgtacataacaaggcagttatttggcagaaaagcagagtatcagatcacaagatggctctcatgtcagttctggggactgctgttatgaacaatatggaatcctttcagtaccactctgaagaatctcagatttatctcagtggatttcttccaaagtgtgatgcagaccactctttcactagtctttcaacaccagaaagaagtttcatcttcataaacagtcgaccagtacatcaaaaagatatcttaaagttaatccgacatcattacaatctgaaatgcctaaaggaatctactcgtttgtatcctgttttctttctgaaaatcgatgttcctacagctgatgttgatgtaaatttaacaccagataaaagccaagtattattacaaaataaggaatctgttttaattgctcttgaaaatctgatgacgacttgttatggaccattacctagtacaaattcttatgaaaataataaaacagatgtttccgcagctgacatcgttcttagtaaaacagcagaaacagatgtgctttttaataaagtggaatcatctggaaagaattattcaaatgttgatacttcagtcattccattccaaaatgatatgcataatgatgaatctggaaaaaacactgatgatgtttaaatcaccagataagtattggtgacttggttatggtcattgtagtagtgaaatttctaacattgataaaaacactaagaatgcatttcaggacatttcaatgagtaatgtatcatgggagaactctcagacggaatatagtaaaacttgttttataagttccgttaagcacacccagtcagaaaatggcaataaagaccatatagatgagagtggggaaaatgaggaagaagcaggtcttgaaaactcttcggaaatttctgcagatgagtggagcaggggaaatatacttaaaaattcagtgggagagaatattgaacctgtgaaaattttagtgcctgaaaaaagtttaccatgtaaagtaagtaataataattatccaatccctgaacaaatgaatcttaatgaagattcatgtaacaaaaaatcaaatgtaatagataataaatctggaaaagttacagcttatgatttacttagcaatcgagtaatcaagaaacccatgtcagcaagtgctctttttgttcaagatcatcgtcctcagtttctcatagaaaatcctaagactagtttagaggatgcaacactacaaattgaagaactgtggaagacattgagtgaagaggaaaaactgaaatatgaagagaaggctactaaagacttggaacgatacaatagtcaaatgaagagagccattgaacaggagtcacaaatgtcactaaaagatggcagaaaaaagataaaacccaccagcgcatggaatttggcccagaagcacaagttaaaaacctcattatctaatcaaccaaaacttgatgaactccttcagtcccaaattgaaaaaagaaggagtcaaaatattaaaatggtacagatccccttttctatgaaaaacttaaaaataaattttaagaaacaaaacaaagttgacttagaagagaaggatgaaccttgcttgatccacaatctcaggtttcctgatgcatggctaatgacatccaaaacagaggtaatgttattaaatccatatagagtagaagaagccctgctatttaaaagacttcttgagaatcataaacttcctgcagagccactggaaaagccaattatgttaacagagagtctttttaatggatctcattatttagacgttttatataaaatgacagcagatgaccaaagatacagtggatcaacttacctgtctgatcctcgtcttacagcgaatggtttcaagataaaattgataccaggagtttcaattactgaaaattacttggaaatagaaggaatggctaattgtctcccattctatggagtagcagatttaaaagaaattcttaatgctatattaaacagaaatgcaaaggaagtttatgaatgtagacctcgcaaagtgataagttatttagagggagaagcagtgcgtctatccagacaattacccatgtacttatcaaaagaggacatccaagacattatctacagaatgaagcaccagtttggaaatgaaattaaagagtgtgttcatggtcgcccattttttcatcatttaacctatcttccagaaactacatgattaaatatgtttaagaagattagttaccattgaaattggttctgtcataaaacagcatgagtctggttttaaattatctttgtattatgtgtcacatggttattttttaaatgaggattcactgacttgtttttatattgaaaaaagttccacgtattgtagaaaacgtaaataaactaatatagactattatttgattctcaagaaccaaccatcatc

SEQ ID NO: 361963 - DNA, 1269 bp, Homo sapiens
tcagctgagtctagttgcatcatgattagtgagaaggtagagcaaaaatgatacaacacccaagaatcgtactagctaccatttctcttcctgtctttatcttggagttctgtccatgatcctaaattctctaagatatgaagagaaggctactaaagacttggaacgatacaatagtcaaatgaagagagccattgaacaggagtcacaaatgtcactaaaagatggcagaaaaaagataaaacccaccagcgcatggaatttggcccagaagcacaagttaaaaacctcattatctaatcaaccaaaacttgatgaactccttcagtcccaaattgaaaaaagaaggagtcaaaatattaaaatggtacagatccccttttctatgaaaaacttaaaaataaattttaagaaacaaaacaaagttgacttagaagagaaggatgaaccttgcttgatccacaatctcaggtttcctgatgcatggctaatgacatccaaaacagaggtaatgttattaaatccatatagagtagaagaagccctgctatttaaaagacttcttgagaatcataaacttcctgcagagccactggaaaagccaattatgttaacagagagtctttttaatggatctcattatttagacgttttatataaaatgacagcagatgaccaaagatacagtggatcaacttacctgtctgatcctcgtcttacagcgaatggtttcaagataaaattgataccaggagtttcaattactgaaaattacttggaaatagaaggaatggctaattgtctcccattctatggagtagcagatttaaaagaaattcttaatgctatattaaacagaaatgcaaaggaagtttatgaatgtagacctcgcaaagtgataagttatttagagggagaagcagtgcgtctatccagacaattacccatgtacttatcaaaagaggacatccaagacattatctacagaatgaagcaccagtttggaaatgaaattaaagagtgtgttcatggtcgcccattttttcatcatttaacctatcttccagaaactacatgattaaatatgtttaagaagattagttaccattgaaattggttctgtcataaaacagcatgagtctggttttaaattatctttgtattatgtgtcacatggttattttttaaatgaggattcactgacttgtttttatattgaaaaaagttccacgtattgtagaaaacgtaaataaactaatatagactatt

SEQ ID NO: 361964 - DNA, 2863 bp, Homo sapiens
tgaggccacttggctcttacggccacgcagggcgccgcagatgcagccggagcccgcttttccctctcaggacgacccctaggccgccagcagttccctaccgacgaaggcgactgtacagcgtccaccgcgttcgtgcccacttacccgccgccccactccgggccgccggctcgcagcaggaccagcccggctgctacggccgcggatacacgccctcaggcccggcgctgcgcagcttgcggaagctttcccggacagactcgctgccagcggattggctgcgagcagcgccaatctcacgttgcccccgggcgaggcgggactcagtgccgcgctctctgcacccgctctgccgcgcgcgtgcgtgctgggtgcgggtgcgggtgcggggttgggcctgcgcatcgggtgagacgctggctgcttgcggctagtggatggtaattgcctgcctcgcgctagcaggaagctgctctgttaaaagcgaaaatgaaacaattgcctgcggcaacagttcgactcctttcaagttctcagatcatcacttcggtggtcagtgttgtaaaagagcttattgaaaactccttggatgctggtgccacaagcgtagatgttaaactggagaactatggatttgataaaattgaggtgcgagataacggggagggtatcaaggctgttgatgcacctgtaatggcaatgaagtactacacctcaaaaataaatagtcatgaagatcttgaaaatttgacaacttacggttttcgtggagaagccttggggtcaatttgttgtatagctgaggttttaattacaacaagaacggctgctgataattttagcacccagtatgttttagatggcagtggccacatactttctcagaaaccttcacatcttggtcaaggtacaactgtaactgctttaagattatttaagaatctacctgtaagaaagcagttttactcaactgcaaaaaaatgtaacgatgaaataaaaaagatccaagatctcctcatgagctttggtatccttaaacctgacttaaggattgtctttgtacataacaaggcagttatttggcagaaaagcagagtatcagatcacaagatggctctcatgtcagttctggggactgctgttatgaacaatatggaatcctttcagtaccactctgaagaatctcagatttatctcagtggatttcttccaaagtgtgatgcagaccactctttcactagtctttcaacaccagaaagaagtttcatcttcataaacagtcgaccagtacatcaaaaagatatcttaaagttaatccgacatcattacaatctgaaatgcctaaaggaatctactcgtttgtatcctgttttctttctgaaaatcgatgttcctacagctgatgttgatgtaaatttaacaccagataaaagccaagtattattacaaaataaggaatctgttttaattgctcttgaaaatctgatgacgacttgttatggaccattacctagtacaaattcttatgaaaataataaaacagatgtttccgcagctgacatcgttcttagtaaaacagcagaaacagatgtgctttttaataaagtggaatcatctggaaagaattattcaaatgttgatacttcagtcattccattccaaaatgatatgcataatgatgaatctggaaaaaacactgatgatgtttaaatcaccagataagtattggtgacttggttatggtcattgtagtagtgaaatttctaacattgataaaaacactaagaatgcatttcaggacatttcaatgagtaatgtatcatgggagaactctcagacggaatatagtaaaacttgttttataagttccgttaagcacacccagtcagaaaatggcaataaagaccatatagatgagagtggggaaaatgaggaagaagcaggtcttgaaaactcttcggaaatttctgcagatgagtggagcaggggaaatatacttaaaaattcagtgggagagaatattgaacctgtgaaaattttagtgcctgaaaaaagtttaccatgtaaagtaagtaataataattatccaatccctgaacaaatgaatcttaatgaagattcatgtaacaaaaaatcaaatgtaatagataataaatctggaaaagttacagcttatgatttacttagcaatcgagtaatcaagaaacccatgtcagcaagtgctctttttgttcaagatcatcgtcctcagtttctcatagaaaatcctaagactagtttagaggatgcaacactacaaattgaagaactgtggaagacattgagtgaagaggaaaaactgaagagtttcaattactgaaaattacttggaaatagaaggaatggctaattgtctcccattctatggagtagcagatttaaaagaaattcttaatgctatattaaacagaaatgcaaaggaagtttatgaatgtagacctcgcaaagtgataagttatttagagggagaagcagtgcgtctatccagacaattacccatgtacttatcaaaagaggacatccaagacattatctacagaatgaagcaccagtttggaaatgaaattaaagagtgtgttcatggtcgcccattttttcatcatttaacctatcttccagaaactacatgattaaatatgtttaagaagattagttaccattgaaattggttctgtcataaaacagcatgagtctggttttaaattatctttgtattatgtgtcacatggttattttttaaatgaggattcactgacttgtttttatattgaaaaaagttccacgtattgtagaaaacgtaaataaactaatatagactatt

SEQ ID NO: 361965 - DNA, 705 bp, Homo sapiens
gtaaacccccttattttgtgtttttaataagttaaagggccataatttctttttcagtctttttaatggatctcattatttagacgttttatataaaatgacagcagatgaccaaagatacagtggatcaacttacctgtctgatcctcgtcttacagcgaatggtttcaagataaaattgataccaggagtttcaattactgaaaattacttggaaatagaaggaatggctaattgtctcccattctatggagtagcagatttaaaagaaattcttaatgctatattaaacagaaatgcaaaggaagtttatgaatgtagacctcgcaaagtgataagttatttagagggagaagcagtgcgtctatccagacaattacccatgtacttatcaaaagaggacatccaagacattatctacagaatgaagcaccagtttggaaatgaaattaaagagtgtgttcatggtcgcccattttttcatcatttaacctatcttccagaaactacatgattaaatatgtttaagaagattagttaccattgaaattggttctgtcataaaacagcatgagtctggttttaaattatctttgtattatgtgtcacatggttattttttaaatgaggattcactgacttgtttttatattgaaaaaagttccacgtattgtagaaaacgtaaataaactaatatagactatt

SEQ ID NO: 361966 - DNA, 628 bp, Homo sapiens
aatactgacttcttgagtttagtaaatctaaattgtattaaaagttatctatatcatttttgtccctaggcagttatttggcagaaaagcagagtatcagatcacaagatggctctcatgtcagttctggggactgctgttatgaacaatatggaatcctttcagtaccactctgaagaatctcaggtatactgcaaaaacattctcagataattctgatttactcatgaagctgttcacatatttccctttgggggagttacagtggcaagaggttagtcttttaatattttaatcaaatatgtgtgtaaggtaaaacagtcaatacagagcttatgttaaacctctttccccagccctgcttccctttttatcttttctgtttgttgcttacattgattttcaaaaaaattatgttcaatttagaatcttttctgtttactttctactataaaagaaaaatagttggctgggcatggtgactcatgcctgtaattccagcactttggaagtccggggcaggcagatgacgtgaggtcaggacttcaagaccagcctggccaacatggtgaaaccctgtctctactaaaaatacaaaaattagccaggtgtggtggcacatgcctgt

SEQ ID NO: 361967 - DNA, 573 bp, Homo sapiens
  misc_feature (33)..(35): n is a, c, g, or t
  misc_feature (37)..(38): n is a, c, g, or t
cgcggcgccgcccggccgccggcccgtctttgnnngnngttctgtggatacaccccgagtttcaattactgaaaattacttggaaatagaaggaatggctaattgtctcccattctatggagtagcagatttaaaagaaattcttaatgctatattaaacagaaatgcaaaggaagtttatgaatgtagacctcgcaaagtgataagttatttagagggagaagcagtgcgtctatccagacaattacccatgtacttatcaaaagaggacatccaagacattatctacagaatgaagcaccagtttggaaatgaaattaaagagtgtgttcatggtcgcccattttttcatcatttaacctatcttccagaaactacatgattaaatatgtttaagaagattagttaccattgaaattggttctgtcataaaacagcatgagtctggttttaaattatctttgtattatgtgtcacatggttattttttaaatgaggattcactgacttgtttttatattgaaaaaagttccacgtattgtagaaaacgtaaataaactaatatagactatt

SEQ ID NO: 361968 - DNA, 3657 bp, Homo sapiens
tgaggccacttggctcttacggccacgcagggcgccgcagatgcagccggagcccgcttttccctctcaggacgacccctaggccgccagcagttccctaccgacgaaggcgactgtacagcgtccaccgcgttcgtgcccacttacccgccgccccactccgggccgccggctcgcagcaggaccagcccggctgctacggccgcggatacacgccctcaggcccggcgctgcgcagcttgcggaagctttcccggacagactcgctgccagcggattggctgcgagcagcgccaatctcacgttgcccccgggcgaggcgggactcagtgccgcgctctctgcacccgctctgccgcgcgcgtgcgtgctgggtgcgggtgcgggtgcggggttgggcctgcgcatcgggtgagacgctggctgcttgcggctagtggatggtaattgcctgcctcgcgctagcaggaaggtagtgtggtgtgactaacgggtatttattatatcctcgatggctcgagggccccgtcccctctactcgtcctggtccgggcgcgaacgctatagggcagctaagggcgctccccgcggggcgggaagcgaagccgggcttgcgggcgcgcacacgtggaacgcgttttctgagcagctgctctgttaaaagcgaaaatgaaacaattgcctgcggcaacagttcgactcctttcaagttctcagatcatcacttcggtggtcagtgttgtaaaagagcttattgaaaactccttggatgctggtgccacaagcgtagatgttaaactggagaactatggatttgataaaattgaggtgcgagataacggggagggtatcaaggctgttgatgcacctgtaatggcaatgaagtactacacctcaaaaataaatagtcatgaagatcttgaaaatttgacaacttacggttttcgtggagaagccttggggtcaatttgttgtatagctgaggttttaattacaacaagaacggctgctgataattttagcacccagtatgttttagatggcagtggccacatactttctcagaaaccttcacatcttggtcaaggtacaactgtaactgctttaagattatttaagaatctacctgtaagaaagcagttttactcaactgcaaaaaaatgtaacgatgaaataaaaaagatccaagatctcctcatgagctttggtatccttaaacctgacttaaggattgtctttgtacataacaaggcagttatttggcagaaaagcagagtatcagatcacaagatggctctcatgtcagttctggggactgctgttatgaacaatatggaatcctttcagtaccactctgaagaatctcagatttatctcagtggatttcttccaaagtgtgatgcagaccactctttcactagtctttcaacaccagaaagaagtttcatcttcataaacagtcgaccagtacatcaaaaagatatcttaaagttaatccgacatcattacaatctgaaatgcctaaaggaatctactcgtttgtatcctgttttctttctgaaaatcgatgttcctacagctgatgttgatgtaaatttaacaccagataaaagccaagtattattacaaaataaggaatctgttttaattgctcttgaaaatctgatgacgacttgttatggaccattacctagtacaaattcttatgaaaataataaaacagatgtttccgcagctgacatcgttcttagtaaaacagcagaaacagatgtgctttttaataaagtggaatcatctggaaagaattattcaaatgttgatacttcagtcattccattccaaaatgatatgcataatgatgaatctggaaaaaacactgatgatgtttaaatcaccagataagtattggtgacttggttatggtcattgtagtagtgaaatttctaacattgataaaaacactaagaatgcatttcaggacatttcaatgagtaatgtatcatgggagaactctcagacggaatatagtaaaacttgttttataagttccgttaagcacacccagtcagaaaatggcaataaagaccatatagatgagagtggggaaaatgaggaagaagcaggtcttgaaaactcttcggaaatttctgcagatgagtggagcaggggaaatatacttaaaaattcagtgggagagaatattgaacctgtgaaaattttagtgcctgaaaaaagtttaccatgtaaagtaagtaataataattatccaatccctgaacaaatgaatcttaatgaagattcatgtaacaaaaaatcaaatgtaatagataataaatctggaaaagttacagcttatgatttacttagcaatcgagtaatcaagaaacccatgtcagcaagtgctctttttgttcaagatcatcgtcctcagtttctcatagaaaatcctaagactagtttagaggatgcaacactacaaattgaagaactgtggaagacattgagtgaagaggaaaaactgaaatatgaagagaaggctactaaagacttggaacgatacaatagtcaaatgaagagagccattgaacaggagtcacaaatgtcactaaaagatggcagaaaaaagataaaacccaccagcgcatggaatttggcccagaagcacaagttaaaaacctcattatctaatcaaccaaaacttgatgaactccttcagtcccaaattgaaaaaagaaggagtcaaaatattaaaatggtacagatccccttttctatgaaaaacttaaaaataaattttaagaaacaaaacaaagttgacttagaagagaaggatgaaccttgcttgatccacaatctcaggtttcctgatgcatggctaatgacatccaaaacagaggtaatgttattaaatccatatagagtagaagaagccctgctatttaaaagacttcttgagaatcataaacttcctgcagagccactggaaaagccaattatgttaacagagagtctttttaatggatctcattatttagacgttttatataaaatgacagcagatgaccaaagatacagtggatcaacttacctgtctgatcctcgtcttacagcgaatggtttcaagataaaattgataccaggagtttcaattactgaaaattacttggaaatagaaggaatggctaattgtctcccattctatggagtagcagatttaaaagaaattcttaatgctatattaaacagaaatgcaaaggaagtttatgaatgtagacctcgcaaagtgataagttatttagagggagaagcagtgcgtctatccagacaattacccatgtacttatcaaaagaggacatccaagacattatctacagaatgaagcaccagtttggaaatgaaattaaagagtgtgttcatggtcgcccattttttcatcatttaacctatcttccagaaactacatgattaaatatgtttaagaagattagttaccattgaaattggttctgtcataaaacagcatgagtctggttttaaattatctttgtattatgtgtcacatggttattttttaaatgaggattcactgacttgtttttatattgaaaaaagttccacgtattgtagaaaacgtaaataaactaatatagactatt

SEQ ID NO: 361969 - DNA, 3606 bp, Homo sapiens
tgaggccacttggctcttacggccacgcagggcgccgcagatgcagccggagcccgcttttccctctcaggacgacccctaggccgccagcagttccctaccgacgaaggcgactgtacagcgtccaccgcgttcgtgcccacttacccgccgccccactccgggccgccggctcgcagcaggaccagcccggctgctacggccgcggatacacgccctcaggcccggcgctgcgcagcttgcggaagctttcccggacagactcgctgccagcggattggctgcgagcagcgccaatctcacgttgcccccgggcgaggcgggactcagtgccgcgctctctgcacccgctctgccgcgcgcgtgcgtgctgggtgcgggtgcgggtgcggggttgggcctgcgcatcgggtgagacgctggctgcttgcggctagtggatggtaattgcctgcctcgcgctagcaggaaggcacacctgttgtccttaactgactttccgggtcatcagcacttcttcagaagtgttccttttccctcccagcaaatatggaagactgactatcctgatattcccagacattctttgctgtgatttctgctctgttaaaagcgaaaatgaaacaattgcctgcggcaacagttcgactcctttcaagttctcagatcatcacttcggtggtcagtgttgtaaaagagcttattgaaaactccttggatgctggtgccacaagcgtagatgttaaactggagaactatggatttgataaaattgaggtgcgagataacggggagggtatcaaggctgttgatgcacctgtaatggcaatgaagtactacacctcaaaaataaatagtcatgaagatcttgaaaatttgacaacttacggttttcgtggagaagccttggggtcaatttgttgtatagctgaggttttaattacaacaagaacggctgctgataattttagcacccagtatgttttagatggcagtggccacatactttctcagaaaccttcacatcttggtcaaggtacaactgtaactgctttaagattatttaagaatctacctgtaagaaagcagttttactcaactgcaaaaaaatgtaacgatgaaataaaaaagatccaagatctcctcatgagctttggtatccttaaacctgacttaaggattgtctttgtacataacaaggcagttatttggcagaaaagcagagtatcagatcacaagatggctctcatgtcagttctggggactgctgttatgaacaatatggaatcctttcagtaccactctgaagaatctcagatttatctcagtggatttcttccaaagtgtgatgcagaccactctttcactagtctttcaacaccagaaagaagtttcatcttcataaacagtcgaccagtacatcaaaaagatatcttaaagttaatccgacatcattacaatctgaaatgcctaaaggaatctactcgtttgtatcctgttttctttctgaaaatcgatgttcctacagctgatgttgatgtaaatttaacaccagataaaagccaagtattattacaaaataaggaatctgttttaattgctcttgaaaatctgatgacgacttgttatggaccattacctagtacaaattcttatgaaaataataaaacagatgtttccgcagctgacatcgttcttagtaaaacagcagaaacagatgtgctttttaataaagtggaatcatctggaaagaattattcaaatgttgatacttcagtcattccattccaaaatgatatgcataatgatgaatctggaaaaaacactgatgatgtttaaatcaccagataagtattggtgacttggttatggtcattgtagtagtgaaatttctaacattgataaaaacactaagaatgcatttcaggacatttcaatgagtaatgtatcatgggagaactctcagacggaatatagtaaaacttgttttataagttccgttaagcacacccagtcagaaaatggcaataaagaccatatagatgagagtggggaaaatgaggaagaagcaggtcttgaaaactcttcggaaatttctgcagatgagtggagcaggggaaatatacttaaaaattcagtgggagagaatattgaacctgtgaaaattttagtgcctgaaaaaagtttaccatgtaaagtaagtaataataattatccaatccctgaacaaatgaatcttaatgaagattcatgtaacaaaaaatcaaatgtaatagataataaatctggaaaagttacagcttatgatttacttagcaatcgagtaatcaagaaacccatgtcagcaagtgctctttttgttcaagatcatcgtcctcagtttctcatagaaaatcctaagactagtttagaggatgcaacactacaaattgaagaactgtggaagacattgagtgaagaggaaaaactgaaatatgaagagaaggctactaaagacttggaacgatacaatagtcaaatgaagagagccattgaacaggagtcacaaatgtcactaaaagatggcagaaaaaagataaaacccaccagcgcatggaatttggcccagaagcacaagttaaaaacctcattatctaatcaaccaaaacttgatgaactccttcagtcccaaattgaaaaaagaaggagtcaaaatattaaaatggtacagatccccttttctatgaaaaacttaaaaataaattttaagaaacaaaacaaagttgacttagaagagaaggatgaaccttgcttgatccacaatctcaggtttcctgatgcatggctaatgacatccaaaacagaggtaatgttattaaatccatatagagtagaagaagccctgctatttaaaagacttcttgagaatcataaacttcctgcagagccactggaaaagccaattatgttaacagagagtctttttaatggatctcattatttagacgttttatataaaatgacagcagatgaccaaagatacagtggatcaacttacctgtctgatcctcgtcttacagcgaatggtttcaagataaaattgataccaggagtttcaattactgaaaattacttggaaatagaaggaatggctaattgtctcccattctatggagtagcagatttaaaagaaattcttaatgctatattaaacagaaatgcaaaggaagtttatgaatgtagacctcgcaaagtgataagttatttagagggagaagcagtgcgtctatccagacaattacccatgtacttatcaaaagaggacatccaagacattatctacagaatgaagcaccagtttggaaatgaaattaaagagtgtgttcatggtcgcccattttttcatcatttaacctatcttccagaaactacatgattaaatatgtttaagaagattagttaccattgaaattggttctgtcataaaacagcatgagtctggttttaaattatctttgtattatgtgtcacatggttattttttaaatgaggattcactgacttgtttttatattgaaaaaagttccacgtattgtagaaaacgtaaataaactaatatagactatt

SEQ ID NO: 361970 - DNA, 2448 bp, Homo sapiens
tgtcgttagtgatgaatgcagaggaaagcagctcggctaattgcagttatttggcagaaaagcagagtatcagatcacaagatggctctcatgtcagttctggggactgctgttatgaacaatatggaatcctttcagtaccactctgaagaatctcagatttatctcagtggatttcttccaaagtgtgatgcagaccactctttcactagtctttcaacaccagaaagaagtttcatcttcataaacagtcgaccagtacatcaaaaagatatcttaaagttaatccgacatcattacaatctgaaatgcctaaaggaatctactcgtttgtatcctgttttctttctgaaaatcgatgttcctacagctgatgttgatgtaaatttaacaccagataaaagccaagtattattacaaaataaggaatctgttttaattgctcttgaaaatctgatgacgacttgttatggaccattacctagtacaaattcttatgaaaataataaaacagatgtttccgcagctgacatcgttcttagtaaaacagcagaaacagatgtgctttttaataaagtggaatcatctggaaagaattattcaaatgttgatacttcagtcattccattccaaaatgatatgcataatgatgaatctggaaaaaacactgatgatgtttaaatcaccagataagtattggtgacttggttatggtcattgtagtagtgaaatttctaacattgataaaaacactaagaatgcatttcaggacatttcaatgagtaatgtatcatgggagaactctcagacggaatatagtaaaacttgttttataagttccgttaagcacacccagtcagaaaatggcaataaagaccatatagatgagagtggggaaaatgaggaagaagcaggtcttgaaaactcttcggaaatttctgcagatgagtggagcaggggaaatatacttaaaaattcagtgggagagaatattgaacctgtgaaaattttagtgcctgaaaaaagtttaccatgtaaagtaagtaataataattatccaatccctgaacaaatgaatcttaatgaagattcatgtaacaaaaaatcaaatgtaatagataataaatctggaaaagttacagcttatgatttacttagcaatcgagtaatcaagaaacccatgtcagcaagtgctctttttgttcaagatcatcgtcctcagtttctcatagaaaatcctaagactagtttagaggatgcaacactacaaattgaagaactgtggaagacattgagtgaagaggaaaaactgaaatatgaagagaaggctactaaagacttggaacgatacaatagtcaaatgaagagagccattgaacaggagtcacaaatgtcactaaaagatggcagaaaaaagataaaacccaccagcgcatggaatttggcccagaagcacaagttaaaaacctcattatctaatcaaccaaaacttgatgaactccttcagtcccaaattgaaaaaagaaggagtcaaaatattaaaatggtacagatccccttttctatgaaaaacttaaaaataaattttaagaaacaaaacaaagttgacttagaagagaaggatgaaccttgcttgatccacaatctcaggtttcctgatgcatggctaatgacatccaaaacagaggtaatgttattaaatccatatagagtagaagaagccctgctatttaaaagacttcttgagaatcataaacttcctgcagagccactggaaaagccaattatgttaacagagagtctttttaatggatctcattatttagacgttttatataaaatgacagcagatgaccaaagatacagtggatcaacttacctgtctgatcctcgtcttacagcgaatggtttcaagataaaattgataccaggagtttcaattactgaaaattacttggaaatagaaggaatggctaattgtctcccattctatggagtagcagatttaaaagaaattcttaatgctatattaaacagaaatgcaaaggaagtttatgaatgtagacctcgcaaagtgataagttatttagagggagaagcagtgcgtctatccagacaattacccatgtacttatcaaaagaggacatccaagacattatctacagaatgaagcaccagtttggaaatgaaattaaagagtgtgttcatggtcgcccattttttcatcatttaacctatcttccagaaactacatgattaaatatgtttaagaagattagttaccattgaaattggttctgtcataaaacagcatgagtctggttttaaattatctttgtattatgtgtcacatggttattttttaaatgaggattcactgacttgtttttatattgaaaaaagttccacgtattgtagaaaacgtaaataaactaatatagactatt

SEQ ID NO: 361971 - DNA, 3349 bp, Homo sapiens
tgaggccacttggctcttacggccacgcagggcgccgcagatgcagccggagcccgcttttccctctcaggacgacccctaggccgccagcagttccctaccgacgaaggcgactgtacagcgtccaccgcgttcgtgcccacttacccgccgccccactccgggccgccggctcgcagcaggaccagcccggctgctacggccgcggatacacgccctcaggcccggcgctgcgcagcttgcggaagctttcccggacagactcgctgccagcggattggctgcgagcagcgccaatctcacgttgcccccgggcgaggcgggactcagtgccgcgctctctgcacccgctctgccgcgcgcgtgcgtgctgggtgcgggtgcgggtgcggggttgggcctgcgcatcgggtgagacgctggctgcttgcggctagtggatggtaattgcctgcctcgcgctagcaggaagctgctctgttaaaagcgaaaatgaaacaattgcctgcggcaacagttcgactcctttcaagttctcagatcatcacttcggtggtcagtgttgtaaaagagcttattgaaaactccttggatgctggtgccacaagcgtagatgttaaactggagaactatggatttgataaaattgaggtgcgagataacggggagggtatcaaggctgttgatgcacctgtaatggcaatgaagtactacacctcaaaaataaatagtcatgaagatcttgaaaatttgacaacttacggttttcgtggagaagccttggggtcaatttgttgtatagctgaggttttaattacaacaagaacggctgctgataattttagcacccagtatgttttagatggcagtggccacatactttctcagaaaccttcacatcttggtcaaggtacaactgtaactgctttaagattatttaagaatctacctgtaagaaagcagttttactcaactgcaaaaaaatgtaacgatgaaataaaaaagatccaagatctcctcatgagctttggtatccttaaacctgacttaaggattgtctttgtacataacaaggcagttatttggcagaaaagcagagtatcagatcacaagatggctctcatgtcagttctggggactgctgttatgaacaatatggaatcctttcagtaccactctgaagaatctcagatttatctcagtggatttcttccaaagtgtgatgcagaccactctttcactagtctttcaacaccagaaagaagtttcatcttcataaacagtcgaccagtacatcaaaaagatatcttaaagttaatccgacatcattacaatctgaaatgcctaaaggaatctactcgtttgtatcctgttttctttctgaaaatcgatgttcctacagctgatgttgatgtaaatttaacaccagataaaagccaagtattattacaaaataaggaatctgttttaattgctcttgaaaatctgatgacgacttgttatggaccattacctagtacaaattcttatgaaaataataaaacagatgtttccgcagctgacatcgttcttagtaaaacagcagaaacagatgtgctttttaataaagtggaatcatctggaaagaattattcaaatgttgatacttcagtcattccattccaaaatgatatgcataatgatgaatctggaaaaaacactgatgatgtttaaatcaccagataagtattggtgacttggttatggtcattgtagtagtgaaatttctaacattgataaaaacactaagaatgcatttcaggacatttcaatgagtaatgtatcatgggagaactctcagacggaatatagtaaaacttgttttataagttccgttaagcacacccagtcagaaaatggcaataaagaccatatagatgagagtggggaaaatgaggaagaagcaggtcttgaaaactcttcggaaatttctgcagatgagtggagcaggggaaatatacttaaaaattcagtgggagagaatattgaacctgtgaaaattttagtgcctgaaaaaagtttaccatgtaaagtaagtaataataattatccaatccctgaacaaatgaatcttaatgaagattcatgtaacaaaaaatcaaatgtaatagataataaatctggaaaagttacagcttatgatttacttagcaatcgagtaatcaagaaacccatgtcagcaagtgctctttttgttcaagatcatcgtcctcagtttctcatagaaaatcctaagactagtttagaggatgcaacactacaaattgaagaactgtggaagacattgagtgaagaggaaaaactgaaatatgaagagaaggctactaaagacttggaacgatacaatagtcaaatgaagagagccattgaacaggagtcacaaatgtcactaaaagatggcagaaaaaagataaaacccaccagcgcatggaatttggcccagaagcacaagttaaaaacctcattatctaatcaaccaaaacttgatgaactccttcagtcccaaattgaaaaaagaaggagtcaaaatattaaaatggtacagatccccttttctatgaaaaacttaaaaataaattttaagaaacaaaacaaagttgacttagaagagaaggatgaaccttgcttgatccacaatctcaggtttcctgatgcatggctaatgacatccaaaacagaggtaatgttattaaatccatatagagtagaagaagccctgctatttaaaagacttcttgagaatcataaacttcctgcagagccactggaaaagccaattatgttaacagagaggagtttcaattactgaaaattacttggaaatagaaggaatggctaattgtctcccattctatggagtagcagatttaaaagaaattcttaatgctatattaaacagaaatgcaaaggaagtttatgaatgtagacctcgcaaagtgataagttatttagagggagaagcagtgcgtctatccagacaattacccatgtacttatcaaaagaggacatccaagacattatctacagaatgaagcaccagtttggaaatgaaattaaagagtgtgttcatggtcgcccattttttcatcatttaacctatcttccagaaactacatgattaaatatgtttaagaagattagttaccattgaaattggttctgtcataaaacagcatgagtctggttttaaattatctttgtattatgtgtcacatggttattttttaaatgaggattcactgacttgtttttatattgaaaaaagttccacgtattgtagaaaacgtaaataaactaatatagactatt

SEQ ID NO: 361972 - DNA, 1170 bp, Homo sapiens
tcagctgagtctagttgcatcatgattagtgagaagatatgaagagaaggctactaaagacttggaacgatacaatagtcaaatgaagagagccattgaacaggagtcacaaatgtcactaaaagatggcagaaaaaagataaaacccaccagcgcatggaatttggcccagaagcacaagttaaaaacctcattatctaatcaaccaaaacttgatgaactccttcagtcccaaattgaaaaaagaaggagtcaaaatattaaaatggtacagatccccttttctatgaaaaacttaaaaataaattttaagaaacaaaacaaagttgacttagaagagaaggatgaaccttgcttgatccacaatctcaggtttcctgatgcatggctaatgacatccaaaacagaggtaatgttattaaatccatatagagtagaagaagccctgctatttaaaagacttcttgagaatcataaacttcctgcagagccactggaaaagccaattatgttaacagagagtctttttaatggatctcattatttagacgttttatataaaatgacagcagatgaccaaagatacagtggatcaacttacctgtctgatcctcgtcttacagcgaatggtttcaagataaaattgataccaggagtttcaattactgaaaattacttggaaatagaaggaatggctaattgtctcccattctatggagtagcagatttaaaagaaattcttaatgctatattaaacagaaatgcaaaggaagtttatgaatgtagacctcgcaaagtgataagttatttagagggagaagcagtgcgtctatccagacaattacccatgtacttatcaaaagaggacatccaagacattatctacagaatgaagcaccagtttggaaatgaaattaaagagtgtgttcatggtcgcccattttttcatcatttaacctatcttccagaaactacatgattaaatatgtttaagaagattagttaccattgaaattggttctgtcataaaacagcatgagtctggttttaaattatctttgtattatgtgtcacatggttattttttaaatgaggattcactgacttgtttttatattgaaaaaagttccacgtattgtagaaaacgtaaataaactaatatagactatt

SEQ ID NO: 361973 - DNA, 1156 bp, Homo sapiens
tcagctgagtctagttgcatcatgattagtgagaaggtagagcaaaaatgatacaacacccaagaatcgtactagctaccatttctcttcctgtctttatcttggagttctgtccatgatcctaaattctctaagatatgaagagaaggctactaaagacttggaacgatacaatagtcaaatgaagagagccattgaacaggagtcacaaatgtcactaaaagatggcagaaaaaagataaaacccaccagcgcatggaatttggcccagaagcacaagttaaaaacctcattatctaatcaaccaaaacttgatgaactccttcagtcccaaattgaaaaaagaaggagtcaaaatattaaaatggtacagatccccttttctatgaaaaacttaaaaataaattttaagaaacaaaacaaagttgacttagaagagaaggatgaaccttgcttgatccacaatctcaggtttcctgatgcatggctaatgacatccaaaacagagtctttttaatggatctcattatttagacgttttatataaaatgacagcagatgaccaaagatacagtggatcaacttacctgtctgatcctcgtcttacagcgaatggtttcaagataaaattgataccaggagtttcaattactgaaaattacttggaaatagaaggaatggctaattgtctcccattctatggagtagcagatttaaaagaaattcttaatgctatattaaacagaaatgcaaaggaagtttatgaatgtagacctcgcaaagtgataagttatttagagggagaagcagtgcgtctatccagacaattacccatgtacttatcaaaagaggacatccaagacattatctacagaatgaagcaccagtttggaaatgaaattaaagagtgtgttcatggtcgcccattttttcatcatttaacctatcttccagaaactacatgattaaatatgtttaagaagattagttaccattgaaattggttctgtcataaaacagcatgagtctggttttaaattatctttgtattatgtgtcacatggttattttttaaatgaggattcactgacttgtttttatattgaaaaaagttccacgtattgtagaaaacgtaaataaactaatatagactatt

SEQ ID NO: 361974 - DNA, 11405 bp, Homo sapiens
gcggccgctcccccggagcggctaaagcggcggcgaccgaggcgagcaatgggcacggcagtctcggcagagcacaggcgcttcaccgcggctgctcgggctccgcgctgacctgcccgggcggccgcctattgtctttctccgcggcgaaggtgaagagttgtcccagctcggcccgcgggggagccccgggagccgcacgtgtcctgggtcatgaaacttaatccacagcaagctcccttatatggtgattgtgttgttacagtgctgcttgctgaagaggacaaagctgaagatgatgtagtgttttacttggtatttttgggttccaccctccgtcactgtacaagtactcggaaggtcagttctgatacattggagaccattgctcctggtcatgattgttgtgaaacagtgaaggtgcagctctgtgcttccaaagagggccttcccgtgtttgtggtggctgaagaagactttcatttcgtccaggatgaagcgtatgatgcagctcaattcctagcaaccagtgctggaaatcagcaggctttgaactttacccgttttcttgaccagtcaggacccccatctggggatgtgaattcccttgataagaagttggtgctggcattcaggcacctgaagctgcccacggagtggaatgtattggggacagatcagagtttgcatgatgctggcccgcgagagacattgatgcattttgctgtgcggctgggactgctgaggttgacgtggttcctgttgcagaagccaggtggccgcggagctctcagtatccacaaccaggaaggggcgacgcctgtgagcttggccttggagcgaggctatcacaagctgcaccagcttctaaccgaggagaatgctggagaaccagactcctggagcagtttatcctatgaaataccgtatggagactgttctgtgaggcatcatcgagagttggacatctatacattaacctctgagtctgattcacatcatgaacacccatttcctggagacggttgcactggaccaatttttaaacttatgaacatccaacagcaactaatgaaaacaaacctcaagcagatggacagtcttatgcccttaatgatgacagcacaggatccttccagtgccccagagacagatggccagtttcttccctgtgcaccggagcccacggaccctcagcgactttcttcttctgaagagactgagagcactcagtgctgcccagggagccctgttgcacagactgaaagtccctgtgatttgtcaagcatagttgaggaggagaatacagaccgttcctgtaggaagaaaaataaaggcgtggaaagaaaaggggaagaggtggagccagcacctattgtggactctggaactgtatctgatcaagacagctgccttcagagcttgcctgattgtggagtaaagggcacggaaggcctttcgtcctgtggaaacagaaatgaagaaactggaacaaaatcttctggaatgcccacagaccaggagtccctgagcagtggagatgctgtgcttcagagagacttggtcatggagccaggcacagcccagtattcctctggaggtgaactgggaggcatttcaacaacaaatgtcagtaccccagacactgcaggggaaatggaacatgggctcatgaacccagatgccactgtttggaagaatgtgcttcagggaggggaaagtacaaaggaaagatttgagaactctaatattggcacagctggagcctctgacgtgcacgtcacaagtaagcctgtggataaaatcagtgttccaaactgtgcccctgccgccagttccctggatggtaacaaacctgctgagtcttcacttgcatttagtaatgaagaaacctccactgaaaaaacagcagaaacggaaacttcacgaagtcgtgaggagagtgctgatgctccagtagatcagaattctgtggtgattccagctgctgcaaaagacaagatttcagatggattagaaccttatactctcttagcagcaggcataggtgaggcaatgtcaccctcagatttagcccttcttgggctggaagaagatgtaatgccacaccagaactcagaaacaaattcatctcatgctcaaagccaaaagggcaaatcctcacccatttgttctacaactggagacgataaactttgtgcagactctgcatgtcaacagaacacagtgacttctagtggcgatttggttgcaaaactgtgtgataacatagttagcgagtccgaaagcaccacagcaaggcaacccagctcacaagatccacccgatgcctcccactgtgaagacccacaggctcatacagtcacctctgaccctgtaagggatacccaggaacgtgcggatttttgtcctttcaaagtggtggataacaaaggccaacgaaaagatgtgaaactagataaacctttaacaaatatgcttgaggtggtttcacatccacatccagttgtccctaaaatggagaaagaactggtgccagaccaggcagtaatatcagacagtactttctctctggcaaacagtccaggcagtgaatcagtaaccaaggatgacgcactttcttttgtcccctcccagaaagaaaagggaacagcaactcctgaactacatacagctacagattatagagatggcccagatggaaattcgaatgagcctgatacgcggccactagaagacagggcagcaggcctgtccacatcctccactgctgcagagcttcagcacgggatggggaataccagtctcacaggacttggtggagagcatgagggtcctgcccctccagcaatcccagaagctctgaatatcaaggggaacactgactcttccctgcaaagtatgggtaaggccactttggctttagattcagttttgactgaagaaggaaaacttctggtggtttcagaaagctctgcagctcaggaacaagataaggataaagcggtgacctgttcctctattaaggaaaatgctctctcttcaggaactttgcaggaagagcagagaacaccacctcctggacaagatactcaacaatttcatgaaaaatcaatctcagctgactgtgccaaggacaaagcacttcagctaagtaattcaccgggtgcatcctctgcctttcttaaggcagaaactgaacataacaaggaagtggccccacaagtctcactgctgactcaaggtggggctgcccagagcctggtgccaccaggagcaagtctggccacagagtcaaggcaggaagccttgggggcagagcacaacagctctgctctgttgccatgtctgttgccagatgggtctgatgggtccgatgctcttaactgcagtcaggcttctcctctggatgttggagtgaagaacactcaatcccagggaaaaactagtgcctgtgaggtgagtggaaatgtgacggtggatgttacaggggttaatgctctacaaggtatggctgagcccagaagagagaatatatcacacaacacccaagacatcctgattccaaacgtcttgttgagccaagagaagaatgccgttctaggtttgccagtggctctacaggacaaagctgtgactgacccacagggagttggaaccccagagatgatacctcttgattgggagaaagggaagctggagggagcagaccacagctgtaccatgggtgacgctgaggaagcccaaatagacgatgaagcacatcctgtcctactgcagcctgttgccaaggagctccccacagacatggagctctcagcccatgatgatggggccccagctggtgtgagggaagtcacgcgagccccgccttcaggcagagaaaggagcactccctctctaccttgcatggtctctgcccaggacgcacctctgcctaagggagcagacttgatagaggaggctgccagccgtatagtggatgctgtcatcgaacaagtcaaggccgctggagcactgcttactgagggggaggcctgtcacatgtcactgtccagccctgagttgggtcctctcactaaaggactagagagtgcttttacagaaaaagtgagtactttcccacctggggagagcctaccaatgggcagtactcctgaggaagccacggggagccttgcaggatgttttgctggaagggaggagccagagaagatcattttacctgtccaggggcctgagccagcagcagaaatgccagacgtgaaagctgaagatgaagtggattttagagcaagttcaatttctgaagaagtggctgtagggagcatagctgctacactgaagatgaagcaaggcccaatgacccaggcgataaaccgagaaaactggtgtacaatagagccatgccctgatgcagcatctcttctggcttccaagcagagcccagaatgtgagaacttcctggatgttggactgggcagagagtgtacctcaaaacaaggtgtacttaaaagagaatctgggagtgattctgacctctttcactcacccagtgatgacatggacagcatcatcttcccaaagccagaggaagagcatttggcctgtgatatcaccggatccagttcatccaccgatgacacggcttcactggaccgacattcttctcatggcagtgatgtgtctctctcccagattttaaagccaaacaggtcaagagatcggcaaagccttgatggattctacagccatgggatgggagctgagggtcgagaaagtgagagtgagcctgctgacccaggcgacgtggaggaggaggagatggacagtatcactgaagtgcctgcaaactgctctgtcctaaggagctccatgcgctctctttctcccttccggaggcacagctgggggcctgggaaaaatgcagccagcgatgcagaaatgaaccaccggagttcaatgcgagttcttggggatgttgtcaggagacctcccattcataggagaagtttcagtctagaaggcttgacaggaggagctggtgtcggaaacaagccatcctcatctctagaagtaagctctgcaaatgccgaagagctcagacacccattcagtggtgaggaacgggttgactctttggtgtcactttcagaagaggatctggagtcagaccagagagaacataggatgtttgatcagcagatatgtcacagatctaagcagcagggatttaattactgtacatcagccatttcctctccattgacaaaatccatctcattaatgacaatcagccatcctggattggacaattcacggcccttccacagtaccttccacaataccagtgctaatctgactgagagtataacagaagagaactataatttcctgccacatagcccctccaagaaagattctgaatggaagagtggaacaaaagtcagtcgtacattcagctacatcaagaataaaatgtctagcagcaagaagagcaaagaaaaggaaaaagaaaaagataagattaaggagaaggagaaagattctaaagacaaggagaaagataagaagactgtcaacgggcacactttcagttccattcctgttgtgggtcccatcagctgtagccagtgtatgaagcccttcaccaacaaagatgcctatacttgtgcaaattgcagtgcttttgtccacaaaggctgccgagaaagtctagcctcctgtgcaaaggtcaaaatgaagcagcccaaagggagccttcaggcacatgacacatcatcactgcccacggtcattatgagaaacaagccctcacagcccaaggagcgtcctcggtccgcagtcctcctggtggatgaaaccgctaccaccccaatatttgccaatagacgatcccagcagagtgtctcgctctccaaaagtgtctccatacagaacattactggagttggcaatgatgagaacatgtcaaacacctggaaattcctgtctcattcaacagactcactaaataaaatcagcaaggtcaatgagtcaacagaatcacttactgatgagggagggtacagacatgaatgaaggacaactactgggagactttgagattgagtccaaacagctggaagcagagtcttggagtcggataatagacagcaagtttctaaaacagcaaaagaaagatgtggtcaaacggcaagaagtaatatatgagttgatgcagacagagtttcatcatgtccgcactctcaagatcatgagtggtgtgtacagccaggggatgatggcggatctgctttttgagcagcagatggtagaaaagctgttcccctgtttggatgagctgatcagtatccatagccaattcttccagaggattctggagcggaagaaggagtctctggtggataaaagtgaaaagaactttctcatcaagaggataggggatgtgcttgtaaatcagttttcaggtgagaatgcagaacgtttaaagaagacatatggcaagttttgtgggcaacataaccagtctgtaaactacttcaaagacctttatgccaaggataagcgttttcaagcctttgtaaagaagaagatgagcagttcagttgttagaaggcttggaattccagagtgcatattgcttgtaactcagcggattaccaagtacccagttttattccaaagaatattgcagtgtaccaaagacaatgaagtggagcaggaagatctagcacagtccttgagcctggtgaaggatgtgattggagctgtagacagcaaagtggcaagttatgaaaagaaagtgcgtctcaatgagatttatacaaagacagatagcaagtcaatcatgaggatgaagagtggtcagatgtttgccaaggaagatttgaaacggaagaagcttgtacgtgatgggagtgtgtttctgaagaatgcagcaggaaggttgaaagaggttcaagcagttcttctcactgacattttagttttccttcaagaaaaagaccagaagtacatctttgcatcattggaccagaagtcaacagtgatctctttaaagaagctgattgtgagagaagtggcacatgaggagaaaggtttattcctgatcagcatggggatgacagatccagagatggtagaagtccatgccagctccaaagaggaacgaaacagctggattcagatcattcaggacacaatcaacaccctgaacagagatgaagatgaaggaattcctagtgagaatgaggaagaaaagaaaatgttggacaccagagcccgagaattaaaagaacaacttcaccagaaggaccaaaaaatcctactcttgttggaagagaaggagatgattttccgggacatggctgagtgcagcacccctctcccagaggattgctccccaacacatagccctagagttctcttccgctccaacacagaagaggctctcaaaggaggacctttaatgaaaagtgcaataaatgaggtggagatccttcagggtttggtgagtggaaatctgggaggcacacttgggccgactgtcagcagccccattgagcaagatgtggtcggtcccgtttccctgccccggagagcagagacctttggaggatttgacagccatcagatgaatgcttcaaaaggaggcgagaaggaagagggagatgatggccaagatcttaggagaacggaatcagatagtggcctaaaaaagggtggaaatgctaacctggtatttatgcttaaaagaaacagtgagcaggttgtccagagcgttgttcatctctacgagctcctcagcgctctgcagggtgtggtgctgcagcaggacagctacattgaggaccagaaactggtgctgagcgagagggcgctcactcgcagcttgtcccgcccgagctccctcattgagcaggagaagcagcgcagcctggagaagcagcgccaggacctggccaacctgcagaagcagcaggcccagtacctcgaggagaagcgcaggcgcgagcgtgagtgggaagctcgtgagagggagctgcgggagcgggaggccctcctggcccagcgcgaggaggaggtgcagcaggggcagcaggacctggaaaaggagcgggaggagctccagcagaagaagggcacataccagtatgacctggagcgactgcgtgctgcccagaaacagcttgagagggaacaggagcagctgcgccgggaggcagagcggctcagccagcggcagacagaacgggacctgtgtcaggtttcccatccacataccaagctgatgaggatcccatcgttcttccccagtcctgaggagcccccctcgccatctgcaccttccatagccaaatcagggtcattggactcagaactttcagtgtccccaaaaaggaacagcatctctcggacacacaaagataaggggccttttcacatactgagttcaaccagccagacaaacaaaggaccagaagggcagagccaggcccctgcgtccacctctgcctctacccgcctgtttgggttaacaaagccaaaggaaaagaaggagaaaaaaaagaagaacaaaaccagccgctctcagcccggtgatggtcccgcgtcagaagtatcagcagagggtgaagagatcttctgctgaccctcttcctctctgctgaggcagctgcctcctgatcctggccagcccacctctcctgctgtccccgcgtgcacaagtctcttacactggacgcccactgctcctcagcgtccagtcctcctgggcggccccaggtcctggacaataagcaacagatgatattgagtgtcgggtggggaaggaggcccagactctgcttcggccatgatttgtgactgcccaggactctcaggttgggctggccctactcaggattacactgaaagtaatggcctcgtaagtacaggtgatggttttggacacgtcaggaattcctaaaggctgaaagagtgtatccaagtaaggtctgaacctccgactgccttttatttgggggaacacaaaaccaaacagcagatgttttggacttgatctgtgtacgtacatggggacctgtctgcatatacacacggggaatgccagaagaaggcccagtctgcaccaggcgtctggtcaacttagcacaagggcagtgcctggacggacccggagcccccgcatatcagcagttcacccagtactcctcagagactggtttccctctaaacccatcccgggcacataccacccctgttttgcatgtatttctcatttcattttagggatgacaaacatttgtgaaaccagtgagagaaggcttgatgtgtataaaagacgtgatgtgcaccacctcgatctcggtgtttcaggcactaaagcaacaaaacaacccatagtatctcattttgtcatcagatccagaagaaatatcctggttttccagcatgtttacccacatgttttgggcatggataaagtgaagaggcctactcaccattatccctgcagcgtgacaccttttgattgtcactgaccactcagaaggggccacggcctcctggctgtgttcctgagcccccgtcgtgcctctcccagacagcagctgtctggcccttgctgggtgagggcacaccactgccaggggtcagcctcgcacccaggccaggcagaagctgtgctctgaagctaggacagctggctgagaagtgggttcaggcgaagggtgaagccatgtgtagcagttcctgccagtgcagatctggagaggagctggcccggaaggcgtggttgtgaaagcgcccttcttatgttaggaggccttggcaaaattggatttcttcaaaaatacatgtaaaggtctgttgttgaattgtactctgcccctggaagcagatacagatggctgcctgctgctcggctttgcttttgcttttcccaccgtgttttcatctttgttcacttgaggctttccccagctggtgtgtgcaggacagttcatggtaatgttgccctctgaggccccgtacaccagaagggaggccctggaaaattttgtgcttccaacgtggccttcaattcttgcttttttgcccctcggaagcatggggcttttgagcacacttaaaaaaagaaaaatctgtaacttggtgcttattgatgaattgcaagctggccttgcagatggagatatttatctttcagtttatttgaaagaggtctggtttaaaatttgtagcctacatttgttttatttattgtatttgtgtgtttgtgtttgtttttttttaagggtgagccaggtctagcccaacagtctaaactatccagtcaataccgagtgaagtggcagccagcactgttcactctgtgtcttttgaagtgccttgaaggcccagatgaaattttaaagggagggggtccatgtccttccctcccccaccccgcctcattctttaatcaaaggatgtcttctcccttgtttgagaatgaagaaactcgccacctctgacctacctttgcctttttctgtcatggagaatactcacccttcagaaacagaccaaaggccaaaacctgctgatttttctattgaaaatatgtccccttgcaaagaccctaaacaaaaagttaagtttctttctttcacctatttgtacaactccaagttacagctgaatctgtcgtgactttcctgagatctacccggggcttggctgtctgttctgggcactggctccgagttcccctcctgggatttgcaggagggcagtactgaacctgcattcttctccttgtaaatgtaggccgggtgcccctgttctccgggtttggaacaatacgaggttggtgctgatgggatttacttgcgtacgtgctcttcacaaaaacaccgtggatgctgaagttagagcacgtcgccacagagcttgacatcaatgttagagggtctcttactccccgcccagctgtgatgtttcatctgctttggttgttttggtggtcttttttaaaaatagagatttcacatctgcccagaccccactcaaaacgatttggtcaggttctggttggacaagtttaaaatcaaagtagtgcccggaattccctcaaaccacccaacttcatccaggaatacagtctgcagtgcagcaacagaaccgcttaccaagaactgtgcttacatacctttgtcatctctcttccccccttggaagttgtcctcagggggatttgttcctgtcctggggatttacctgggatggtggctgcctgtgcttttgctcatggccttgacagtgctctagttgctggatctaatggcctgtcttggtttctatcacatgagaaggggttgtttttttggggtgactcggactgaattccccatactgtt

SEQ ID NO: 361975 - DNA, 1741 bp, Homo sapiens
gtggtcaccttccccagctagaaagccttctttttatatcaacttccttttaattatgaagtattacaatcaagcataaagacataataaatgttaacatctttcctttgtgtctgtttaaaaaatgtttcttattacagaaaatttcaaatagatttaaagtagagaaatgcacgtgatgaaaccccatgcacttgccattccatttcaatagttattacttcacggaagagttggcaatgatgagaacatgtcaaacacctggaaattcctgtctcattcaacagactcactaaataaaatcagcaaggtcaatgagtcaacagaatcacttactgatgagggagggtacagacatgaatgaaggacaactactgggagactttgagattgagtccaaacagctggaagcagagtcttggagtcggataatagacagcaagtttctaaaacagcaaaagaaagatgtggtcaaacggcaagaagtaatatatgagttgatgcagacagagtttcatcatgtccgcactctcaagatcatgagtggtgtgtacagccaggggatgatggcggatctgctttttgagcagcagatggtagaaaagctgttcccctgtttggatgagctgatcagtatccatagccaattcttccagaggattctggagcggaagaaggagtctctggtggataaaagtgaaaagaactttctcatcaagaggataggggatgtgcttgtaaatcagttttcaggtgagaatgcagaacgtttaaagaagacatatggcaagttttgtgggcaacataaccagtctgtaaactacttcaaagacctttatgccaaggataagcgttttcaagcctttgtaaagaagaagatgagcagttcagttgttagaaggcttggaattccagagtgcatattgcttgtaactcagcggattaccaagtacccagttttattccaaagaatattgcagtgtaccaaagacaatgaagtggagcaggaagatctagcacagtccttgagcctggtgaaggatgtgattggagctgtagacagcaaagtggcaagttatgaaaagaaagtgcgtctcaatgagatttatacaaagacagatagcaagtcaatcatgaggatgaagagtggtcagatgtttgccaaggaagatttgaaacggaagaagcttgtacgtgatgggagtgtgtttctgaagaatgcagcaggaaggttgaaagaggttcaagcagttcttctcactgacattttagttttccttcaagaaaaagaccagaagtacatctttgcatcattggaccagaagtcaacagtgatctctttaaagaagctgattgtgagagaagtggcacatgaggagaaaggtttattcctgatcagcatggggatgacagatccagagatggtagaagtccatgccagctccaaagaggaacgaaacagctggattcagatcattcaggacacaatcaacaccctttccgggaatggatggaggtgctttaactgatgcgagtctcacagagtcctatttcagcaccagctttattggagtcaatggatttggaagccctgtagaaacaaagtatcccttgatgcagtacactctggttgtcttccaacgtcttcgggtctgcacctctggattcagcaataccaaaaacaccggcccccaaacttcccacctacttgaaccaataaacttcctcttgtgtttaaact

SEQ ID NO: 361976 - DNA, 2912 bp, Homo sapiens
  misc_feature (1367)..(1367): n is a, c, g, or t
ggctctttttaacatgaggtcactgaaaatccataattaaaacattaaaaatgggccaggcggtagctcacgcctgtaatccaagcactttgggaggctgaggtgggaggattgtgtgaagccaggagttcaaaatcagcctgggcaacatagcaagaccccatctctacaaaaaaatttgaaaaatagccaggcgtggtggcatgtgcctttagtcccagcttactctagaggctgaggcaggaagattgcgtgagctcaggagttcaaggctgcagtgagctatcatcacaccactcagagcaagactgtctccaaaacagacaagtgaacaagaaaacattagtgacggatctaaggaaacttagccaagttttgataacggaacctgggcgttgtggcatactctataaaaagccattcagcagccttcatctaccttttattctgcttcacttttatttaacttctgtagccctttaaaaaaaatcaatcttcttgtttttatttagtataacagaagagaactataatttcctgccacatagcccctccaagaaagattctgaatggaagagtggaacaaaagtcagtcgtacattcagctacatcaagaataaaatgtctagcagcaagaagagcaaagtgagtatcactgtgggcattgcttgtgatcacctcagtaggatcctgtcacagcctgcattcacaccaaaactggttaaatcatggggacataaatggaaataaattcaggattactctccgaaatcgcctaatatttaaaggaaaataataagaagaaaaatagcaagaagtggaactaccagttactgagttttcactatatgctaagtgctttccatatattatttaaccctttcaacaaccctgtcaggtaggtgttatctctcttttctaaaagtgatgtaccttaccgaggatactcctctaatgtgaagaagtagttcaaaccagatctctttggtttcaaatcccatactcttaaaccacagtgcttaaatctgtaatatcagtttaaatgcaacagaaggattttatgcaaagatcaaaggattgaaaatatttatatttgggtttagagggaaggattatcccacagaagattacaagaacttttaagactaatatgatttcttagatctatttctaattaggagcatttggaatatattctcttagtgattaagagattaaataaatgtttaaaccgtgtgtgtgtgtgtgtgtgtgtgtgtctgtgtgtgtgtgtgtgtaaggctccactgtatcacccaggctggagcacagtggcgtgaccatagctcactgcagtcttgaactgccaggcttaagcagtttcctgnctcgcaccgtagcctcccgagtagccaggactacagtcatgttgtgccatcgtgctgagctatgtttaaatttgtttgtaaagatgaagtcttgctgttgtgtctaggccggtctaatgccttacctcaaacactcttctcgctgcaggcttccgaagccctgggtgtgatccaccgtgcccagcctaaagtaacattttttatctaattatttttcacatgctcattatggaaatcttcaaaatctaaaagtaaaagaatgaaaatctcctggaataaccccgcttagagataactacacttaatgttttggtttatatatttctaatcttttttaaaaatgtattttcaaaagaaagggagaaaagaagttcactttcttatactgattcccagtgctaaaccaaaactgattccatttcaagtccgtggggaaaaacttttcgcctctcacaccctgttcatctacccacaacaccctctaacaaaataaagacataagtaaataaaaatttgaaatcagttaaggaactcttgcaaggaatcactgtgtgtgtgtgtgtgtgtatgtgtgtgtgtgcacgtgcatgcatgtgtgtgtgtgtgtgtgtgtggtatatacatgtacatacagatatatacacacgtagatacatgcatatttagaagtaagggaataaacaaacattgaattcaagaatattgtcataaaagggcattgcctcctccctcacaaaacaaggtgcactaagcttctcaagccctcacttcagtgggctgatggaaatatagccaaagtattttaccatgttttgtaagatctcttggtttagcaaatacattcaaagaaatttttccaccaaacgtgccacaagaattgtgttttcatttctcctgtgcaagtacagaatggagagaaagtaggaatcagggagagatgcaaagagtctagcaaattatttctagcataatcacacatttaacttcagactcagccttgtattataattccaaaaaaaaaaaaaaatgagggtcaaagaatacggtttacccagtatcctacgtattaacatttgggcagccaggttaaaaatagagcctaacctatttaactaaccactgccggctgggatactagtgggtatcaacaaaagaaaatcccccttggacagagcaatataaattagccaagtattattaaatgccttgtatagtcttagcatcccactaggtgttaacaggcacctaagagaactaaagctcatagtcctgaccttgaaaaactttatgatctagttgggatgaattccaaaatgtttccatggttttttatttggctttaaaactactgaatcttgtcttcaaacaagcttttcgtggaagaccaataaataagtggagattccccctttctagccatctccccaatgtcatggagttttaggacagagcagtgaatgtaccacttatctcatggataaggtaaaacatacacatgataggaaaaaaacaacgtaagttggaatttagaaactggaccctgac

SEQ ID NO: 361977 - DNA, 663 bp, Homo sapiens
  misc_feature (21)..(21): n is a, c, g, or t
tgtaactgatacgactcgagntcggtacccggagacacttacgaatcagggagagatgcaaagagtctagcaaattatttctagcataatcacacatttaacttcagactcagccttgtattataattccaaaaaaaaaaaaaaatgagggtcaaagaatacggtttacccagtatcctacgtattaacatttgggcagccaggttaaaaatagagcctaacctatttaactaaccactgccggctgggatactagtgggtatcaacaaaagaaaatcccccttggacagagcaatataaattagccaagtattattaaatgccttgtatagtcttagcatcccactaggtgttaacaggcacctaagagaactaaagctcatagtcctgaccttgaaaaactttatgatctagttgggatgaattccaaaatgtttccatggttttttatttggctttaaaactactgaatcttgtcttcaaacaagcttttcgtggaagaccaataaataagtggagattccccctttctagccatctccccaatgtcatggagttttaggacagagcagtgaatgtaccacttatctcatggataaggtaaaacatacacatgataggaaaaaaacaacgtaagttggaatttagaaactggaccctgac

SEQ ID NO: 361978 - DNA, 653 bp, Homo sapiens
atacgactcgagctcgacccggagacacttacgaatcagggagagatgcaaagagtctagcaaattatttctagcataatcacacatttaacttcagactcagccttgtattataattccaaaaaaaaaaaaaaatgagggtcaaagaatacggtttacccagtatcctacgtattaacatttgggcagccaggttaaaaatagagcctaacctatttaactaaccactgccggctgggatactagtgggtatcaacaaaagaaaatcccccttggacagagcaatataaattagccaagtattattaaatgccttgtatagtcttagcatcccactaggtgttaacaggcacctaagagaactaaagctcatagtcctgaccttgaaaaactttatgatctagttgggatgaattccaaaatgtttccatggttttttatttggctttaaaactactgaatcttgtcttcaaacaagcttttcgtggaagaccaataaataagtggagattccccctttctagccatctccccaatgtcatggagttttaggacagagcagtgaatgtaccacttatctcatggataaggtaaaacatacacatgataggaaaaaaacaacgtaagttggaatttagaaactggaccctgac

SEQ ID NO: 361979 - DNA, 565 bp, Homo sapiens
taaattcgcggccgcgtcgactttttttttttttttctttgctcttcttgctgctagacattttattcttgatgtagctgaatgtacgactgacttttgttccactcttccattcagaatctttcttggaggggctatgtggcaggaaattatagttctcttctgttatactctcagtcagattagcactggtattgtggaaggtactgtggaagggccgtgaattgtccaatccaggatggctgattgtcattaatgagatggattttgtcaatggagaggaaatggctgatgtacagtaattaaatccctgctgcttagatctgtgacatatctgctgatcaaacatcctatgttctctctggtctgactccagatcctcttctgaaagtgacaccaaagagtcaacccgttcctcaccactgaatgggtgtctgagctcttcggcatttgcagagcttacttctagagatgaggatggcttgtttccgacaccagctcctcctgtcaagccttctagactgaaactccggtggttcatttctgcatcgctggctgcattttt

SEQ ID NO: 361980 - DNA, 781 bp, Homo sapiens
gcttctctattgaagtcgacgaattagtctactttcgtacctgaaaacccttcctggggagtactttttttttcttttccacaaaagaaaaaccaggaatgtgtgtgtgcttgtgcacaggccctaaagtattgtcaacacattgtttaataatgtaatgaaagactttattactaggccacctggcattttccattccattgtggatatagtcatttcttaaagcaagtcagaggcataagttcattccttggcctttgaattccttaattagtatttgtcaggtaatattttgaagctaaaaataaacgatttataagctgagaagtaatttctagtcagattgctaatttgcttcaaattttccgttggattttctttagaagtcattagtgaccttccattgtttagaaaaatatttagaaatccaaaaattagggttatattactgttagtttctcaggaggcatttgtaaagaagtatttttaactattagctgaacctgtttgttggcaagtgggcaaatagtgatctttcctactttgtctttttcaagtggatgctttctttaattccagattttaggcaagaaattgagctgaaattcagatattctcatgaatttcagataatcatgattcctatgaaattgttcttccagaaaataagttgttaaataagttttaaccccatctctactaaataagtttttcagtagaaggttctttggagatacgtttgtctgggtctttattaaagctcttcaatatgagcttatta

SEQ ID NO: 361981 - DNA, 675 bp, Homo sapiens
agatgtttttagtatacttttaaggaagagaaccccaggtatgaattgtgatcattcttattttcataatctaacaggtatgtatttattagccaaattttttagaaactgcattagaattctgtatattcagaaatggagatgagaatgtaaacaaattattacatcattcacctagacagcatttcccggaaccgcataggccattgacattatgctgtttccccatgtgctgaaggccctggcataatccgagcatgctctaatgtcttctgtgaacctccttctcagctcagcagcagatgcggccagcaaggcggatctccatcagcatctctccgctcctccttaagtctaaaactctcttttctcttggctcttcttattcgagtgatgaggaggaggagttgcatagtaagtaagcaactttggtgtccagtgactgttcttgaaggtctgaccagctcagatgctgtaggcttggtactaagaaattgtatgggggcttttagcctcttgcatgccatcctttgtaagtcatttgtctttatgcttgcctttgagaattggtttggatagaacatttttttgtcttctgtatagtactaacgctgagctactggcctcctgattccagggcacaagataatctttctagcacacagataccctcaa

SEQ ID NO: 361982 - DNA, 433 bp, Homo sapiens
  misc_feature (32)..(32): n is a, c, g, or t
  misc_feature (40)..(40): n is a, c, g, or t
tcgcaccgttggggagtacggaatcagatagnggcctaanaaagggtggaaatgctaacctggtatttatgcttaaaagaaacagtgagcaggttgtccagagcgttgttcatctctacgagctcctcagcgctctgcaggtgcgtgccttcatcttccatccctgcgtttatttgtctagagaacagcagcttggggctgttgttgacttggatctttgaggtttgcaggatgtttaatggataaatggggccctcagtctagggaagactggctctcgtggtgagaaagttacagaatgcatcgaccttccaggactagaattagtgaagagctggtgtgccgtaggcatggcttgataaccatgctacaaatcacatagcatgctaacatgcatctgggagattacttcactttagaaagccttaagtat

SEQ ID NO: 361983 - DNA, 449 bp, Homo sapiens
caaagctgctgagctctgccctgacggcatgcgcccccgcttctgtgagagcacgcttcctggcatgggggtcgaatcatgtcgataaaatgggctcggtttcatgaagtaccccacataacagtgagattcataggaccaaagcatggggaggtaagagcctgacttctttaaagcactaaattctagtaaacacagaaagagccagtggagttggttgttttgttttgtttccatcctgggaagaactaatttggattgttgcaaagggaagctatttcttatttattcaggtttgaagagcattgcaaggcttgagaggataagctggttgccataaaaagattttttaaacgattgaagtataatttaactttcctgagcaaaaaaatcagatgcttttccatttaacattttatgcatggaaaaacctttagcaaaatttagtt

SEQ ID NO: 361984 - DNA, 11368 bp, Homo sapiens
agcgggaagcgcctgtgctctgccgagactgccgtgcccattgctcgcctcggtcgccgccgctttagcccgcctccgggggagcggccgcctattgtctttctccgcggcgaaggtgaagagttgtcccagctcggcccgcgggggagccccgggagccgcacgtgtcctgggtcatgaaacttaatccacagcaagctcccttatatggtgattgtgttgttacagtgctgcttgctgaagaggacaaagctgaagatgatgtagtgttttacttggtatttttgggttccaccctccgtcactgtacaagtactcggaaggtcagttctgatacattggagaccattgctcctggtcatgattgttgtgaaacagtgaaggtgcagctctgtgcttccaaagagggccttcccgtgtttgtggtggctgaagaagactttcatttcgtccaggatgaagcgtatgatgcagctcaattcctagcaaccagtgctggaaatcagcaggctttgaactttacccgttttcttgaccagtcaggacccccatctggggatgtgaattcccttgataagaagttggtgctggcattcaggcacctgaagctgcccacggagtggaatgtattggggacagatcagagtttgcatgatgctggcccgcgagagacattgatgcattttgctgtgcggctgggactgctgaggttgacgtggttcctgttgcagaagccaggtggccgcggagctctcagtatccacaaccaggaaggggcgacgcctgtgagcttggccttggagcgaggctatcacaagctgcaccagcttctaaccgaggagaatgctggagaaccagactcctggagcagtttatcctatgaaataccgtatggagactgttctgtgaggcatcatcgagagttggacatctatacattaacctctgagtctgattcacatcatgaacacccatttcctggagacggttgcactggaccaatttttaaacttatgaacatccaacagcaactaatgaaaacaaacctcaagcagatggacagtcttatgcccttaatgatgacagcacaggatccttccagtgccccagagacagatggccagtttcttccctgtgcaccggagcccacggaccctcagcgactttcttcttctgaagagactgagagcactcagtgctgcccagggagccctgttgcacagactgaaagtccctgtgatttgtcaagcatagttgaggaggagaatacagaccgttcctgtaggaagaaaaataaaggcgtggaaagaaaaggggaagaggtggagccagcacctattgtggactctggaactgtatctgatcaagacagctgccttcagagcttgcctgattgtggagtaaagggcacggaaggcctttcgtcctgtggaaacagaaatgaagaaactggaacaaaatcttctggaatgcccacagaccaggagtccctgagcagtggagatgctgtgcttcagagagacttggtcatggagccaggcacagcccagtattcctctggaggtgaactgggaggcatttcaacaacaaatgtcagtaccccagacactgcaggggaaatggaacatgggctcatgaacccagatgccactgtttggaagaatgtgcttcagggaggggaaagtacaaaggaaagatttgagaactctaatattggcacagctggagcctctgacgtgcacgtcacaagtaagcctgtggataaaatcagtgttccaaactgtgcccctgccgccagttccctggatggtaacaaacctgctgagtcttcacttgcatttagtaatgaagaaacctccactgaaaaaacagcagaaacggaaacttcacgaagtcgtgaggagagtgctgatgctccagtagatcagaattctgtggtgattccagctgctgcaaaagacaagatttcagatggattagaaccttatactctcttagcagcaggcataggtgaggcaatgtcaccctcagatttagcccttcttgggctggaagaagatgtaatgccacaccagaactcagaaacaaattcatctcatgctcaaagccaaaagggcaaatcctcacccatttgttctacaactggagacgataaactttgtgcagactctgcatgtcaacagaacacagtgacttctagtggcgatttggttgcaaaactgtgtgataacatagttagcgagtccgaaagcaccacagcaaggcaacccagctcacaagatccacccgatgcctcccactgtgaagacccacaggctcatacagtcacctctgaccctgtaagggatacccaggaacgtgcggatttttgtcctttcaaagtggtggataacaaaggccaacgaaaagatgtgaaactagataaacctttaacaaatatgcttgaggtggtttcacatccacatccagttgtccctaaaatggagaaagaactggtgccagaccaggcagtaatatcagacagtactttctctctggcaaacagtccaggcagtgaatcagtaaccaaggatgacgcactttcttttgtcccctcccagaaagaaaagggaacagcaactcctgaactacatacagctacagattatagagatggcccagatggaaattcgaatgagcctgatacgcggccactagaagacagggcagcaggcctgtccacatcctccactgctgcagagcttcagcacgggatggggaataccagtctcacaggacttggtggagagcatgagggtcctgcccctccagcaatcccagaagctctgaatatcaaggggaacactgactcttccctgcaaagtatgggtaaggccactttggctttagattcagttttgactgaagaaggaaaacttctggtggtttcagaaagctctgcagctcaggaacaagataaggataaagcggtgacctgttcctctattaaggaaaatgctctctcttcaggaactttgcaggaagagcagagaacaccacctcctggacaagatactcaacaatttcatgaaaaatcaatctcagctgactgtgccaaggacaaagcacttcagctaagtaattcaccgggtgcatcctctgcctttcttaaggcagaaactgaacataacaaggaagtggccccacaagtctcactgctgactcaaggtggggctgcccagagcctggtgccaccaggagcaagtctggccacagagtcaaggcaggaagccttgggggcagagcacaacagctctgctctgttgccatgtctgttgccagatgggtctgatgggtccgatgctcttaactgcagtcaggcttctcctctggatgttggagtgaagaacactcaatcccagggaaaaactagtgcctgtgaggtgagtggaaatgtgacggtggatgttacaggggttaatgctctacaaggtatggctgagcccagaagagagaatatatcacacaacacccaagacatcctgattccaaacgtcttgttgagccaagagaagaatgccgttctaggtttgccagtggctctacaggacaaagctgtgactgacccacagggagttggaaccccagagatgatacctcttgattgggagaaagggaagctggagggagcagaccacagctgtaccatgggtgacgctgaggaagcccaaatagacgatgaagcacatcctgtcctactgcagcctgttgccaaggagctccccacagacatggagctctcagcccatgatgatggggccccagctggtgtgagggaagtcacgcgagccccgccttcaggcagagaaaggagcactccctctctaccttgcatggtctctgcccaggacgcacctctgcctaagggagcagacttgatagaggaggctgccagccgtatagtggatgctgtcatcgaacaagtcaaggccgctggagcactgcttactgagggggaggcctgtcacatgtcactgtccagccctgagttgggtcctctcactaaaggactagagagtgcttttacagaaaaagtgagtactttcccacctggggagagcctaccaatgggcagtactcctgaggaagccacggggagccttgcaggatgttttgctggaagggaggagccagagaagatcattttacctgtccaggggcctgagccagcagcagaaatgccagacgtgaaagctgaagatgaagtggattttagagcaagttcaatttctgaagaagtggctgtagggagcatagctgctacactgaagatgaagcaaggcccaatgacccaggcgataaaccgagaaaactggtgtacaatagagccatgccctgatgcagcatctcttctggcttccaagcagagcccagaatgtgagaacttcctggatgttggactgggcagagagtgtacctcaaaacaaggtgtacttaaaagagaatctgggagtgattctgacctctttcactcacccagtgatgacatggacagcatcatcttcccaaagccagaggaagagcatttggcctgtgatatcaccggatccagttcatccaccgatgacacggcttcactggaccgacattcttctcatggcagtgatgtgtctctctcccagattttaaagccaaacaggtcaagagatcggcaaagccttgatggattctacagccatgggatgggagctgagggtcgagaaagtgagagtgagcctgctgacccaggcgacgtggaggaggaggagatggacagtatcactgaagtgcctgcaaactgctctgtcctaaggagctccatgcgctctctttctcccttccggaggcacagctgggggcctgggaaaaatgcagccagcgatgcagaaatgaaccaccggagttcaatgcgagttcttggggatgttgtcaggagacctcccattcataggagaagtttcagtctagaaggcttgacaggaggagctggtgtcggaaacaagccatcctcatctctagaagtaagctctgcaaatgccgaagagctcagacacccattcagtggtgaggaacgggttgactctttggtgtcactttcagaagaggatctggagtcagaccagagagaacataggatgtttgatcagcagatatgtcacagatctaagcagcagggatttaattactgtacatcagccatttcctctccattgacaaaatccatctcattaatgacaatcagccatcctggattggacaattcacggcccttccacagtaccttccacaataccagtgctaatctgactgagagtataacagaagagaactataatttcctgccacatagcccctccaagaaagattctgaatggaagagtggaacaaaagtcagtcgtacattcagctacatcaagaataaaatgtctagcagcaagaagagcaaagaaaaggaaaaagaaaaagataagattaaggagaaggagaaagattctaaagacaaggagaaagataagaagactgtcaacgggcacactttcagttccattcctgttgtgggtcccatcagctgtagccagtgtatgaagcccttcaccaacaaagatgcctatacttgtgcaaattgcagtgcttttgtccacaaaggctgccgagaaagtctagcctcctgtgcaaaggtcaaaatgaagcagcccaaagggagccttcaggcacatgacacatcatcactgcccacggtcattatgagaaacaagccctcacagcccaaggagcgtcctcggtccgcagtcctcctggtggatgaaaccgctaccaccccaatatttgccaatagacgatcccagcagagtgtctcgctctccaaaagtgtctccatacagaacattactggagttggcaatgatgagaacatgtcaaacacctggaaattcctgtctcattcaacagactcactaaataaaatcagcaaggtcaatgagtcaacagaatcacttactgatgagggagggtacagacatgaatgaaggacaactactgggagactttgagattgagtccaaacagctggaagcagagtcttggagtcggataatagacagcaagtttctaaaacagcaaaagaaagatgtggtcaaacggcaagaagtaatatatgagttgatgcagacagagtttcatcatgtccgcactctcaagatcatgagtggtgtgtacagccaggggatgatggcggatctgctttttgagcagcagatggtagaaaagctgttcccctgtttggatgagctgatcagtatccatagccaattcttccagaggattctggagcggaagaaggagtctctggtggataaaagtgaaaagaactttctcatcaagaggataggggatgtgcttgtaaatcagttttcaggtgagaatgcagaacgtttaaagaagacatatggcaagttttgtgggcaacataaccagtctgtaaactacttcaaagacctttatgccaaggataagcgttttcaagcctttgtaaagaagaagatgagcagttcagttgttagaaggcttggaattccagagtgcatattgcttgtaactcagcggattaccaagtacccagttttattccaaagaatattgcagtgtaccaaagacaatgaagtggagcaggaagatctagcacagtccttgagcctggtgaaggatgtgattggagctgtagacagcaaagtggcaagttatgaaaagaaagtgcgtctcaatgagatttatacaaagacagatagcaagtcaatcatgaggatgaagagtggtcagatgtttgccaaggaagatttgaaacggaagaagcttgtacgtgatgggagtgtgtttctgaagaatgcagcaggaaggttgaaagaggttcaagcagttcttctcactgacattttagttttccttcaagaaaaagaccagaagtacatctttgcatcattggaccagaagtcaacagtgatctctttaaagaagctgattgtgagagaagtggcacatgaggagaaaggtttattcctgatcagcatggggatgacagatccagagatggtagaagtccatgccagctccaaagaggaacgaaacagctggattcagatcattcaggacacaatcaacaccctgaacagagatgaagatgaaggaattcctagtgagaatgaggaagaaaagaaaatgttggacaccagagcccgagaattaaaagaacaacttcaccagaaggaccaaaaaatcctactcttgttggaagagaaggagatgattttccgggacatggctgagtgcagcacccctctcccagaggattgctccccaacacatagccctagagttctcttccgctccaacacagaagaggctctcaaaggaggacctttaatgaaaagtgcaataaatgaggtggagatccttcagggtttggtgagtggaaatctgggaggcacacttgggccgactgtcagcagccccattgagcaagatgtggtcggtcccgtttccctgccccggagagcagagacctttggaggatttgacagccatcagatgaatgcttcaaaaggaggcgagaaggaagagggagatgatggccaagatcttaggagaacggaatcagatagtggcctaaaaaagggtggaaatgctaacctggtatttatgcttaaaagaaacagtgagcaggttgtccagagcgttgttcatctctacgagctcctcagcgctctgcagggtgtggtgctgcagcaggacagctacattgaggaccagaaactggtgctgagcgagagggcgctcactcgcagcttgtcccgcccgagctccctcattgagcaggagaagcagcgcagcctggagaagcagcgccaggacctggccaacctgcagaagcagcaggcccagtacctcgaggagaagcgcaggcgcgagcgtgagtgggaagctcgtgagagggagctgcgggagcgggaggccctcctggcccagcgcgaggaggaggtgcagcaggggcagcaggacctggaaaaggagcgggaggagctccagcagaagaagggcacataccagtatgacctggagcgactgcgtgctgcccagaaacagcttgagagggaacaggagcagctgcgccgggaggcagagcggctcagccagcggcagacagaacgggacctgtgtcaggtttcccatccacataccaagctgatgaggatcccatcgttcttccccagtcctgaggagcccccctcgccatctgcaccttccatagccaaatcagggtcattggactcagaactttcagtgtccccaaaaaggaacagcatctctcggacacacaaagataaggggccttttcacatactgagttcaaccagccagacaaacaaaggaccagaagggcagagccaggcccctgcgtccacctctgcctctacccgcctgtttgggttaacaaagccaaaggaaaagaaggagaaaaaaaagaagaacaaaaccagccgctctcagcccggtgatggtcccgcgtcagaagtatcagcagagggtgaagagatcttctgctgaccctcttcctctctgctgaggcagctgcctcctgatcctggccagcccacctctcctgctgtccccgcgtgcacaagtctcttacactggacgcccactgctcctcagcgtccagtcctcctgggcggccccaggtcctggacaataagcaacagatgatattgagtgtcgggtggggaaggaggcccagactctgcttcggccatgatttgtgactgcccaggactctcaggttgggctggccctactcaggattacactgaaagtaatggcctcgtaagtacaggtgatggttttggacacgtcaggaattcctaaaggctgaaagagtgtatccaagtaaggtctgaacctccgactgccttttatttgggggaacacaaaaccaaacagcagatgttttggacttgatctgtgtacgtacatggggacctgtctgcatatacacacggggaatgccagaagaaggcccagtctgcaccaggcgtctggtcaacttagcacaagggcagtgcctggacggacccggagcccccgcatatcagcagttcacccagtactcctcagagactggtttccctctaaacccatcccgggcacataccacccctgttttgcatgtatttctcatttcattttagggatgacaaacatttgtgaaaccagtgagagaaggcttgatgtgtataaaagacgtgatgtgcaccacctcgatctcggtgtttcaggcactaaagcaacaaaacaacccatagtatctcattttgtcatcagatccagaagaaatatcctggttttccagcatgtttacccacatgttttgggcatggataaagtgaagaggcctactcaccattatccctgcagcgtgacaccttttgattgtcactgaccactcagaaggggccacggcctcctggctgtgttcctgagcccccgtcgtgcctctcccagacagcagctgtctggcccttgctgggtgagggcacaccactgccaggggtcagcctcgcacccaggccaggcagaagctgtgctctgaagctaggacagctggctgagaagtgggttcaggcgaagggtgaagccatgtgtagcagttcctgccagtgcagatctggagaggagctggcccggaaggcgtggttgtgaaagcgcccttcttatgttaggaggccttggcaaaattggatttcttcaaaaatacatgtaaaggtctgttgttgaattgtactctgcccctggaagcagatacagatggctgcctgctgctcggctttgcttttgcttttcccaccgtgttttcatctttgttcacttgaggctttccccagctggtgtgtgcaggacagttcatggtaatgttgccctctgaggccccgtacaccagaagggaggccctggaaaattttgtgcttccaacgtggccttcaattcttgcttttttgcccctcggaagcatggggcttttgagcacacttaaaaaaagaaaaatctgtaacttggtgcttattgatgaattgcaagctggccttgcagatggagatatttatctttcagtttatttgaaagaggtctggtttaaaatttgtagcctacatttgttttatttattgtatttgtgtgtttgtgtttgtttttttttaagggtgagccaggtctagcccaacagtctaaactatccagtcaataccgagtgaagtggcagccagcactgttcactctgtgtcttttgaagtgccttgaaggcccagatgaaattttaaagggagggggtccatgtccttccctcccccaccccgcctcattctttaatcaaaggatgtcttctcccttgtttgagaatgaagaaactcgccacctctgacctacctttgcctttttctgtcatggagaatactcacccttcagaaacagaccaaaggccaaaacctgctgatttttctattgaaaatatgtccccttgcaaagaccctaaacaaaaagttaagtttctttctttcacctatttgtacaactccaagttacagctgaatctgtcgtgactttcctgagatctacccggggcttggctgtctgttctgggcactggctccgagttcccctcctgggatttgcaggagggcagtactgaacctgcattcttctccttgtaaatgtaggccgggtgcccctgttctccgggtttggaacaatacgaggttggtgctgatgggatttacttgcgtacgtgctcttcacaaaaacaccgtggatgctgaagttagagcacgtcgccacagagcttgacatcaatgttagagggtctcttactccccgcccagctgtgatgtttcatctgctttggttgttttggtggtcttttttaaaaatagagatttcacatctgcccagaccccactcaaaacgatttggtcaggttctggttggacaagtttaaaatcaaagtagtgcccggaattccctcaaaccacccaacttcatccaggaatacagtctgcagtgcagcaacagaaccgcttaccaagaactgtgcttacatacctttgtcatctctcttccccccttggaagttgtcctcagggggatttgttcctgtcctggggatttacctgggatggtggctgcctgtgcttttgctcatggccttgacagtgctctagttgctggatctaatggcctgtcttggtttctatcacatgagaaggggttgtttttttggggtgactcggactgaattccccatactgtt

SEQ ID NO: 361985 - DNA, 9325 bp, Homo sapiens
agcgggaagcgcctgtgctctgccgagactgccgtgcccattgctcgcctcggtcgccgccgctttagcccgcctccgggggagcggccgcctattgtctttctccgcggcgaaggtgaagagttgtcccagctcggcccgcgggggagccccgggagccgcacgtgtcctgggtcatgaaacttaatccacagcaagctcccttatatggtgattgtgttgttacagtgctgcttgctgaagaggacaaagctgaagatgatgtagtgttttacttggtatttttgggttccaccctccgtcactgtacaagtactcggaaggtcagttctgatacattggagaccattgctcctggtcatgattgttgtgaaacagtgaaggtgcagctctgtgcttccaaagagggccttcccgtgtttgtggtggctgaagaagactttcatttcgtccaggatgaagcgtatgatgcagctcaattcctagcaaccagtgctggaaatcagcaggctttgaactttacccgttttcttgaccagtcaggacccccatctggggatgtgaattcccttgataagaagttggtgctggcattcaggcacctgaagctgcccacggagtggaatgtattggggacagatcagagtttgcatgatgctggcccgcgagagacattgatgcattttgctgtgcggctgggactgctgaggttgacgtggttcctgttgcagaagccaggtggccgcggagctctcagtatccacaaccaggaaggggcgacgcctgtgagcttggccttggagcgaggctatcacaagctgcaccagcttctaaccgaggagaatgctggagaaccagactcctggagcagtttatcctatgaaataccgtatggagactgttctgtgaggcatcatcgagagttggacatctatacattaacctctgagtctgattcacatcatgaacacccatttcctggagacggttgcactggaccaatttttaaacttatgaacatccaacagcaactaatgaaaacaaacctcaagcagatggacagtcttatgcccttaatgatgacagcacaggatccttccagtgccccagagacagatggccagtttcttccctgtgcaccggagcccacggaccctcagcgactttcttcttctgaagagactgagagcactcagtgctgcccagggagccctgttgcacagactgaaagtccctgtgatttgtcaagcatagttgaggaggagaatacagaccgttcctgtaggaagaaaaataaaggcgtggaaagaaaaggggaagaggtggagccagcacctattgtggactctggaactgtatctgatcaagacagctgccttcagagcttgcctgattgtggagtaaagggcacggaaggcctttcgtcctgtggaaacagaaatgaagaaactggaacaaaatcttctggaatgcccacagaccaggagtccctgagcagtggagatgctgtgcttcagagagacttggtcatggagccaggcacagcccagtattcctctggaggtgaactgggaggcatttcaacaacaaatgtcagtaccccagacactgcaggggaaatggaacatgggctcatgaacccagatgccactgtttggaagaatgtgcttcagggaggggaaagtacaaaggaaagatttgagaactctaatattggcacagctggagcctctgacgtgcacgtcacaagtaagcctgtggataaaatcagtgttccaaactgtgcccctgccgccagttccctggatggtaacaaacctgctgagtcttcacttgcatttagtaatgaagaaacctccactgaaaaaacagcagaaacggaaacttcacgaagtcgtgaggagagtgctgatgctccagtagatcagaattctgtggtgattccagctgctgcaaaagacaagatttcagatggattagaaccttatactctcttagcagcaggcataggtgaggcaatgtcaccctcagatttagcccttcttgggctggaagaagatgtaatgccacaccagaactcagaaacaaattcatctcatgctcaaagccaaaagggcaaatcctcacccatttgttctacaactggagacgataaactttgtgcagactctgcatgtcaacagaacacagtgacttctagtggcgatttggttgcaaaactgtgtgataacatagttagcgagtccgaaagcaccacagcaaggcaacccagctcacaagatccacccgatgcctcccactgtgaagacccacaggctcatacagtcacctctgaccctgtaagggatacccaggaacgtgcggatttttgtcctttcaaagtggtggataacaaaggccaacgaaaagatgtgaaactagataaacctttaacaaatatgcttgaggtggtttcacatccacatccagttgtccctaaaatggagaaagaactggtgccagaccaggcagtaatatcagacagtactttctctctggcaaacagtccaggcagtgaatcagtaaccaaggatgacgcactttcttttgtcccctcccagaaagaaaagggaacagcaactcctgaactacatacagctacagattatagagatggcccagatggaaattcgaatgagcctgatacgcggccactagaagacagggcagcaggcctgtccacatcctccactgctgcagagcttcagcacgggatggggaataccagtctcacaggacttggtggagagcatgagggtcctgcccctccagcaatcccagaagctctgaatatcaaggggaacactgactcttccctgcaaagtatgggtaaggccactttggctttagattcagttttgactgaagaaggaaaacttctggtggtttcagaaagctctgcagctcaggaacaagataaggataaagcggtgacctgttcctctattaaggaaaatgctctctcttcaggaactttgcaggaagagcagagaacaccacctcctggacaagatactcaacaatttcatgaaaaatcaatctcagctgactgtgccaaggacaaagcacttcagctaagtaattcaccgggtgcatcctctgcctttcttaaggcagaaactgaacataacaaggaagtggccccacaagtctcactgctgactcaaggtggggctgcccagagcctggtgccaccaggagcaagtctggccacagagtcaaggcaggaagccttgggggcagagcacaacagctctgctctgttgccatgtctgttgccagatgggtctgatgggtccgatgctcttaactgcagtcaggcttctcctctggatgttggagtgaagaacactcaatcccagggaaaaactagtgcctgtgaggtgagtggaaatgtgacggtggatgttacaggggttaatgctctacaaggtatggctgagcccagaagagagaatatatcacacaacacccaagacatcctgattccaaacgtcttgttgagccaagagaagaatgccgttctaggtttgccagtggctctacaggacaaagctgtgactgacccacagggagttggaaccccagagatgatacctcttgattgggagaaagggaagctggagggagcagaccacagctgtaccatgggtgacgctgaggaagcccaaatagacgatgaagcacatcctgtcctactgcagcctgttgccaaggagctccccacagacatggagctctcagcccatgatgatggggccccagctggtgtgagggaagtcacgcgagccccgccttcaggcagagaaaggagcactccctctctaccttgcatggtctctgcccaggacgcacctctgcctaagggagcagacttgatagaggaggctgccagccgtatagtggatgctgtcatcgaacaagtcaaggccgctggagcactgcttactgagggggaggcctgtcacatgtcactgtccagccctgagttgggtcctctcactaaaggactagagagtgcttttacagaaaaagtgagtactttcccacctggggagagcctaccaatgggcagtactcctgaggaagccacggggagccttgcaggatgttttgctggaagggaggagccagagaagatcattttacctgtccaggggcctgagccagcagcagaaatgccagacgtgaaagctgaagatgaagtggattttagagcaagttcaatttctgaagaagtggctgtagggagcatagctgctacactgaagatgaagcaaggcccaatgacccaggcgataaaccgagaaaactggtgtacaatagagccatgccctgatgcagcatctcttctggcttccaagcagagcccagaatgtgagaacttcctggatgttggactgggcagagagtgtacctcaaaacaaggtgtacttaaaagagaatctgggagtgattctgacctctttcactcacccagtgatgacatggacagcatcatcttcccaaagccagaggaagagcatttggcctgtgatatcaccggatccagttcatccaccgatgacacggcttcactggaccgacattcttctcatggcagtgatgtgtctctctcccagattttaaagccaaacaggtcaagagatcggcaaagccttgatggattctacagccatgggatgggagctgagggtcgagaaagtgagagtgagcctgctgacccaggcgacgtggaggaggaggagatggacagtatcactgaagtgcctgcaaactgctctgtcctaaggagctccatgcgctctctttctcccttccggaggcacagctgggggcctgggaaaaatgcagccagcgatgcagaaatgaaccaccggagttcaatgcgagttcttggggatgttgtcaggagacctcccattcataggagaagtttcagtctagaaggcttgacaggaggagctggtgtcggaaacaagccatcctcatctctagaagtaagctctgcaaatgccgaagagctcagacacccattcagtggtgaggaacgggttgactctttggtgtcactttcagaagaggatctggagtcagaccagagagaacataggatgtttgatcagcagatatgtcacagatctaagcagcagggatttaattactgtacatcagccatttcctctccattgacaaaatccatctcattaatgacaatcagccatcctggattggacaattcacggcccttccacagtaccttccacaataccagtgctaatctgactgagagtataacagaagagaactataatttcctgccacatagcccctccaagaaagattctgaatggaagagtggaacaaaagtcagtcgtacattcagctacatcaagaataaaatgtctagcagcaagaagagcaaagaaaaggaaaaagaaaaagataagattaaggagaaggagaaagattctaaagacaaggagaaagataagaagactgtcaacgggcacactttcagttccattcctgttgtgggtcccatcagctgtagccagtgtatgaagcccttcaccaacaaagatgcctatacttgtgcaaattgcagtgcttttgtccacaaaggctgccgagaaagtctagcctcctgtgcaaaggtcaaaatgaagcagcccaaagggagccttcaggcacatgacacatcatcactgcccacggtcattatgagaaacaagccctcacagcccaaggagcgtcctcggtccgcagtcctcctggtggatgaaaccgctaccaccccaatatttgccaatagacgatcccagcagagtgtctcgctctccaaaagtgtctccatacagaacattactggagttggcaatgatgagaacatgtcaaacacctggaaattcctgtctcattcaacagactcactaaataaaatcagcaaggtcaatgagtcaacagaatcacttactgatgagggagggtacagacatgaatgaaggacaactactgggagactttgagattgagtccaaacagctggaagcagagtcttggagtcggataatagacagcaagtttctaaaacagcaaaagaaagatgtggtcaaacggcaagaagtaatatatgagttgatgcagacagagtttcatcatgtccgcactctcaagatcatgagtggtgtgtacagccaggggatgatggcggatctgctttttgagcagcagatggtagaaaagctgttcccctgtttggatgagctgatcagtatccatagccaattcttccagaggattctggagcggaagaaggagtctctggtggataaaagtgaaaagaactttctcatcaagaggataggggatgtgcttgtaaatcagttttcaggtgagaatgcagaacgtttaaagaagacatatggcaagttttgtgggcaacataaccagtctgtaaactacttcaaagacctttatgccaaggataagcgttttcaagcctttgtaaagaagaagatgagcagttcagttgttagaaggcttggaattccagagtgcatattgcttgtaactcagcggattaccaagtacccagttttattccaaagaatattgcagtgtaccaaagacaatgaagtggagcaggaagatctagcacagtccttgagcctggtgaaggatgtgattggagctgtagacagcaaagtggcaagttatgaaaagaaagtgcgtctcaatgagatttatacaaagacagatagcaagtcaatcatgaggatgaagagtggtcagatgtttgccaaggaagatttgaaacggaagaagcttgtacgtgatgggagtgtgtttctgaagaatgcagcaggaaggttgaaagaggttcaagcagttcttctcactgacattttagttttccttcaagaaaaagaccagaagtacatctttgcatcattggaccagaagtcaacagtgatctctttaaagaagctgattgtgagagaagtggcacatgaggagaaaggtttattcctgatcagcatggggatgacagatccagagatggtagaagtccatgccagctccaaagaggaacgaaacagctggattcagatcattcaggacacaatcaacaccctgaacagagatgaagatgaaggaattcctagtgagaatgaggaagaaaagaaaatgttggacaccagagcccgagaattaaaagaacaacttcaccagaaggaccaaaaaatcctactcttgttggaagagaaggagatgattttccgggacatggctgagtgcagcacccctctcccagaggattgctccccaacacatagccctagagttctcttccgctccaacacagaagaggctctcaaaggaggacctttaatgaaaagtgcaataaatgaggtggagatccttcagggtttggtgagtggaaatctgggaggcacacttgggccgactgtcagcagccccattgagcaagatgtggtcggtcccgtttccctgccccggagagcagagacctttggaggatttgacagccatcagatgaatgcttcaaaaggaggcgagaaggaagagggagatgatggccaagatcttaggagaacggaatcagatagtggcctaaaaaagggtggaaatgctaacctggtatttatgcttaaaagaaacagtgagcaggttgtccagagcgttgttcatctctacgagctcctcagcgctctgcagggtgtggtgctgcagcaggacagctacattgaggaccagaaactggtgctgagcgagagggcgctcactcgcagcttgtcccgcccgagctccctcattgagcaggagaagcagcgcagcctggagaagcagcgccaggacctggccaacctgcagaagcagcaggcccagtacctcgaggagaagcgcaggcgcgagcgtgagtgggaagctcgtgagagggagctgcgggagcgggaggccctcctggcccagcgcgaggaggaggtgcagcaggggcagcaggacctggaaaaggagcgggaggagctccagcagaagaagggcacataccagtatgacctggagcgactgcgtgctgcccagaaacagcttgagagggaacaggagcagctgcgccgggaggcagagcggctcagccagcggcagacagaacgggacctgtgtcaggtttcccatccacataccaagctgatgaggatcccatcgttcttccccagtcctgaggagcccccctcgccatctgcaccttccatagccaaatcagggtcattggactcagaactttcagtgtccccaaaaaggaacagcatctctcggacacacaaagataaggggccttttcacatactgagttcaaccagccagacaaacaaaggaccagaagggcagagccaggcccctgcgtccacctctgcctctacccgcctgtttgggttaacaaagccaaaggaaaagaaggagaaaaaaaagaagaacaaaaccagccgctctcagcccggtgatggtcccgcgtcagaagtatcagcagagggtgaagagatcttctgctgaccctcttcctctctgctgaggcagctgcctcctgatcctggccagcccacctctcctgctgtccccgcgtgcacaagtctcttacactggacgcccactgctcctcagcgtccagtcctcctgggcggccccaggtcctggacaataagcaacagatgatattgagtgtcgggtggggaaggaggcccagactctgcttcggccatgatttgtgactgcccaggactctcaggttgggctggccctactcaggattacactgaaagtaatggcctcgtaagtacaggtgatggttttggacacgtcaggaattcctaaaggctgaaagagtgtatccaagtaaggtctgaacctccgactgccttttatttgggggaacacaaaaccaaacagcagatgttttggacttgatctgtgtacgtacatggggacctgtctgcatatacacacggggaatgccagaagaaggcccagtctgcaccaggcgtctggtcaacttagcacaagggcagtgcctggacggacccggagcccccgcatatcagcagttcacccagtactcctcagagactggtttccctctaaacccatcccgggcacataccacccctgttttgcatgtatttctcatttcattttagcctcctcaacagtatgcacaccaagtcagggacgatttcatccgcaagtgacacctgattgctcctca

SEQ ID NO: 361986 - DNA, 8710 bp, Homo sapiens
taaattcgcggccgcgtcgactttttttttttttttctttgctcttcttgctgctagacattttattcttgatgtagctgaatgtacgactgacttttgttccactcttccattcagaatctttcttggaggggctatgtggcaggaaattatagttctcttctgttatactctcagtcagattagcactggtattgtggaaggtactgtggaagggccgtgaattgtccaatccaggatggctgattgtcattaatgagatggattttgtcaatggagaggaaatggctgatgtacagtaattaaatccctgctgcttagatctgtgacatatctgctgatcaaacatcctatgttctctctggtctgactccagatcctcttctgaaagtgacaccaaagagtcaacccgttcctcaccactgaatgggtgtctgagctcttcggcatttgcagagcttacttctagagatgaggatggcttgtttccgacaccagctcctcctgtcaagccttctagactgaaacttctgtaattaaagtcagcactcaggccagacttgctcctggtgccaccaggagcaagtctggccacagagtcaaggcaggaagccttgggggcagagcacaacagctctgctctgttgccatgtctgttgccagatgggtctgatgggtccgatgctcttaactgcagtcaggcttctcctctggatgttggagtgaagaacactcaatcccagggaaaaactagtgcctgtgaggtgagtggaaatgtgacggtggatgttacaggggttaatgctctacaaggtatggctgagcccagaagagagaatatatcacacaacacccaagacatcctgattccaaacgtcttgttgagccaagagaagaatgccgttctaggtttgccagtggctctacaggacaaagctgtgactgacccacagggagttggaaccccagagatgatacctcttgattgggagaaagggaagctggagggagcagaccacagctgtaccatgggtgacgctgaggaagcccaaatagacgatgaagcacatcctgtcctactgcagcctgttgccaaggagctccccacagacatggagctctcagcccatgatgatggggccccagctggtgtgagggaagtcacgcgagccccgccttcaggcagagaaaggagcactccctctctaccttgcatggtctctgcccaggacgcacctctgcctaagggagcagacttgatagaggaggctgccagccgtatagtggatgctgtcatcgaacaagtcaaggccgctggagcactgcttactgagggggaggcctgtcacatgtcactgtccagccctgagttgggtcctctcactaaaggactagagagtgcttttacagaaaaagtgagtactttcccacctggggagagcctaccaatgggcagtactcctgaggaagccacggggagccttgcaggatgttttgctggaagggaggagccagagaagatcattttacctgtccaggggcctgagccagcagcagaaatgccagacgtgaaagctgaagatgaagtggattttagagcaagttcaatttctgaagaagtggctgtagggagcatagctgctacactgaagatgaagcaaggcccaatgacccaggcgataaaccgagaaaactggtgtacaatagagccatgccctgatgcagcatctcttctggcttccaagcagagcccagaatgtgagaacttcctggatgttggactgggcagagagtgtacctcaaaacaaggtgtacttaaaagagaatctgggagtgattctgacctctttcactcacccagtgatgacatggacagcatcatcttcccaaagccagaggaagagcatttggcctgtgatatcaccggatccagttcatccaccgatgacacggcttcactggaccgacattcttctcatggcagtgatgtgtctctctcccagattttaaagccaaacaggtcaagagatcggcaaagccttgatggattctacagccatgggatgggagctgagggtcgagaaagtgagagtgagcctgctgacccaggcgacgtggaggaggaggagatggacagtatcactgaagtgcctgcaaactgctctgtcctaaggagctccatgcgctctctttctcccttccggaggcacagctgggggcctgggaaaaatgcagccagcgatgcagaaatgaaccaccggagttcaatgcgagttcttggggatgttgtcaggagacctcccattcataggagaagtttcagtctagaaggcttgacaggaggagctggtgtcggaaacaagccatcctcatctctagaagtaagctctgcaaatgccgaagagctcagacacccattcagtggtgaggaacgggttgactctttggtgtcactttcagaagaggatctggagtcagaccagagagaacataggatgtttgatcagcagatatgtcacagatctaagcagcagggatttaattactgtacatcagccatttcctctccattgacaaaatccatctcattaatgacaatcagccatcctggattggacaattcacggcccttccacagtaccttccacaataccagtgctaatctgactgagagtataacagaagagaactataatttcctgccacatagcccctccaagaaagattctgaatggaagagtggaacaaaagtcagtcgtacattcagctacatcaagaataaaatgtctagcagcaagaagagcaaagaaaaggaaaaagaaaaagataagattaaggagaaggagaaagattctaaagacaaggagaaagataagaagactgtcaacgggcacactttcagttccattcctgttgtgggtcccatcagctgtagccagtgtatgaagcccttcaccaacaaagatgcctatacttgtgcaaattgcagtgcttttgtccacaaaggctgccgagaaagtctagcctcctgtgcaaaggtcaaaatgaagcagcccaaagggagccttcaggcacatgacacatcatcactgcccacggtcattatgagaaacaagccctcacagcccaaggagcgtcctcggtccgcagtcctcctggtggatgaaaccgctaccaccccaatatttgccaatagacgatcccagcagagtgtctcgctctccaaaagtgtctccatacagaacattactggagttggcaatgatgagaacatgtcaaacacctggaaattcctgtctcattcaacagactcactaaataaaatcagcaaggtcaatgagtcaacagaatcacttactgatgagggagggtacagacatgaatgaaggacaactactgggagactttgagattgagtccaaacagctggaagcagagtcttggagtcggataatagacagcaagtttctaaaacagcaaaagaaagatgtggtcaaacggcaagaagtaatatatgagttgatgcagacagagtttcatcatgtccgcactctcaagatcatgagtggtgtgtacagccaggggatgatggcggatctgctttttgagcagcagatggtagaaaagctgttcccctgtttggatgagctgatcagtatccatagccaattcttccagaggattctggagcggaagaaggagtctctggtggataaaagtgaaaagaactttctcatcaagaggataggggatgtgcttgtaaatcagttttcaggtgagaatgcagaacgtttaaagaagacatatggcaagttttgtgggcaacataaccagtctgtaaactacttcaaagacctttatgccaaggataagcgttttcaagcctttgtaaagaagaagatgagcagttcagttgttagaaggcttggaattccagagtgcatattgcttgtaactcagcggattaccaagtacccagttttattccaaagaatattgcagtgtaccaaagacaatgaagtggagcaggaagatctagcacagtccttgagcctggtgaaggatgtgattggagctgtagacagcaaagtggcaagttatgaaaagaaagtgcgtctcaatgagatttatacaaagacagatagcaagtcaatcatgaggatgaagagtggtcagatgtttgccaaggaagatttgaaacggaagaagcttgtacgtgatgggagtgtgtttctgaagaatgcagcaggaaggttgaaagaggttcaagcagttcttctcactgacattttagttttccttcaagaaaaagaccagaagtacatctttgcatcattggaccagaagtcaacagtgatctctttaaagaagctgattgtgagagaagtggcacatgaggagaaaggtttattcctgatcagcatggggatgacagatccagagatggtagaagtccatgccagctccaaagaggaacgaaacagctggattcagatcattcaggacacaatcaacaccctgaacagagatgaagatgaaggaattcctagtgagaatgaggaagaaaagaaaatgttggacaccagagcccgagaattaaaagaacaacttcaccagaaggaccaaaaaatcctactcttgttggaagagaaggagatgattttccgggacatggctgagtgcagcacccctctcccagaggattgctccccaacacatagccctagagttctcttccgctccaacacagaagaggctctcaaaggaggacctttaatgaaaagtgcaataaatgaggtggagatccttcagggtttggtgagtggaaatctgggaggcacacttgggccgactgtcagcagccccattgagcaagatgtggtcggtcccgtttccctgccccggagagcagagacctttggaggatttgacagccatcagatgaatgcttcaaaaggaggcgagaaggaagagggagatgatggccaagatcttaggagaacggaatcagatagtggcctaaaaaagggtggaaatgctaacctggtatttatgcttaaaagaaacagtgagcaggttgtccagagcgttgttcatctctacgagctcctcagcgctctgcagggtgtggtgctgcagcaggacagctacattgaggaccagaaactggtgctgagcgagagggcgctcactcgcagcttgtcccgcccgagctccctcattgagcaggagaagcagcgcagcctggagaagcagcgccaggacctggccaacctgcagaagcagcaggcccagtacctcgaggagaagcgcaggcgcgagcgtgagtgggaagctcgtgagagggagctgcgggagcgggaggccctcctggcccagcgcgaggaggaggtgcagcaggggcagcaggacctggaaaaggagcgggaggagctccagcagaagaagggcacataccagtatgacctggagcgactgcgtgctgcccagaaacagcttgagagggaacaggagcagctgcgccgggaggcagagcggctcagccagcggcagacagaacgggacctgtgtcaggtttcccatccacataccaagctgatgaggatcccatcgttcttccccagtcctgaggagcccccctcgccatctgcaccttccatagccaaatcagggtcattggactcagaactttcagtgtccccaaaaaggaacagcatctctcggacacacaaagataaggggccttttcacatactgagttcaaccagccagacaaacaaaggaccagaagggcagagccaggcccctgcgtccacctctgcctctacccgcctgtttgggttaacaaagccaaaggaaaagaaggagaaaaaaaagaagaacaaaaccagccgctctcagcccggtgatggtcccgcgtcagaagtatcagcagagggtgaagagatcttctgctgaccctcttcctctctgctgaggcagctgcctcctgatcctggccagcccacctctcctgctgtccccgcgtgcacaagtctcttacactggacgcccactgctcctcagcgtccagtcctcctgggcggccccaggtcctggacaataagcaacagatgatattgagtgtcgggtggggaaggaggcccagactctgcttcggccatgatttgtgactgcccaggactctcaggttgggctggccctactcaggattacactgaaagtaatggcctcgtaagtacaggtgatggttttggacacgtcaggaattcctaaaggctgaaagagtgtatccaagtaaggtctgaacctccgactgccttttatttgggggaacacaaaaccaaacagcagatgttttggacttgatctgtgtacgtacatggggacctgtctgcatatacacacggggaatgccagaagaaggcccagtctgcaccaggcgtctggtcaacttagcacaagggcagtgcctggacggacccggagcccccgcatatcagcagttcacccagtactcctcagagactggtttccctctaaacccatcccgggcacataccacccctgttttgcatgtatttctcatttcattttagggatgacaaacatttgtgaaaccagtgagagaaggcttgatgtgtataaaagacgtgatgtgcaccacctcgatctcggtgtttcaggcactaaagcaacaaaacaacccatagtatctcattttgtcatcagatccagaagaaatatcctggttttccagcatgtttacccacatgttttgggcatggataaagtgaagaggcctactcaccattatccctgcagcgtgacaccttttgattgtcactgaccactcagaaggggccacggcctcctggctgtgttcctgagcccccgtcgtgcctctcccagacagcagctgtctggcccttgctgggtgagggcacaccactgccaggggtcagcctcgcacccaggccaggcagaagctgtgctctgaagctaggacagctggctgagaagtgggttcaggcgaagggtgaagccatgtgtagcagttcctgccagtgcagatctggagaggagctggcccggaaggcgtggttgtgaaagcgcccttcttatgttaggaggccttggcaaaattggatttcttcaaaaatacatgtaaaggtctgttgttgaattgtactctgcccctggaagcagatacagatggctgcctgctgctcggctttgcttttgcttttcccaccgtgttttcatctttgttcacttgaggctttccccagctggtgtgtgcaggacagttcatggtaatgttgccctctgaggccccgtacaccagaagggaggccctggaaaattttgtgcttccaacgtggccttcaattcttgcttttttgcccctcggaagcatggggcttttgagcacacttaaaaaaagaaaaatctgtaacttggtgcttattgatgaattgcaagctggccttgcagatggagatatttatctttcagtttatttgaaagaggtctggtttaaaatttgtagcctacatttgttttatttattgtatttgtgtgtttgtgtttgtttttttttaagggtgagccaggtctagcccaacagtctaaactatccagtcaataccgagtgaagtggcagccagcactgttcactctgtgtcttttgaagtgccttgaaggcccagatgaaattttaaagggagggggtccatgtccttccctcccccaccccgcctcattctttaatcaaaggatgtcttctcccttgtttgagaatgaagaaactcgccacctctgacctacctttgcctttttctgtcatggagaatactcacccttcagaaacagaccaaaggccaaaacctgctgatttttctattgaaaatatgtccccttgcaaagaccctaaacaaaaagttaagtttctttctttcacctatttgtacaactccaagttacagctgaatctgtcgtgactttcctgagatctacccggggcttggctgtctgttctgggcactggctccgagttcccctcctgggatttgcaggagggcagtactgaacctgcattcttctccttgtaaatgtaggccgggtgcccctgttctccgggtttggaacaatacgaggttggtgctgatgggatttacttgcgtacgtgctcttcacaaaaacaccgtggatgctgaagttagagcacgtcgccacagagcttgacatcaatgttagagggtctcttactccccgcccagctgtgatgtttcatctgctttggttgttttggtggtcttttttaaaaatagagatttcacatctgcccagaccccactcaaaacgatttggtcaggttctggttggacaagtttaaaatcaaagtagtgcccggaattccctcaaaccacccaacttcatccaggaatacagtctgcagtgcagcaacagaaccgcttaccaagaactgtgcttacatacctttgtcatctctcttccccccttggaagttgtcctcagggggatttgttcctgtcctggggatttacctgggatggtggctgcctgtgcttttgctcatggccttgacagtgctctagttgctggatctaatggcctgtcttggtttctatcacatgagaaggggttgtttttttggggtgactcggactgaattccccatactgtt

SEQ ID NO: 361987 - DNA, 11449 bp, Homo sapiens
agcgggaagcgcctgtgctctgccgagactgccgtgcccattgctcgcctcggtcgccgccgctttagcccgcctccgggggagcggccgcctattgtctttctccgcggcgaaggtgaagagttgtcccagctcggcccgcgggggagccccgggagccgcacgtgtcctgggtcatgaaacttaatccacagcaagctcccttatatggtgattgtgttgttacagtgctgcttgctgaagaggacaaagctgaagatgatgtagtgttttacttggtatttttgggttccaccctccgtcactgtacaagtactcggaaggtcagttctgatacattggagaccattgctcctggtcatgattgttgtgaaacagtgaaggtgcagctctgtgcttccaaagagggccttcccgtgtttgtggtggctgaagaagactttcatttcgtccaggatgaagcgtatgatgcagctcaattcctagcaaccagtgctggaaatcagcaggctttgaactttacccgttttcttgaccagtcaggacccccatctggggatgtgaattcccttgataagaagttggtgctggcattcaggcacctgaagctgcccacggagtggaatgtattggggacagatcagagtttgcatgatgctggcccgcgagagacattgatgcattttgctgtgcggctgggactgctgaggttgacgtggttcctgttgcagaagccaggtggccgcggagctctcagtatccacaaccaggaaggggcgacgcctgtgagcttggccttggagcgaggctatcacaagctgcaccagcttctaaccgaggagaatgctggagaaccagactcctggagcagtttatcctatgaaataccgtatggagactgttctgtgaggcatcatcgagagttggacatctatacattaacctctgagtctgattcacatcatgaacacccatttcctggagacggttgcactggaccaatttttaaacttatgaacatccaacagcaactaatgaaaacaaacctcaagcagatggacagtcttatgcccttaatgatgacagcacaggatccttccagtgccccagagacagatggccagtttcttccctgtgcaccggagcccacggaccctcagcgactttcttcttctgaagagactgagagcactcagtgctgcccagggagccctgttgcacagactgaaagtccctgtgatttgtcaagcatagttgaggaggagaatacagaccgttcctgtaggaagaaaaataaaggcgtggaaagaaaaggggaagaggtggagccagcacctattgtggactctggaactgtatctgatcaagacagctgccttcagagcttgcctgattgtggagtaaagggcacggaaggcctttcgtcctgtggaaacagaaatgaagaaactggaacaaaatcttctggaatgcccacagaccaggagtccctgagcagtggagatgctgtgcttcagagagacttggtcatggagccaggcacagcccagtattcctctggaggtgaactgggaggcatttcaacaacaaatgtcagtaccccagacactgcaggggaaatggaacatgggctcatgaacccagatgccactgtttggaagaatgtgcttcagggaggggaaagtacaaaggaaagatttgagaactctaatattggcacagctggagcctctgacgtgcacgtcacaagtaagcctgtggataaaatcagtgttccaaactgtgcccctgccgccagttccctggatggtaacaaacctgctgagtcttcacttgcatttagtaatgaagaaacctccactgaaaaaacagcagaaacggaaacttcacgaagtcgtgaggagagtgctgatgctccagtagatcagaattctgtggtgattccagctgctgcaaaagacaagatttcagatggattagaaccttatactctcttagcagcaggcataggtgaggcaatgtcaccctcagatttagcccttcttgggctggaagaagatgtaatgccacaccagaactcagaaacaaattcatctcatgctcaaagccaaaagggcaaatcctcacccatttgttctacaactggagacgataaactttgtgcagactctgcatgtcaacagaacacagtgacttctagtggcgatttggttgcaaaactgtgtgataacatagttagcgagtccgaaagcaccacagcaaggcaacccagctcacaagatccacccgatgcctcccactgtgaagacccacaggctcatacagtcacctctgaccctgtaagggatacccaggaacgtgcggatttttgtcctttcaaagtggtggataacaaaggccaacgaaaagatgtgaaactagataaacctttaacaaatatgcttgaggtggtttcacatccacatccagttgtccctaaaatggagaaagaactggtgccagaccaggcagtaatatcagacagtactttctctctggcaaacagtccaggcagtgaatcagtaaccaaggatgacgcactttcttttgtcccctcccagaaagaaaagggaacagcaactcctgaactacatacagctacagattatagagatggcccagatggaaattcgaatgagcctgatacgcggccactagaagacagggcagcaggcctgtccacatcctccactgctgcagagcttcagcacgggatggggaataccagtctcacaggacttggtggagagcatgagggtcctgcccctccagcaatcccagaagctctgaatatcaaggggaacactgactcttccctgcaaagtatgggtaaggccactttggctttagattcagttttgactgaagaaggaaaacttctggtggtttcagaaagctctgcagctcaggaacaagataaggataaagcggtgacctgttcctctattaaggaaaatgctctctcttcaggaactttgcaggaagagcagagaacaccacctcctggacaagatactcaacaatttcatgaaaaatcaatctcagctgactgtgccaaggacaaagcacttcagctaagtaattcaccgggtgcatcctctgcctttcttaaggcagaaactgaacataacaaggaagtggccccacaagtctcactgctgactcaaggtggggctgcccagagcctggtgccaccaggagcaagtctggccacagagtcaaggcaggaagccttgggggcagagcacaacagctctgctctgttgccatgtctgttgccagatgggtctgatgggtccgatgctcttaactgcagtcaggcttctcctctggatgttggagtgaagaacactcaatcccagggaaaaactagtgcctgtgaggtgagtggaaatgtgacggtggatgttacaggggttaatgctctacaaggtatggctgagcccagaagagagaatatatcacacaacacccaagacatcctgattccaaacgtcttgttgagccaagagaagaatgccgttctaggtttgccagtggctctacaggacaaagctgtgactgacccacagggagttggaaccccagagatgatacctcttgattgggagaaagggaagctggagggagcagaccacagctgtaccatgggtgacgctgaggaagcccaaatagacgatgaagcacatcctgtcctactgcagcctgttgccaaggagctccccacagacatggagctctcagcccatgatgatggggccccagctggtgtgagggaagtcacgcgagccccgccttcaggcagagaaaggagcactccctctctaccttgcatggtctctgcccaggacgcacctctgcctaagggagcagacttgatagaggaggctgccagccgtatagtggatgctgtcatcgaacaagtcaaggccgctggagcactgcttactgagggggaggcctgtcacatgtcactgtccagccctgagttgggtcctctcactaaaggactagagagtgcttttacagaaaaagtgagtactttcccacctggggagagcctaccaatgggcagtactcctgaggaagccacggggagccttgcaggatgttttgctggaagggaggagccagagaagatcattttacctgtccaggggcctgagccagcagcagaaatgccagacgtgaaagctgaagatgaagtggattttagagcaagttcaatttctgaagaagtggctgtagggagcatagctgctacactgaagatgaagcaaggcccaatgacccaggcgataaaccgagaaaactggtgtacaatagagccatgccctgatgcagcatctcttctggcttccaagcagagcccagaatgtgagaacttcctggatgttggactgggcagagagtgtacctcaaaacaaggtgtacttaaaagagaatctgggagtgattctgacctctttcactcacccagtgatgacatggacagcatcatcttcccaaagccagaggaagagcatttggcctgtgatatcaccggatccagttcatccaccgatgacacggcttcactggaccgacattcttctcatggcagtgatgtgtctctctcccagattttaaagccaaacaggtcaagagatcggcaaagccttgatggattctacagccatgggatgggagctgagggtcgagaaagtgagagtgagcctgctgacccaggcgacgtggaggaggaggagatggacagtatcactgaagtgcctgcaaactgctctgtcctaaggagctccatgcgctctctttctcccttccggaggcacagctgggggcctgggaaaaatgcagccagcgatgcagaaatgaaccaccggagttcaatgcgagttcttggggatgttgtcaggagacctcccattcataggagaagtttcagtctagaaggcttgacaggaggagctggtgtcggaaacaagccatcctcatctctagaagtaagctctgcaaatgccgaagagctcagacacccattcagtggtgaggaacgggttgactctttggtgtcactttcagaagaggatctggagtcagaccagagagaacataggatgtttgatcagcagatatgtcacagatctaagcagcagggatttaattactgtacatcagccatttcctctccattgacaaaatccatctcattaatgacaatcagccatcctggattggacaattcacggcccttccacagtaccttccacaataccagtgctaatctgactgagagtataacagaagagaactataatttcctgccacatagcccctccaagaaagattctgaatggaagagtggaacaaaagtcagtcgtacattcagctacatcaagaataaaatgtctagcagcaagaagagcaaagaaaaggaaaaagaaaaagataagattaaggagaaggagaaagattctaaagacaaggagaaagataagaagactgtcaacgggcacactttcagttccattcctgttgtgggtcccatcagctgtagccagtgtatgaagcccttcaccaacaaagatgcctatacttgtgcaaattgcagtgcttttgtccacaaaggctgccgagaaagtctagcctcctgtgcaaaggtcaaaatgaagcagcccaaagggagccttcaggcacatgacacatcatcactgcccacggtcattatgagaaacaagccctcacagcccaaggagcgtcctcggtccgcagtcctcctggtggatgaaaccgctaccaccccaatatttgccaatagacgatcccagcagagtgtctcgctctccaaaagtgtctccatacagaacattactggagttggcaatgatgagaacatgtcaaacacctggaaattcctgtctcattcaacagactcactaaataaaatcagcaaggtcaatgagtcaacagaatcacttactgatgagggagggtacagacatgaatgaaggacaactactgggagactttgagattgagtccaaacagctggaagcagagtcttggagtcggataatagacagcaagtttctaaaacagcaaaagaaagatgtggtcaaacggcaagaagtaatatatgagttgatgcagacagagtttcatcatgtccgcactctcaagatcatgagtggtgtgtacagccaggggatgatggcggatctgctttttgagcagcagatggtagaaaagctgttcccctgtttggatgagctgatcagtatccatagccaattcttccagaggattctggagcggaagaaggagtctctggtggataaaagtgaaaagaactttctcatcaagaggataggggatgtgcttgtaaatcagttttcaggtgagaatgcagaacgtttaaagaagacatatggcaagttttgtgggcaacataaccagtctgtaaactacttcaaagacctttatgccaaggataagcgttttcaagcctttgtaaagaagaagatgagcagttcagttgttagaaggcttggaattccagagtgcatattgcttgtaactcagcggattaccaagtacccagttttattccaaagaatattgcagtgtaccaaagacaatgaagtggagcaggaagatctagcacagtccttgagcctggtgaaggatgtgattggagctgtagacagcaaagtggcaagttatgaaaagaaagtgcgtctcaatgagatttatacaaagacagatagcaagtcaatcatgaggatgaagagtggtcagatgtttgccaaggaagatttgaaacggaagaagcttgtacgtgatgggagtgtgtttctgaagaatgcagcaggaaggttgaaagaggttcaagcagttcttctcactgacattttagttttccttcaagaaaaagaccagaagtacatctttgcatcattggaccagaagtcaacagtgatctctttaaagaagctgattgtgagagaagtggcacatgaggagaaaggtttattcctgatcagcatggggatgacagatccagagatggtagaagtccatgccagctccaaagaggaacgaaacagctggattcagatcattcaggacacaatcaacaccctgaacagagatgaagatgaaggaattcctagtgagaatgaggaagaaaagaaaatgttggacaccagagcccgagaattaaaagaacaacttcaccagaaggaccaaaaaatcctactcttgttggaagagaaggagatgattttccgggacatggctgagtgcagcacccctctcccagaggattgctccccaacacatagccctagagttctcttccgctccaacacagaagaggctctcaaaggaggacctttaatgaaaagtgcaataaatgaggtggagatccttcagggtttggtgagtggaaatctgggaggcacacttgggccgactgtcagcagccccattgagcaagatgtggtcggtcccgtttccctgccccggagagcagagacctttggaggatttgacagccatcagatgaatgcttcaaaaggaggcgagaaggaagagggagatgatggccaagatcttaggagaacggaatcagatagtggcctaaaaaagggtggaaatgctaacctggtatttatgcttaaaagaaacagtgagcaggttgtccagagcgttgttcatctctacgagctcctcagcgctctgcagggtgtggtgctgcagcaggacagctacattgaggaccagaaactggtgctgagcgagagggcgctcactcgcagcttgtcccgcccgagctccctcattgagcaggagaagcagcgcagcctggagaagcagcgccaggacctggccaacctgcagaagcagcaggcccagtacctcgaggagaagcgcaggcgcgagcgtgagtgggaagctcgtgagagggagctgcgggagcgggaggccctcctggcccagcgcgaggaggaggtgcagcaggggcagcaggacctggaaaaggagcgggaggagctccagcagaagaagggcacataccagtatgacctggagcgactgcgtgctgcccagaaacagcttgagagggaacaggagcagctgcgccgggaggcagagcggctcagccagcggcagacagaacgggacctgtgtcagatactacttgggggagggcagctaatgaaaccttcaagctctatgcagtccacagacgtgagctctgtagagttcgcagaggtttcccatccacataccaagctgatgaggatcccatcgttcttccccagtcctgaggagcccccctcgccatctgcaccttccatagccaaatcagggtcattggactcagaactttcagtgtccccaaaaaggaacagcatctctcggacacacaaagataaggggccttttcacatactgagttcaaccagccagacaaacaaaggaccagaagggcagagccaggcccctgcgtccacctctgcctctacccgcctgtttgggttaacaaagccaaaggaaaagaaggagaaaaaaaagaagaacaaaaccagccgctctcagcccggtgatggtcccgcgtcagaagtatcagcagagggtgaagagatcttctgctgaccctcttcctctctgctgaggcagctgcctcctgatcctggccagcccacctctcctgctgtccccgcgtgcacaagtctcttacactggacgcccactgctcctcagcgtccagtcctcctgggcggccccaggtcctggacaataagcaacagatgatattgagtgtcgggtggggaaggaggcccagactctgcttcggccatgatttgtgactgcccaggactctcaggttgggctggccctactcaggattacactgaaagtaatggcctcgtaagtacaggtgatggttttggacacgtcaggaattcctaaaggctgaaagagtgtatccaagtaaggtctgaacctccgactgccttttatttgggggaacacaaaaccaaacagcagatgttttggacttgatctgtgtacgtacatggggacctgtctgcatatacacacggggaatgccagaagaaggcccagtctgcaccaggcgtctggtcaacttagcacaagggcagtgcctggacggacccggagcccccgcatatcagcagttcacccagtactcctcagagactggtttccctctaaacccatcccgggcacataccacccctgttttgcatgtatttctcatttcattttagggatgacaaacatttgtgaaaccagtgagagaaggcttgatgtgtataaaagacgtgatgtgcaccacctcgatctcggtgtttcaggcactaaagcaacaaaacaacccatagtatctcattttgtcatcagatccagaagaaatatcctggttttccagcatgtttacccacatgttttgggcatggataaagtgaagaggcctactcaccattatccctgcagcgtgacaccttttgattgtcactgaccactcagaaggggccacggcctcctggctgtgttcctgagcccccgtcgtgcctctcccagacagcagctgtctggcccttgctgggtgagggcacaccactgccaggggtcagcctcgcacccaggccaggcagaagctgtgctctgaagctaggacagctggctgagaagtgggttcaggcgaagggtgaagccatgtgtagcagttcctgccagtgcagatctggagaggagctggcccggaaggcgtggttgtgaaagcgcccttcttatgttaggaggccttggcaaaattggatttcttcaaaaatacatgtaaaggtctgttgttgaattgtactctgcccctggaagcagatacagatggctgcctgctgctcggctttgcttttgcttttcccaccgtgttttcatctttgttcacttgaggctttccccagctggtgtgtgcaggacagttcatggtaatgttgccctctgaggccccgtacaccagaagggaggccctggaaaattttgtgcttccaacgtggccttcaattcttgcttttttgcccctcggaagcatggggcttttgagcacacttaaaaaaagaaaaatctgtaacttggtgcttattgatgaattgcaagctggccttgcagatggagatatttatctttcagtttatttgaaagaggtctggtttaaaatttgtagcctacatttgttttatttattgtatttgtgtgtttgtgtttgtttttttttaagggtgagccaggtctagcccaacagtctaaactatccagtcaataccgagtgaagtggcagccagcactgttcactctgtgtcttttgaagtgccttgaaggcccagatgaaattttaaagggagggggtccatgtccttccctcccccaccccgcctcattctttaatcaaaggatgtcttctcccttgtttgagaatgaagaaactcgccacctctgacctacctttgcctttttctgtcatggagaatactcacccttcagaaacagaccaaaggccaaaacctgctgatttttctattgaaaatatgtccccttgcaaagaccctaaacaaaaagttaagtttctttctttcacctatttgtacaactccaagttacagctgaatctgtcgtgactttcctgagatctacccggggcttggctgtctgttctgggcactggctccgagttcccctcctgggatttgcaggagggcagtactgaacctgcattcttctccttgtaaatgtaggccgggtgcccctgttctccgggtttggaacaatacgaggttggtgctgatgggatttacttgcgtacgtgctcttcacaaaaacaccgtggatgctgaagttagagcacgtcgccacagagcttgacatcaatgttagagggtctcttactccccgcccagctgtgatgtttcatctgctttggttgttttggtggtcttttttaaaaatagagatttcacatctgcccagaccccactcaaaacgatttggtcaggttctggttggacaagtttaaaatcaaagtagtgcccggaattccctcaaaccacccaacttcatccaggaatacagtctgcagtgcagcaacagaaccgcttaccaagaactgtgcttacatacctttgtcatctctcttccccccttggaagttgtcctcagggggatttgttcctgtcctggggatttacctgggatggtggctgcctgtgcttttgctcatggccttgacagtgctctagttgctggatctaatggcctgtcttggtttctatcacatgagaaggggttgtttttttggggtgactcggactgaattccccatactgtt

SEQ ID NO: 361988 - DNA, 7395 bp, Homo sapiens
tgttccatctgtgggtaaccatgttccgaggcagcaaagagaaaccgctattgctccgtggaaataaactatctgaataaaacttcttaacgggggttgaggctgaagctgaaacgggagtcggacacgatcttggctcctgaagtctttaaaggtcagtttgatgcacacttctataccaccacctgttaccagctgtagacagaagacctatctccatgcttgcccctaggcttttgtagaaatgccagacgtgaaagctgaagatgaagtggattttagagcaagttcaatttctgaagaagtggctgtagggagcatagctgctacactgaagatgaagcaaggcccaatgacccaggcgataaaccgagaaaactggtgtacaatagagccatgccctgatgcagcatctcttctggcttccaagcagagcccagaatgtgagaacttcctggatgttggactgggcagagagtgtacctcaaaacaaggtgtacttaaaagagaatctgggagtgattctgacctctttcactcacccagtgatgacatggacagcatcatcttcccaaagccagaggaagagcatttggcctgtgatatcaccggatccagttcatccaccgatgacacggcttcactggaccgacattcttctcatggcagtgatgtgtctctctcccagattttaaagccaaacaggtcaagagatcggcaaagccttgatggattctacagccatgggatgggagctgagggtcgagaaagtgagagtgagcctgctgacccaggcgacgtggaggaggaggagatggacagtatcactgaagtgcctgcaaactgctctgtcctaaggagctccatgcgctctctttctcccttccggaggcacagctgggggcctgggaaaaatgcagccagcgatgcagaaatgaaccaccggagttcaatgcgagttcttggggatgttgtcaggagacctcccattcataggagaagtttcagtctagaaggcttgacaggaggagctggtgtcggaaacaagccatcctcatctctagaagtaagctctgcaaatgccgaagagctcagacacccattcagtggtgaggaacgggttgactctttggtgtcactttcagaagaggatctggagtcagaccagagagaacataggatgtttgatcagcagatatgtcacagatctaagcagcagggatttaattactgtacatcagccatttcctctccattgacaaaatccatctcattaatgacaatcagccatcctggattggacaattcacggcccttccacagtaccttccacaataccagtgctaatctgactgagagtataacagaagagaactataatttcctgccacatagcccctccaagaaagattctgaatggaagagtggaacaaaagtcagtcgtacattcagctacatcaagaataaaatgtctagcagcaagaagagcaaagaaaaggaaaaagaaaaagataagattaaggagaaggagaaagattctaaagacaaggagaaagataagaagactgtcaacgggcacactttcagttccattcctgttgtgggtcccatcagctgtagccagtgtatgaagcccttcaccaacaaagatgcctatacttgtgcaaattgcagtgcttttgtccacaaaggctgccgagaaagtctagcctcctgtgcaaaggtcaaaatgaagcagcccaaagggagccttcaggcacatgacacatcatcactgcccacggtcattatgagaaacaagccctcacagcccaaggagcgtcctcggtccgcagtcctcctggtggatgaaaccgctaccaccccaatatttgccaatagacgatcccagcagagtgtctcgctctccaaaagtgtctccatacagaacattactggagttggcaatgatgagaacatgtcaaacacctggaaattcctgtctcattcaacagactcactaaataaaatcagcaaggtcaatgagtcaacagaatcacttactgatgagggagggtacagacatgaatgaaggacaactactgggagactttgagattgagtccaaacagctggaagcagagtcttggagtcggataatagacagcaagtttctaaaacagcaaaagaaagatgtggtcaaacggcaagaagtaatatatgagttgatgcagacagagtttcatcatgtccgcactctcaagatcatgagtggtgtgtacagccaggggatgatggcggatctgctttttgagcagcagatggtagaaaagctgttcccctgtttggatgagctgatcagtatccatagccaattcttccagaggattctggagcggaagaaggagtctctggtggataaaagtgaaaagaactttctcatcaagaggataggggatgtgcttgtaaatcagttttcaggtgagaatgcagaacgtttaaagaagacatatggcaagttttgtgggcaacataaccagtctgtaaactacttcaaagacctttatgccaaggataagcgttttcaagcctttgtaaagaagaagatgagcagttcagttgttagaaggcttggaattccagagtgcatattgcttgtaactcagcggattaccaagtacccagttttattccaaagaatattgcagtgtaccaaagacaatgaagtggagcaggaagatctagcacagtccttgagcctggtgaaggatgtgattggagctgtagacagcaaagtggcaagttatgaaaagaaagtgcgtctcaatgagatttatacaaagacagatagcaagtcaatcatgaggatgaagagtggtcagatgtttgccaaggaagatttgaaacggaagaagcttgtacgtgatgggagtgtgtttctgaagaatgcagcaggaaggttgaaagaggttcaagcagttcttctcactgacattttagttttccttcaagaaaaagaccagaagtacatctttgcatcattggaccagaagtcaacagtgatctctttaaagaagctgattgtgagagaagtggcacatgaggagaaaggtttattcctgatcagcatggggatgacagatccagagatggtagaagtccatgccagctccaaagaggaacgaaacagctggattcagatcattcaggacacaatcaacaccctgaacagagatgaagatgaaggaattcctagtgagaatgaggaagaaaagaaaatgttggacaccagagcccgagaattaaaagaacaacttcaccagaaggaccaaaaaatcctactcttgttggaagagaaggagatgattttccgggacatggctgagtgcagcacccctctcccagaggattgctccccaacacatagccctagagttctcttccgctccaacacagaagaggctctcaaaggaggacctttaatgaaaagtgcaataaatgaggtggagatccttcagggtttggtgagtggaaatctgggaggcacacttgggccgactgtcagcagccccattgagcaagatgtggtcggtcccgtttccctgccccggagagcagagacctttggaggatttgacagccatcagatgaatgcttcaaaaggaggcgagaaggaagagggagatgatggccaagatcttaggagaacggaatcagatagtggcctaaaaaagggtggaaatgctaacctggtatttatgcttaaaagaaacagtgagcaggttgtccagagcgttgttcatctctacgagctcctcagcgctctgcagggtgtggtgctgcagcaggacagctacattgaggaccagaaactggtgctgagcgagagggcgctcactcgcagcttgtcccgcccgagctccctcattgagcaggagaagcagcgcagcctggagaagcagcgccaggacctggccaacctgcagaagcagcaggcccagtacctcgaggagaagcgcaggcgcgagcgtgagtgggaagctcgtgagagggagctgcgggagcgggaggccctcctggcccagcgcgaggaggaggtgcagcaggggcagcaggacctggaaaaggagcgggaggagctccagcagaagaagggcacataccagtatgacctggagcgactgcgtgctgcccagaaacagcttgagagggaacaggagcagctgcgccgggaggcagagcggctcagccagcggcagacagaacgggacctgtgtcaggtttcccatccacataccaagctgatgaggatcccatcgttcttccccagtcctgaggagcccccctcgccatctgcaccttccatagccaaatcagggtcattggactcagaactttcagtgtccccaaaaaggaacagcatctctcggacacacaaagataaggggccttttcacatactgagttcaaccagccagacaaacaaaggaccagaagggcagagccaggcccctgcgtccacctctgcctctacccgcctgtttgggttaacaaagccaaaggaaaagaaggagaaaaaaaagaagaacaaaaccagccgctctcagcccggtgatggtcccgcgtcagaagtatcagcagagggtgaagagatcttctgctgaccctcttcctctctgctgaggcagctgcctcctgatcctggccagcccacctctcctgctgtccccgcgtgcacaagtctcttacactggacgcccactgctcctcagcgtccagtcctcctgggcggccccaggtcctggacaataagcaacagatgatattgagtgtcgggtggggaaggaggcccagactctgcttcggccatgatttgtgactgcccaggactctcaggttgggctggccctactcaggattacactgaaagtaatggcctcgtaagtacaggtgatggttttggacacgtcaggaattcctaaaggctgaaagagtgtatccaagtaaggtctgaacctccgactgccttttatttgggggaacacaaaaccaaacagcagatgttttggacttgatctgtgtacgtacatggggacctgtctgcatatacacacggggaatgccagaagaaggcccagtctgcaccaggcgtctggtcaacttagcacaagggcagtgcctggacggacccggagcccccgcatatcagcagttcacccagtactcctcagagactggtttccctctaaacccatcccgggcacataccacccctgttttgcatgtatttctcatttcattttagggatgacaaacatttgtgaaaccagtgagagaaggcttgatgtgtataaaagacgtgatgtgcaccacctcgatctcggtgtttcaggcactaaagcaacaaaacaacccatagtatctcattttgtcatcagatccagaagaaatatcctggttttccagcatgtttacccacatgttttgggcatggataaagtgaagaggcctactcaccattatccctgcagcgtgacaccttttgattgtcactgaccactcagaaggggccacggcctcctggctgtgttcctgagcccccgtcgtgcctctcccagacagcagctgtctggcccttgctgggtgagggcacaccactgccaggggtcagcctcgcacccaggccaggcagaagctgtgctctgaagctaggacagctggctgagaagtgggttcaggcgaagggtgaagccatgtgtagcagttcctgccagtgcagatctggagaggagctggcccggaaggcgtggttgtgaaagcgcccttcttatgttaggaggccttggcaaaattggatttcttcaaaaatacatgtaaaggtctgttgttgaattgtactctgcccctggaagcagatacagatggctgcctgctgctcggctttgcttttgcttttcccaccgtgttttcatctttgttcacttgaggctttccccagctggtgtgtgcaggacagttcatggtaatgttgccctctgaggccccgtacaccagaagggaggccctggaaaattttgtgcttccaacgtggccttcaattcttgcttttttgcccctcggaagcatggggcttttgagcacacttaaaaaaagaaaaatctgtaacttggtgcttattgatgaattgcaagctggccttgcagatggagatatttatctttcagtttatttgaaagaggtctggtttaaaatttgtagcctacatttgttttatttattgtatttgtgtgtttgtgtttgtttttttttaagggtgagccaggtctagcccaacagtctaaactatccagtcaataccgagtgaagtggcagccagcactgttcactctgtgtcttttgaagtgccttgaaggcccagatgaaattttaaagggagggggtccatgtccttccctcccccaccccgcctcattctttaatcaaaggatgtcttctcccttgtttgagaatgaagaaactcgccacctctgacctacctttgcctttttctgtcatggagaatactcacccttcagaaacagaccaaaggccaaaacctgctgatttttctattgaaaatatgtccccttgcaaagaccctaaacaaaaagttaagtttctttctttcacctatttgtacaactccaagttacagctgaatctgtcgtgactttcctgagatctacccggggcttggctgtctgttctgggcactggctccgagttcccctcctgggatttgcaggagggcagtactgaacctgcattcttctccttgtaaatgtaggccgggtgcccctgttctccgggtttggaacaatacgaggttggtgctgatgggatttacttgcgtacgtgctcttcacaaaaacaccgtggatgctgaagttagagcacgtcgccacagagcttgacatcaatgttagagggtctcttactccccgcccagctgtgatgtttcatctgctttggttgttttggtggtcttttttaaaaatagagatttcacatctgcccagaccccactcaaaacgatttggtcaggttctggttggacaagtttaaaatcaaagtagtgcccggaattccctcaaaccacccaacttcatccaggaatacagtctgcagtgcagcaacagaaccgcttaccaagaactgtgcttacatacctttgtcatctctcttccccccttggaagttgtcctcagggggatttgttcctgtcctggggatttacctgggatggtggctgcctgtgcttttgctcatggccttgacagtgctctagttgctggatctaatggcctgtcttggtttctatcacatgagaaggggttgtttttttggggtgactcggactgaattccccatactgtt

SEQ ID NO: 361989 - DNA, 7652 bp, Homo sapiens
tgggtggatcagagtgtgttgtatgttagtgaaagtcatacttgtcccagaggctttttctcattctcagtggctttttcctttttgttttgtacaaatccttgcttttttgatgatggccaagatggactacctagcttcagctattaatctgttcccctgaagcttatgaatttagttttccatatgcaagttggtgctacactcagatttgtcataaaaagtcaatagtgaaatggatgttcaaaagacattgaattggatcctcgcttagttccaagcgcctacaaaggctagggaaaaccagtaaccatgcgataaaggaatagctcagcatagggtcagaaatgacactagccgctgacaacaaaagaatacttttccattttaacgcaaaagcaaaacaaaacacatgaaacctggagcatgttgtatgaatagtaaggcacaggaatcagtttttaaaaatgtactctgtaacccccctgcactttcagaaaaatgccagacgtgaaagctgaagatgaagtggattttagagcaagttcaatttctgaagaagtggctgtagggagcatagctgctacactgaagatgaagcaaggcccaatgacccaggcgataaaccgagaaaactggtgtacaatagagccatgccctgatgcagcatctcttctggcttccaagcagagcccagaatgtgagaacttcctggatgttggactgggcagagagtgtacctcaaaacaaggtgtacttaaaagagaatctgggagtgattctgacctctttcactcacccagtgatgacatggacagcatcatcttcccaaagccagaggaagagcatttggcctgtgatatcaccggatccagttcatccaccgatgacacggcttcactggaccgacattcttctcatggcagtgatgtgtctctctcccagattttaaagccaaacaggtcaagagatcggcaaagccttgatggattctacagccatgggatgggagctgagggtcgagaaagtgagagtgagcctgctgacccaggcgacgtggaggaggaggagatggacagtatcactgaagtgcctgcaaactgctctgtcctaaggagctccatgcgctctctttctcccttccggaggcacagctgggggcctgggaaaaatgcagccagcgatgcagaaatgaaccaccggagttcaatgcgagttcttggggatgttgtcaggagacctcccattcataggagaagtttcagtctagaaggcttgacaggaggagctggtgtcggaaacaagccatcctcatctctagaagtaagctctgcaaatgccgaagagctcagacacccattcagtggtgaggaacgggttgactctttggtgtcactttcagaagaggatctggagtcagaccagagagaacataggatgtttgatcagcagatatgtcacagatctaagcagcagggatttaattactgtacatcagccatttcctctccattgacaaaatccatctcattaatgacaatcagccatcctggattggacaattcacggcccttccacagtaccttccacaataccagtgctaatctgactgagagtataacagaagagaactataatttcctgccacatagcccctccaagaaagattctgaatggaagagtggaacaaaagtcagtcgtacattcagctacatcaagaataaaatgtctagcagcaagaagagcaaagaaaaggaaaaagaaaaagataagattaaggagaaggagaaagattctaaagacaaggagaaagataagaagactgtcaacgggcacactttcagttccattcctgttgtgggtcccatcagctgtagccagtgtatgaagcccttcaccaacaaagatgcctatacttgtgcaaattgcagtgcttttgtccacaaaggctgccgagaaagtctagcctcctgtgcaaaggtcaaaatgaagcagcccaaagggagccttcaggcacatgacacatcatcactgcccacggtcattatgagaaacaagccctcacagcccaaggagcgtcctcggtccgcagtcctcctggtggatgaaaccgctaccaccccaatatttgccaatagacgatcccagcagagtgtctcgctctccaaaagtgtctccatacagaacattactggagttggcaatgatgagaacatgtcaaacacctggaaattcctgtctcattcaacagactcactaaataaaatcagcaaggtcaatgagtcaacagaatcacttactgatgagggagggtacagacatgaatgaaggacaactactgggagactttgagattgagtccaaacagctggaagcagagtcttggagtcggataatagacagcaagtttctaaaacagcaaaagaaagatgtggtcaaacggcaagaagtaatatatgagttgatgcagacagagtttcatcatgtccgcactctcaagatcatgagtggtgtgtacagccaggggatgatggcggatctgctttttgagcagcagatggtagaaaagctgttcccctgtttggatgagctgatcagtatccatagccaattcttccagaggattctggagcggaagaaggagtctctggtggataaaagtgaaaagaactttctcatcaagaggataggggatgtgcttgtaaatcagttttcaggtgagaatgcagaacgtttaaagaagacatatggcaagttttgtgggcaacataaccagtctgtaaactacttcaaagacctttatgccaaggataagcgttttcaagcctttgtaaagaagaagatgagcagttcagttgttagaaggcttggaattccagagtgcatattgcttgtaactcagcggattaccaagtacccagttttattccaaagaatattgcagtgtaccaaagacaatgaagtggagcaggaagatctagcacagtccttgagcctggtgaaggatgtgattggagctgtagacagcaaagtggcaagttatgaaaagaaagtgcgtctcaatgagatttatacaaagacagatagcaagtcaatcatgaggatgaagagtggtcagatgtttgccaaggaagatttgaaacggaagaagcttgtacgtgatgggagtgtgtttctgaagaatgcagcaggaaggttgaaagaggttcaagcagttcttctcactgacattttagttttccttcaagaaaaagaccagaagtacatctttgcatcattggaccagaagtcaacagtgatctctttaaagaagctgattgtgagagaagtggcacatgaggagaaaggtttattcctgatcagcatggggatgacagatccagagatggtagaagtccatgccagctccaaagaggaacgaaacagctggattcagatcattcaggacacaatcaacaccctgaacagagatgaagatgaaggaattcctagtgagaatgaggaagaaaagaaaatgttggacaccagagcccgagaattaaaagaacaacttcaccagaaggaccaaaaaatcctactcttgttggaagagaaggagatgattttccgggacatggctgagtgcagcacccctctcccagaggattgctccccaacacatagccctagagttctcttccgctccaacacagaagaggctctcaaaggaggacctttaatgaaaagtgcaataaatgaggtggagatccttcagggtttggtgagtggaaatctgggaggcacacttgggccgactgtcagcagccccattgagcaagatgtggtcggtcccgtttccctgccccggagagcagagacctttggaggatttgacagccatcagatgaatgcttcaaaaggaggcgagaaggaagagggagatgatggccaagatcttaggagaacggaatcagatagtggcctaaaaaagggtggaaatgctaacctggtatttatgcttaaaagaaacagtgagcaggttgtccagagcgttgttcatctctacgagctcctcagcgctctgcagggtgtggtgctgcagcaggacagctacattgaggaccagaaactggtgctgagcgagagggcgctcactcgcagcttgtcccgcccgagctccctcattgagcaggagaagcagcgcagcctggagaagcagcgccaggacctggccaacctgcagaagcagcaggcccagtacctcgaggagaagcgcaggcgcgagcgtgagtgggaagctcgtgagagggagctgcgggagcgggaggccctcctggcccagcgcgaggaggaggtgcagcaggggcagcaggacctggaaaaggagcgggaggagctccagcagaagaagggcacataccagtatgacctggagcgactgcgtgctgcccagaaacagcttgagagggaacaggagcagctgcgccgggaggcagagcggctcagccagcggcagacagaacgggacctgtgtcaggtttcccatccacataccaagctgatgaggatcccatcgttcttccccagtcctgaggagcccccctcgccatctgcaccttccatagccaaatcagggtcattggactcagaactttcagtgtccccaaaaaggaacagcatctctcggacacacaaagataaggggccttttcacatactgagttcaaccagccagacaaacaaaggaccagaagggcagagccaggcccctgcgtccacctctgcctctacccgcctgtttgggttaacaaagccaaaggaaaagaaggagaaaaaaaagaagaacaaaaccagccgctctcagcccggtgatggtcccgcgtcagaagtatcagcagagggtgaagagatcttctgctgaccctcttcctctctgctgaggcagctgcctcctgatcctggccagcccacctctcctgctgtccccgcgtgcacaagtctcttacactggacgcccactgctcctcagcgtccagtcctcctgggcggccccaggtcctggacaataagcaacagatgatattgagtgtcgggtggggaaggaggcccagactctgcttcggccatgatttgtgactgcccaggactctcaggttgggctggccctactcaggattacactgaaagtaatggcctcgtaagtacaggtgatggttttggacacgtcaggaattcctaaaggctgaaagagtgtatccaagtaaggtctgaacctccgactgccttttatttgggggaacacaaaaccaaacagcagatgttttggacttgatctgtgtacgtacatggggacctgtctgcatatacacacggggaatgccagaagaaggcccagtctgcaccaggcgtctggtcaacttagcacaagggcagtgcctggacggacccggagcccccgcatatcagcagttcacccagtactcctcagagactggtttccctctaaacccatcccgggcacataccacccctgttttgcatgtatttctcatttcattttagggatgacaaacatttgtgaaaccagtgagagaaggcttgatgtgtataaaagacgtgatgtgcaccacctcgatctcggtgtttcaggcactaaagcaacaaaacaacccatagtatctcattttgtcatcagatccagaagaaatatcctggttttccagcatgtttacccacatgttttgggcatggataaagtgaagaggcctactcaccattatccctgcagcgtgacaccttttgattgtcactgaccactcagaaggggccacggcctcctggctgtgttcctgagcccccgtcgtgcctctcccagacagcagctgtctggcccttgctgggtgagggcacaccactgccaggggtcagcctcgcacccaggccaggcagaagctgtgctctgaagctaggacagctggctgagaagtgggttcaggcgaagggtgaagccatgtgtagcagttcctgccagtgcagatctggagaggagctggcccggaaggcgtggttgtgaaagcgcccttcttatgttaggaggccttggcaaaattggatttcttcaaaaatacatgtaaaggtctgttgttgaattgtactctgcccctggaagcagatacagatggctgcctgctgctcggctttgcttttgcttttcccaccgtgttttcatctttgttcacttgaggctttccccagctggtgtgtgcaggacagttcatggtaatgttgccctctgaggccccgtacaccagaagggaggccctggaaaattttgtgcttccaacgtggccttcaattcttgcttttttgcccctcggaagcatggggcttttgagcacacttaaaaaaagaaaaatctgtaacttggtgcttattgatgaattgcaagctggccttgcagatggagatatttatctttcagtttatttgaaagaggtctggtttaaaatttgtagcctacatttgttttatttattgtatttgtgtgtttgtgtttgtttttttttaagggtgagccaggtctagcccaacagtctaaactatccagtcaataccgagtgaagtggcagccagcactgttcactctgtgtcttttgaagtgccttgaaggcccagatgaaattttaaagggagggggtccatgtccttccctcccccaccccgcctcattctttaatcaaaggatgtcttctcccttgtttgagaatgaagaaactcgccacctctgacctacctttgcctttttctgtcatggagaatactcacccttcagaaacagaccaaaggccaaaacctgctgatttttctattgaaaatatgtccccttgcaaagaccctaaacaaaaagttaagtttctttctttcacctatttgtacaactccaagttacagctgaatctgtcgtgactttcctgagatctacccggggcttggctgtctgttctgggcactggctccgagttcccctcctgggatttgcaggagggcagtactgaacctgcattcttctccttgtaaatgtaggccgggtgcccctgttctccgggtttggaacaatacgaggttggtgctgatgggatttacttgcgtacgtgctcttcacaaaaacaccgtggatgctgaagttagagcacgtcgccacagagcttgacatcaatgttagagggtctcttactccccgcccagctgtgatgtttcatctgctttggttgttttggtggtcttttttaaaaatagagatttcacatctgcccagaccccactcaaaacgatttggtcaggttctggttggacaagtttaaaatcaaagtagtgcccggaattccctcaaaccacccaacttcatccaggaatacagtctgcagtgcagcaacagaaccgcttaccaagaactgtgcttacatacctttgtcatctctcttccccccttggaagttgtcctcagggggatttgttcctgtcctggggatttacctgggatggtggctgcctgtgcttttgctcatggccttgacagtgctctagttgctggatctaatggcctgtcttggtttctatcacatgagaaggggttgtttttttggggtgactcggactgaattccccatactgtt

SEQ ID NO: 361990 - DNA, 8875 bp, Homo sapiens
agcgggaagcgcctgtgctctgccgagactgccgtgcccattgctcgcctcggtcgccgccgctttagcccgcctccgggggagcggccgcctattgtctttctccgcggcgaaggtgaagagttgtcccagctcggcccgcgggggagccccgggagccgcacgtgtcctgggtcatgaaacttaatccacagcaagctcccttatatggtgattgtgttgttacagtgctgcttgctgaagaggacaaagctgaagatgatgtagtgttttacttggtatttttgggttccaccctccgtcactgtacaagtactcggaaggtcagttctgatacattggagaccattgctcctggtcatgattgttgtgaaacagtgaaggtgcagctctgtgcttccaaagagggccttcccgtgtttgtggtggctgaagaagactttcatttcgtccaggatgaagcgtatgatgcagctcaattcctagcaaccagtgctggaaatcagcaggctttgaactttacccgttttcttgaccagtcaggacccccatctggggatgtgaattcccttgataagaagttggtgctggcattcaggcacctgaagctgcccacggagtggaatgtattggggacagatcagagtttgcatgatgctggcccgcgagagacattgatgcattttgctgtgcggctgggactgctgaggttgacgtggttcctgttgcagaagccaggtggccgcggagctctcagtatccacaaccaggaaggggcgacgcctgtgagcttggccttggagcgaggctatcacaagctgcaccagcttctaaccgaggagaatgctggagaaccagactcctggagcagtttatcctatgaaataccgtatggagactgttctgtgaggcatcatcgagagttggacatctatacattaacctctgagtctgattcacatcatgaacacccatttcctggagacggttgcactggaccaatttttaaacttatgaacatccaacagcaactaatgaaaacaaacctcaagcagatggacagtcttatgcccttaatgatgacagcacaggatccttccagtgccccagagacagatggccagtttcttccctgtgcaccggagcccacggaccctcagcgactttcttcttctgaagagactgagagcactcagtgctgcccagggagccctgttgcacagactgaaagtccctgtgatttgtcaagcatagttgaggaggagaatacagaccgttcctgtaggaagaaaaataaaggcgtggaaagaaaaggggaagaggtggagccagcacctattgtggactctggaactgtatctgatcaagacagctgccttcagagcttgcctgattgtggagtaaagggcacggaaggcctttcgtcctgtggaaacagaaatgaagaaactggaacaaaatcttctggaatgcccacagaccaggagtccctgagcagtggagatgctgtgcttcagagagacttggtcatggagccaggcacagcccagtattcctctggaggtgaactgggaggcatttcaacaacaaatgtcagtaccccagacactgcaggggaaatggaacatgggctcatgaacccagatgccactgtttggaagaatgtgcttcagggaggggaaagtacaaaggaaagatttgagaactctaatattggcacagctggagcctctgacgtgcacgtcacaagtaagcctgtggataaaatcagtgttccaaactgtgcccctgccgccagttccctggatggtaacaaacctgctgagtcttcacttgcatttagtaatgaagaaacctccactgaaaaaacagcagaaacggaaacttcacgaagtcgtgaggagagtgctgatgctccagtagatcagaattctgtggtgattccagctgctgcaaaagacaagatttcagatggattagaaccttatactctcttagcagcaggcataggtgaggcaatgtcaccctcagatttagcccttcttgggctggaagaagatgtaatgccacaccagaactcagaaacaaattcatctcatgctcaaagccaaaagggcaaatcctcacccatttgttctacaactggagacgataaactttgtgcagactctgcatgtcaacagaacacagtgacttctagtggcgatttggttgcaaaactgtgtgataacatagttagcgagtccgaaagcaccacagcaaggcaacccagctcacaagatccacccgatgcctcccactgtgaagacccacaggctcatacagtcacctctgaccctgtaagggatacccaggaacgtgcggatttttgtcctttcaaagtggtggataacaaaggccaacgaaaagatgtgaaactagataaacctttaacaaatatgcttgaggtggtttcacatccacatccagttgtccctaaaatggagaaagaactggtgccagaccaggcagtaatatcagacagtactttctctctggcaaacagtccaggcagtgaatcagtaaccaaggatgacgcactttcttttgtcccctcccagaaagaaaagggaacagcaactcctgaactacatacagctacagattatagagatggcccagatggaaattcgaatgagcctgatacgcggccactagaagacagggcagcaggcctgtccacatcctccactgctgcagagcttcagcacgggatggggaataccagtctcacaggacttggtggagagcatgagggtcctgcccctccagcaatcccagaagctctgaatatcaaggggaacactgactcttccctgcaaagtatgggtaaggccactttggctttagattcagttttgactgaagaaggaaaacttctggtggtttcagaaagctctgcagctcaggaacaagataaggataaagcggtgacctgttcctctattaaggaaaatgctctctcttcaggaactttgcaggaagagcagagaacaccacctcctggacaagatactcaacaatttcatgaaaaatcaatctcagctgactgtgccaaggacaaagcacttcagctaagtaattcaccgggtgcatcctctgcctttcttaaggcagaaactgaacataacaaggaagtggccccacaagtctcactgctgactcaaggtggggctgcccagagcctggtgccaccaggagcaagtctggccacagagtcaaggcaggaagccttgggggcagagcacaacagctctgctctgttgccatgtctgttgccagatgggtctgatgggtccgatgctcttaactgcagtcaggcttctcctctggatgttggagtgaagaacactcaatcccagggaaaaactagtgcctgtgaggtgagtggaaatgtgacggtggatgttacaggggttaatgctctacaaggtatggctgagcccagaagagagaatatatcacacaacacccaagacatcctgattccaaacgtcttgttgagccaagagaagaatgccgttctaggtttgccagtggctctacaggacaaagctgtgactgacccacagggagttggaaccccagagatgatacctcttgattgggagaaagggaagctggagggagcagaccacagctgtaccatgggtgacgctgaggaagcccaaatagacgatgaagcacatcctgtcctactgcagcctgttgccaaggagctccccacagacatggagctctcagcccatgatgatggggccccagctggtgtgagggaagtcacgcgagccccgccttcaggcagagaaaggagcactccctctctaccttgcatggtctctgcccaggacgcacctctgcctaagggagcagacttgatagaggaggctgccagccgtatagtggatgctgtcatcgaacaagtcaaggccgctggagcactgcttactgagggggaggcctgtcacatgtcactgtccagccctgagttgggtcctctcactaaaggactagagagtgcttttacagaaaaagtgagtactttcccacctggggagagcctaccaatgggcagtactcctgaggaagccacggggagccttgcaggatgttttgctggaagggaggagccagagaagatcattttacctgtccaggggcctgagccagcagcagaaatgccagacgtgaaagctgaagatgaagtggattttagagcaagttcaatttctgaagaagtggctgtagggagcatagctgctacactgaagatgaagcaaggcccaatgacccaggcgataaaccgagaaaactggtgtacaatagagccatgccctgatgcagcatctcttctggcttccaagcagagcccagaatgtgagaacttcctggatgttggactgggcagagagtgtacctcaaaacaaggtgtacttaaaagagaatctgggagtgattctgacctctttcactcacccagtgatgacatggacagcatcatcttcccaaagccagaggaagagcatttggcctgtgatatcaccggatccagttcatccaccgatgacacggcttcactggaccgacattcttctcatggcagtgatgtgtctctctcccagattttaaagccaaacaggtcaagagatcggcaaagccttgatggattctacagccatgggatgggagctgagggtcgagaaagtgagagtgagcctgctgacccaggcgacgtggaggaggaggagatggacagtatcactgaagtgcctgcaaactgctctgtcctaaggagctccatgcgctctctttctcccttccggaggcacagctgggggcctgggaaaaatgcagccagcgatgcagaaatgaaccaccggagttcaatgcgagttcttggggatgttgtcaggagacctcccattcataggagaagtttcagtctagaaggcttgacaggaggagctggtgtcggaaacaagccatcctcatctctagaagtaagctctgcaaatgccgaagagctcagacacccattcagtggtgaggaacgggttgactctttggtgtcactttcagaagaggatctggagtcagaccagagagaacataggatgtttgatcagcagatatgtcacagatctaagcagcagggatttaattactgtacatcagccatttcctctccattgacaaaatccatctcattaatgacaatcagccatcctggattggacaattcacggcccttccacagtaccttccacaataccagtgctaatctgactgagagtataacagaagagaactataatttcctgccacatagcccctccaagaaagattctgaatggaagagtggaacaaaagtcagtcgtacattcagctacatcaagaataaaatgtctagcagcaagaagagcaaagaaaaggaaaaagaaaaagataagattaaggagaaggagaaagattctaaagacaaggagaaagataagaagactgtcaacgggcacactttcagttccattcctgttgtgggtcccatcagctgtagccagtgtatgaagcccttcaccaacaaagatgcctatacttgtgcaaattgcagtgcttttgtccacaaaggctgccgagaaagtctagcctcctgtgcaaaggtcaaaatgaagcagcccaaagggagccttcaggcacatgacacatcatcactgcccacggtcattatgagaaacaagccctcacagcccaaggagcgtcctcggtccgcagtcctcctggtggatgaaaccgctaccaccccaatatttgccaatagacgatcccagcagagtgtctcgctctccaaaagtgtctccatacagaacattactggagttggcaatgatgagaacatgtcaaacacctggaaattcctgtctcattcaacagactcactaaataaaatcagcaaggtcaatgagtcaacagaatcacttactgatgagggagggtacagacatgaatgaaggacaactactgggagactttgagattgagtccaaacagctggaagcagagtcttggagtcggataatagacagcaagtttctaaaacagcaaaagaaagatgtggtcaaacggcaagaagtaatatatgagttgatgcagacagagtttcatcatgtccgcactctcaagatcatgagtggtgtgtacagccaggggatgatggcggatctgctttttgagcagcagatggtagaaaagctgttcccctgtttggatgagctgatcagtatccatagccaattcttccagaggattctggagcggaagaaggagtctctggtggataaaagtgaaaagaactttctcatcaagaggataggggatgtgcttgtaaatcagttttcaggtgagaatgcagaacgtttaaagaagacatatggcaagttttgtgggcaacataaccagtctgtaaactacttcaaagacctttatgccaaggataagcgttttcaagcctttgtaaagaagaagatgagcagttcagttgttagaaggcttggaattccagagtgcatattgcttgtaactcagcggattaccaagtacccagttttattccaaagaatattgcagtgtaccaaagacaatgaagtggagcaggaagatctagcacagtccttgagcctggtgaaggatgtgattggagctgtagacagcaaagtggcaagttatgaaaagaaagtgcgtctcaatgagatttatacaaagacagatagcaagtcaatcatgaggatgaagagtggtcagatgtttgccaaggaagatttgaaacggaagaagcttgtacgtgatgggagtgtgtttctgaagaatgcagcaggaaggttgaaagaggttcaagcagttcttctcactgacattttagttttccttcaagaaaaagaccagaagtacatctttgcatcattggaccagaagtcaacagtgatctctttaaagaagctgattgtgagagaagtggcacatgaggagaaaggtttattcctgatcagcatggggatgacagatccagagatggtagaagtccatgccagctccaaagaggaacgaaacagctggattcagatcattcaggacacaatcaacaccctgaacagagatgaagatgaaggaattcctagtgagaatgaggaagaaaagaaaatgttggacaccagagcccgagaattaaaagaacaacttcaccagaaggaccaaaaaatcctactcttgttggaagagaaggagatgattttccgggacatggctgagtgcagcacccctctcccagaggattgctccccaacacatagccctagagttctcttccgctccaacacagaagaggctctcaaaggaggacctttaatgaaaagtgcaataaatgaggtggagatccttcagggtttggtgagtggaaatctgggaggcacacttgggccgactgtcagcagccccattgagcaagatgtggtcggtcccgtttccctgccccggagagcagagacctttggaggatttgacagccatcagatgaatgcttcaaaaggaggcgagaaggaagagggagatgatggccaagatcttaggagaacggaatcagatagtggcctaaaaaagggtggaaatgctaacctggtatttatgcttaaaagaaacagtgagcaggttgtccagagcgttgttcatctctacgagctcctcagcgctctgcagggtgtggtgctgcagcaggacagctacattgaggaccagaaactggtgctgagcgagagggcgctcactcgcagcttgtcccgcccgagctccctcattgagcaggagaagcagcgcagcctggagaagcagcgccaggacctggccaacctgcagaagcagcaggcccagtacctcgaggagaagcgcaggcgcgagcgtgagtgggaagctcgtgagagggagctgcgggagcgggaggccctcctggcccagcgcgaggaggaggtgcagcaggggcagcaggacctggaaaaggagcgggaggagctccagcagaagaagggcacataccagtatgacctggagcgactgcgtgctgcccagaaacagcttgagagggaacaggagcagctgcgccgggaggcagagcggctcagccagcggcagacagaacgggacctgtgtcaggtttcccatccacataccaagctgatgaggatcccatcgttcttccccagtcctgaggagcccccctcgccatctgcaccttccatagccaaatcagggtcattggactcagaactttcagtgtccccaaaaaggaacagcatctctcggacacacaaagataaggggccttttcacatactgagttcaaccagccagacaaacaaaggaccagaagggcagagccaggcccctgcgtccacctctgcctctacccgcctgtttgggttaacaaagccaaaggaaaagaaggagaaaaaaaagaagaacaaaaccagccgctctcagcccggtggtgagtcacgcacacctgctctccctgtggccatagtgtctgtgcattctgagagagggtagattttagtggcatggggcggggttgaaaaggggacagttcagatgctcaaaagccaaactgccatccttttcaccagctccgcttgctaagagcactcatgcagcgaacattaagaacccactctgtgtggcacgtgtgcagaagcagagagcatgggtttcattttcaaggcattatccgatcgaggaactggagctcacccctcaatgaagtaattcaagtcctcgtgcctttctgggcctagag

SEQ ID NO: 361991 - DNA, 9068 bp, Homo sapiens
agcgggaagcgcctgtgctctgccgagactgccgtgcccattgctcgcctcggtcgccgccgctttagcccgcctccgggggagcggccgcctattgtctttctccgcggcgaaggtgaagagttgtcccagctcggcccgcgggggagccccgggagccgcacgtgtcctgggtcatgaaacttaatccacagcaagctcccttatatggtgattgtgttgttacagtgctgcttgctgaagaggacaaagctgaagatgatgtagtgttttacttggtatttttgggttccaccctccgtcactgtacaagtactcggaaggtcagttctgatacattggagaccattgctcctggtcatgattgttgtgaaacagtgaaggtgcagctctgtgcttccaaagagggccttcccgtgtttgtggtggctgaagaagactttcatttcgtccaggatgaagcgtatgatgcagctcaattcctagcaaccagtgctggaaatcagcaggctttgaactttacccgttttcttgaccagtcaggacccccatctggggatgtgaattcccttgataagaagttggtgctggcattcaggcacctgaagctgcccacggagtggaatgtattggggacagatcagagtttgcatgatgctggcccgcgagagacattgatgcattttgctgtgcggctgggactgctgaggttgacgtggttcctgttgcagaagccaggtggccgcggagctctcagtatccacaaccaggaaggggcgacgcctgtgagcttggccttggagcgaggctatcacaagctgcaccagcttctaaccgaggagaatgctggagaaccagactcctggagcagtttatcctatgaaataccgtatggagactgttctgtgaggcatcatcgagagttggacatctatacattaacctctgagtctgattcacatcatgaacacccatttcctggagacggttgcactggaccaatttttaaacttatgaacatccaacagcaactaatgaaaacaaacctcaagcagatggacagtcttatgcccttaatgatgacagcacaggatccttccagtgccccagagacagatggccagtttcttccctgtgcaccggagcccacggaccctcagcgactttcttcttctgaagagactgagagcactcagtgctgcccagggagccctgttgcacagactgaaagtccctgtgatttgtcaagcatagttgaggaggagaatacagaccgttcctgtaggaagaaaaataaaggcgtggaaagaaaaggggaagaggtggagccagcacctattgtggactctggaactgtatctgatcaagacagctgccttcagagcttgcctgattgtggagtaaagggcacggaaggcctttcgtcctgtggaaacagaaatgaagaaactggaacaaaatcttctggaatgcccacagaccaggagtccctgagcagtggagatgctgtgcttcagagagacttggtcatggagccaggcacagcccagtattcctctggaggtgaactgggaggcatttcaacaacaaatgtcagtaccccagacactgcaggggaaatggaacatgggctcatgaacccagatgccactgtttggaagaatgtgcttcagggaggggaaagtacaaaggaaagatttgagaactctaatattggcacagctggagcctctgacgtgcacgtcacaagtaagcctgtggataaaatcagtgttccaaactgtgcccctgccgccagttccctggatggtaacaaacctgctgagtcttcacttgcatttagtaatgaagaaacctccactgaaaaaacagcagaaacggaaacttcacgaagtcgtgaggagagtgctgatgctccagtagatcagaattctgtggtgattccagctgctgcaaaagacaagatttcagatggattagaaccttatactctcttagcagcaggcataggtgaggcaatgtcaccctcagatttagcccttcttgggctggaagaagatgtaatgccacaccagaactcagaaacaaattcatctcatgctcaaagccaaaagggcaaatcctcacccatttgttctacaactggagacgataaactttgtgcagactctgcatgtcaacagaacacagtgacttctagtggcgatttggttgcaaaactgtgtgataacatagttagcgagtccgaaagcaccacagcaaggcaacccagctcacaagatccacccgatgcctcccactgtgaagacccacaggctcatacagtcacctctgaccctgtaagggatacccaggaacgtgcggatttttgtcctttcaaagtggtggataacaaaggccaacgaaaagatgtgaaactagataaacctttaacaaatatgcttgaggtggtttcacatccacatccagttgtccctaaaatggagaaagaactggtgccagaccaggcagtaatatcagacagtactttctctctggcaaacagtccaggcagtgaatcagtaaccaaggatgacgcactttcttttgtcccctcccagaaagaaaagggaacagcaactcctgaactacatacagctacagattatagagatggcccagatggaaattcgaatgagcctgatacgcggccactagaagacagggcagcaggcctgtccacatcctccactgctgcagagcttcagcacgggatggggaataccagtctcacaggacttggtggagagcatgagggtcctgcccctccagcaatcccagaagctctgaatatcaaggggaacactgactcttccctgcaaagtatgggtaaggccactttggctttagattcagttttgactgaagaaggaaaacttctggtggtttcagaaagctctgcagctcaggaacaagataaggataaagcggtgacctgttcctctattaaggaaaatgctctctcttcaggaactttgcaggaagagcagagaacaccacctcctggacaagatactcaacaatttcatgaaaaatcaatctcagctgactgtgccaaggacaaagcacttcagctaagtaattcaccgggtgcatcctctgcctttcttaaggcagaaactgaacataacaaggaagtggccccacaagtctcactgctgactcaaggtggggctgcccagagcctggtgccaccaggagcaagtctggccacagagtcaaggcaggaagccttgggggcagagcacaacagctctgctctgttgccatgtctgttgccagatgggtctgatgggtccgatgctcttaactgcagtcaggcttctcctctggatgttggagtgaagaacactcaatcccagggaaaaactagtgcctgtgaggtgagtggaaatgtgacggtggatgttacaggggttaatgctctacaaggtatggctgagcccagaagagagaatatatcacacaacacccaagacatcctgattccaaacgtcttgttgagccaagagaagaatgccgttctaggtttgccagtggctctacaggacaaagctgtgactgacccacagggagttggaaccccagagatgatacctcttgattgggagaaagggaagctggagggagcagaccacagctgtaccatgggtgacgctgaggaagcccaaatagacgatgaagcacatcctgtcctactgcagcctgttgccaaggagctccccacagacatggagctctcagcccatgatgatggggccccagctggtgtgagggaagtcacgcgagccccgccttcaggcagagaaaggagcactccctctctaccttgcatggtctctgcccaggacgcacctctgcctaagggagcagacttgatagaggaggctgccagccgtatagtggatgctgtcatcgaacaagtcaaggccgctggagcactgcttactgagggggaggcctgtcacatgtcactgtccagccctgagttgggtcctctcactaaaggactagagagtgcttttacagaaaaagtgagtactttcccacctggggagagcctaccaatgggcagtactcctgaggaagccacggggagccttgcaggatgttttgctggaagggaggagccagagaagatcattttacctgtccaggggcctgagccagcagcagaaatgccagacgtgaaagctgaagatgaagtggattttagagcaagttcaatttctgaagaagtggctgtagggagcatagctgctacactgaagatgaagcaaggcccaatgacccaggcgataaaccgagaaaactggtgtacaatagagccatgccctgatgcagcatctcttctggcttccaagcagagcccagaatgtgagaacttcctggatgttggactgggcagagagtgtacctcaaaacaaggtgtacttaaaagagaatctgggagtgattctgacctctttcactcacccagtgatgacatggacagcatcatcttcccaaagccagaggaagagcatttggcctgtgatatcaccggatccagttcatccaccgatgacacggcttcactggaccgacattcttctcatggcagtgatgtgtctctctcccagattttaaagccaaacaggtcaagagatcggcaaagccttgatggattctacagccatgggatgggagctgagggtcgagaaagtgagagtgagcctgctgacccaggcgacgtggaggaggaggagatggacagtatcactgaagtgcctgcaaactgctctgtcctaaggagctccatgcgctctctttctcccttccggaggcacagctgggggcctgggaaaaatgcagccagcgatgcagaaatgaaccaccggagttcaatgcgagttcttggggatgttgtcaggagacctcccattcataggagaagtttcagtctagaaggcttgacaggaggagctggtgtcggaaacaagccatcctcatctctagaagtaagctctgcaaatgccgaagagctcagacacccattcagtggtgaggaacgggttgactctttggtgtcactttcagaagaggatctggagtcagaccagagagaacataggatgtttgatcagcagatatgtcacagatctaagcagcagggatttaattactgtacatcagccatttcctctccattgacaaaatccatctcattaatgacaatcagccatcctggattggacaattcacggcccttccacagtaccttccacaataccagtgctaatctgactgagagtataacagaagagaactataatttcctgccacatagcccctccaagaaagattctgaatggaagagtggaacaaaagtcagtcgtacattcagctacatcaagaataaaatgtctagcagcaagaagagcaaagaaaaggaaaaagaaaaagataagattaaggagaaggagaaagattctaaagacaaggagaaagataagaagactgtcaacgggcacactttcagttccattcctgttgtgggtcccatcagctgtagccagtgtatgaagcccttcaccaacaaagatgcctatacttgtgcaaattgcagtgcttttgtccacaaaggctgccgagaaagtctagcctcctgtgcaaaggtcaaaatgaagcagcccaaagggagccttcaggcacatgacacatcatcactgcccacggtcattatgagaaacaagccctcacagcccaaggagcgtcctcggtccgcagtcctcctggtggatgaaaccgctaccaccccaatatttgccaatagacgatcccagcagagtgtctcgctctccaaaagtgtctccatacagaacattactggagttggcaatgatgagaacatgtcaaacacctggaaattcctgtctcattcaacagactcactaaataaaatcagcaaggtcaatgagtcaacagaatcacttactgatgagggagggtacagacatgaatgaaggacaactactgggagactttgagattgagtccaaacagctggaagcagagtcttggagtcggataatagacagcaagtttctaaaacagcaaaagaaagatgtggtcaaacggcaagaagtaatatatgagttgatgcagacagagtttcatcatgtccgcactctcaagatcatgagtggtgtgtacagccaggggatgatggcggatctgctttttgagcagcagatggtagaaaagctgttcccctgtttggatgagctgatcagtatccatagccaattcttccagaggattctggagcggaagaaggagtctctggtggataaaagtgaaaagaactttctcatcaagaggataggggatgtgcttgtaaatcagttttcaggtgagaatgcagaacgtttaaagaagacatatggcaagttttgtgggcaacataaccagtctgtaaactacttcaaagacctttatgccaaggataagcgttttcaagcctttgtaaagaagaagatgagcagttcagttgttagaaggcttggaattccagagtgcatattgcttgtaactcagcggattaccaagtacccagttttattccaaagaatattgcagtgtaccaaagacaatgaagtggagcaggaagatctagcacagtccttgagcctggtgaaggatgtgattggagctgtagacagcaaagtggcaagttatgaaaagaaagtgcgtctcaatgagatttatacaaagacagatagcaagtcaatcatgaggatgaagagtggtcagatgtttgccaaggaagatttgaaacggaagaagcttgtacgtgatgggagtgtgtttctgaagaatgcagcaggaaggttgaaagaggttcaagcagttcttctcactgacattttagttttccttcaagaaaaagaccagaagtacatctttgcatcattggaccagaagtcaacagtgatctctttaaagaagctgattgtgagagaagtggcacatgaggagaaaggtttattcctgatcagcatggggatgacagatccagagatggtagaagtccatgccagctccaaagaggaacgaaacagctggattcagatcattcaggacacaatcaacaccctgaacagagatgaagatgaaggaattcctagtgagaatgaggaagaaaagaaaatgttggacaccagagcccgagaattaaaagaacaacttcaccagaaggaccaaaaaatcctactcttgttggaagagaaggagatgattttccgggacatggctgagtgcagcacccctctcccagaggattgctccccaacacatagccctagagttctcttccgctccaacacagaagaggctctcaaaggaggacctttaatgaaaagtgcaataaatgaggtggagatccttcagggtttggtgagtggaaatctgggaggcacacttgggccgactgtcagcagccccattgagcaagatgtggtcggtcccgtttccctgccccggagagcagagacctttggaggatttgacagccatcagatgaatgcttcaaaaggaggcgagaaggaagagggagatgatggccaagatcttaggagaacggaatcagatagtggcctaaaaaagggtggaaatgctaacctggtatttatgcttaaaagaaacagtgagcaggttgtccagagcgttgttcatctctacgagctcctcagcgctctgcagggtgtggtgctgcagcaggacagctacattgaggaccagaaactggtgctgagcgagagggcgctcactcgcagcttgtcccgcccgagctccctcattgagcaggagaagcagcgcagcctggagaagcagcgccaggacctggccaacctgcagaagcagcaggcccagtacctcgaggagaagcgcaggcgcgagcgtgagtgggaagctcgtgagagggagctgcgggagcgggaggccctcctggcccagcgcgaggaggaggtgcagcaggggcagcaggacctggaaaaggagcgggaggagctccagcagaagaagggcacataccagtatgacctggagcgactgcgtgctgcccagaaacagcttgagagggaacaggagcagctgcgccgggaggcagagcggctcagccagcggcagacagaacgggacctgtgtcagatactacttgggggagggcagctaatgaaaccttcaagctctatgcagtccacagacgtgagctctgtagagttcgcagaggtgggtaagtacccagccagcacacccagttgaattcagccaggatttattgagttggcatcacggacgctgacagcctccaagtgaaaacccttctcttgaatatgtacaggtttcccatccacataccaagctgatgaggatcccatcgttcttccccagtcctgaggagcccccctcgccatctgcaccttccatagccaaatcagggtcattggactcagaactttcagtgtccccaaaaaggaacagcatctctcggacacacaaagataaggggccttttcacatactgagttcaaccagccagacaaacaaaggaccagaagggcagagccaggcccctgcgtccacctctgcctctacccgcctgtttgggttaacaaagccaaaggaaaagaaggagaaaaaaaagaagaacaaaaccagccgctctcagcccggtggtgagtcacgcacacctgctctccctgtggccatagtgtctgtgcattctgagagagggtagattttagtggcatggggcggggttgaaaaggggacagttcagatgctcaaaagccaaactgccatccttttcaccagctccgcttgctaagagcactcatgcagcgaacattaagaacccactctgtgtggcacgtgtgcagaagcagagagcatgggtttcattttcaaggcattatccgatcgaggaactggagctcacccctcaatgaagtaattcaagtcctcgtgcctttctgggcctagag

SEQ ID NO: 361992 - DNA, 6921 bp, Homo sapiens
agtacaccttgttttgaggtacacttaaaagagaatcactcccagattctcttttaagtacaccttgttttgaggtgtacttaaaagagaatctgggagtgattctgacctctttcactcacccagtgatgacatggacagcatcatcttcccaaagccagaggaagagcatttggcctgtgatatcaccggatccagttcatccaccgatgacacggcttcactggaccgacattcttctcatggcagtgatgtgtctctctcccagattttaaagccaaacaggtcaagagatcggcaaagccttgatggattctacagccatgggatgggagctgagggtcgagaaagtgagagtgagcctgctgacccaggcgacgtggaggaggaggagatggacagtatcactgaagtgcctgcaaactgctctgtcctaaggagctccatgcgctctctttctcccttccggaggcacagctgggggcctgggaaaaatgcagccagcgatgcagaaatgaaccaccggagtttcagtctagaaggcttgacaggaggagctggtgtcggaaacaagccatcctcatctctagaagtaagctctgcaaatgccgaagagctcagacacccattcagtggtgaggaacgggttgactctttggtgtcactttcagaagaggatctggagtcagaccagagagaacataggatgtttgatcagcagatatgtcacagatctaagcagcagggatttaattactgtacatcagccatttcctctccattgacaaaatccatctcattaatgacaatcagccatcctggattggacaattcacggcccttccacagtaccttccacaataccagtgctaatctgactgagagtataacagaagagaactataatttcctgccacatagcccctccaagaaagattctgaatggaagagtggaacaaaagtcagtcgtacattcagctacatcaagaataaaatgtctagcagcaagaagagcaaagaaaaggaaaaagaaaaagataagattaaggagaaggagaaagattctaaagacaaggagaaagataagaagactgtcaacgggcacactttcagttccattcctgttgtgggtcccatcagctgtagccagtgtatgaagcccttcaccaacaaagatgcctatacttgtgcaaattgcagtgcttttgtccacaaaggctgccgagaaagtctagcctcctgtgcaaaggtcaaaatgaagcagcccaaagggagccttcaggcacatgacacatcatcactgcccacggtcattatgagaaacaagccctcacagcccaaggagcgtcctcggtccgcagtcctcctggtggatgaaaccgctaccaccccaatatttgccaatagacgatcccagcagagtgtctcgctctccaaaagtgtctccatacagaacattactggagttggcaatgatgagaacatgtcaaacacctggaaattcctgtctcattcaacagactcactaaataaaatcagcaaggtcaatgagtcaacagaatcacttactgatgagggagggtacagacatgaatgaaggacaactactgggagactttgagattgagtccaaacagctggaagcagagtcttggagtcggataatagacagcaagtttctaaaacagcaaaagaaagatgtggtcaaacggcaagaagtaatatatgagttgatgcagacagagtttcatcatgtccgcactctcaagatcatgagtggtgtgtacagccaggggatgatggcggatctgctttttgagcagcagatggtagaaaagctgttcccctgtttggatgagctgatcagtatccatagccaattcttccagaggattctggagcggaagaaggagtctctggtggataaaagtgaaaagaactttctcatcaagaggataggggatgtgcttgtaaatcagttttcaggtgagaatgcagaacgtttaaagaagacatatggcaagttttgtgggcaacataaccagtctgtaaactacttcaaagacctttatgccaaggataagcgttttcaagcctttgtaaagaagaagatgagcagttcagttgttagaaggcttggaattccagagtgcatattgcttgtaactcagcggattaccaagtacccagttttattccaaagaatattgcagtgtaccaaagacaatgaagtggagcaggaagatctagcacagtccttgagcctggtgaaggatgtgattggagctgtagacagcaaagtggcaagttatgaaaagaaagtgcgtctcaatgagatttatacaaagacagatagcaagtcaatcatgaggatgaagagtggtcagatgtttgccaaggaagatttgaaacggaagaagcttgtacgtgatgggagtgtgtttctgaagaatgcagcaggaaggttgaaagaggttcaagcagttcttctcactgacattttagttttccttcaagaaaaagaccagaagtacatctttgcatcattggaccagaagtcaacagtgatctctttaaagaagctgattgtgagagaagtggcacatgaggagaaaggtttattcctgatcagcatggggatgacagatccagagatggtagaagtccatgccagctccaaagaggaacgaaacagctggattcagatcattcaggacacaatcaacaccctgaacagagatgaagatgaaggaattcctagtgagaatgaggaagaaaagaaaatgttggacaccagagcccgagaattaaaagaacaacttcaccagaaggaccaaaaaatcctactcttgttggaagagaaggagatgattttccgggacatggctgagtgcagcacccctctcccagaggattgctccccaacacatagccctagagttctcttccgctccaacacagaagaggctctcaaaggaggacctttaatgaaaagtgcaataaatgaggtggagatccttcagggtttggtgagtggaaatctgggaggcacacttgggccgactgtcagcagccccattgagcaagatgtggtcggtcccgtttccctgccccggagagcagagacctttggaggatttgacagccatcagatgaatgcttcaaaaggaggcgagaaggaagagggagatgatggccaagatcttaggagaacggaatcagatagtggcctaaaaaagggtggaaatgctaacctggtatttatgcttaaaagaaacagtgagcaggttgtccagagcgttgttcatctctacgagctcctcagcgctctgcagggtgtggtgctgcagcaggacagctacattgaggaccagaaactggtgctgagcgagagggcgctcactcgcagcttgtcccgcccgagctccctcattgagcaggagaagcagcgcagcctggagaagcagcgccaggacctggccaacctgcagaagcagcaggcccagtacctcgaggagaagcgcaggcgcgagcgtgagtgggaagctcgtgagagggagctgcgggagcgggaggccctcctggcccagcgcgaggaggaggtgcagcaggggcagcaggacctggaaaaggagcgggaggagctccagcagaagaagggcacataccagtatgacctggagcgactgcgtgctgcccagaaacagcttgagagggaacaggagcagctgcgccgggaggcagagcggctcagccagcggcagacagaacgggacctgtgtcaggtttcccatccacataccaagctgatgaggatcccatcgttcttccccagtcctgaggagcccccctcgccatctgcaccttccatagccaaatcagggtcattggactcagaactttcagtgtccccaaaaaggaacagcatctctcggacacacaaagataaggggccttttcacatactgagttcaaccagccagacaaacaaaggaccagaagggcagagccaggcccctgcgtccacctctgcctctacccgcctgtttgggttaacaaagccaaaggaaaagaaggagaaaaaaaagaagaacaaaaccagccgctctcagcccggtgatggtcccgcgtcagaagtatcagcagagggtgaagagatcttctgctgaccctcttcctctctgctgaggcagctgcctcctgatcctggccagcccacctctcctgctgtccccgcgtgcacaagtctcttacactggacgcccactgctcctcagcgtccagtcctcctgggcggccccaggtcctggacaataagcaacagatgatattgagtgtcgggtggggaaggaggcccagactctgcttcggccatgatttgtgactgcccaggactctcaggttgggctggccctactcaggattacactgaaagtaatggcctcgtaagtacaggtgatggttttggacacgtcaggaattcctaaaggctgaaagagtgtatccaagtaaggtctgaacctccgactgccttttatttgggggaacacaaaaccaaacagcagatgttttggacttgatctgtgtacgtacatggggacctgtctgcatatacacacggggaatgccagaagaaggcccagtctgcaccaggcgtctggtcaacttagcacaagggcagtgcctggacggacccggagcccccgcatatcagcagttcacccagtactcctcagagactggtttccctctaaacccatcccgggcacataccacccctgttttgcatgtatttctcatttcattttagggatgacaaacatttgtgaaaccagtgagagaaggcttgatgtgtataaaagacgtgatgtgcaccacctcgatctcggtgtttcaggcactaaagcaacaaaacaacccatagtatctcattttgtcatcagatccagaagaaatatcctggttttccagcatgtttacccacatgttttgggcatggataaagtgaagaggcctactcaccattatccctgcagcgtgacaccttttgattgtcactgaccactcagaaggggccacggcctcctggctgtgttcctgagcccccgtcgtgcctctcccagacagcagctgtctggcccttgctgggtgagggcacaccactgccaggggtcagcctcgcacccaggccaggcagaagctgtgctctgaagctaggacagctggctgagaagtgggttcaggcgaagggtgaagccatgtgtagcagttcctgccagtgcagatctggagaggagctggcccggaaggcgtggttgtgaaagcgcccttcttatgttaggaggccttggcaaaattggatttcttcaaaaatacatgtaaaggtctgttgttgaattgtactctgcccctggaagcagatacagatggctgcctgctgctcggctttgcttttgcttttcccaccgtgttttcatctttgttcacttgaggctttccccagctggtgtgtgcaggacagttcatggtaatgttgccctctgaggccccgtacaccagaagggaggccctggaaaattttgtgcttccaacgtggccttcaattcttgcttttttgcccctcggaagcatggggcttttgagcacacttaaaaaaagaaaaatctgtaacttggtgcttattgatgaattgcaagctggccttgcagatggagatatttatctttcagtttatttgaaagaggtctggtttaaaatttgtagcctacatttgttttatttattgtatttgtgtgtttgtgtttgtttttttttaagggtgagccaggtctagcccaacagtctaaactatccagtcaataccgagtgaagtggcagccagcactgttcactctgtgtcttttgaagtgccttgaaggcccagatgaaattttaaagggagggggtccatgtccttccctcccccaccccgcctcattctttaatcaaaggatgtcttctcccttgtttgagaatgaagaaactcgccacctctgacctacctttgcctttttctgtcatggagaatactcacccttcagaaacagaccaaaggccaaaacctgctgatttttctattgaaaatatgtccccttgcaaagaccctaaacaaaaagttaagtttctttctttcacctatttgtacaactccaagttacagctgaatctgtcgtgactttcctgagatctacccggggcttggctgtctgttctgggcactggctccgagttcccctcctgggatttgcaggagggcagtactgaacctgcattcttctccttgtaaatgtaggccgggtgcccctgttctccgggtttggaacaatacgaggttggtgctgatgggatttacttgcgtacgtgctcttcacaaaaacaccgtggatgctgaagttagagcacgtcgccacagagcttgacatcaatgttagagggtctcttactccccgcccagctgtgatgtttcatctgctttggttgttttggtggtcttttttaaaaatagagatttcacatctgcccagaccccactcaaaacgatttggtcaggttctggttggacaagtttaaaatcaaagtagtgcccggaattccctcaaaccacccaacttcatccaggaatacagtctgcagtgcagcaacagaaccgcttaccaagaactgtgcttacatacctttgtcatctctcttccccccttggaagttgtcctcagggggatttgttcctgtcctggggatttacctgggatggtggctgcctgtgcttttgctcatggccttgacagtgctctagttgctggatctaatggcctgtcttggtttctatcacatgagaaggggttgtttttttggggtgactcggactgaattccccatactgtt

SEQ ID NO: 361993 - DNA, 6548 bp, Homo sapiens
ggctctttttaacatgaggtcactgaaaatccataattaaaacattaaaaatgggccaggcggtagctcacgcctgtaatccaagcactttgggaggctgaggtgggaggattgtgtgaagccaggagttcaaaatcagcctgggcaacatagcaagaccccatctctacaaaaaaatttgaaaaatagccaggcgtggtggcatgtgcctttagtcccagcttactctagaggctgaggcaggaagattgcgtgagctcaggagttcaaggctgcagtgagctatcatcacaccactcagagcaagactgtctccaaaacagacaagtgaacaagaaaacattagtgacggatctaaggaaacttagccaagttttgataacggaacctgggcgttgtggcatactctataaaaagccattcagcagccttcatctaccttttattctgcttcacttttatttaacttctgtagccctttaaaaaaaatcaatcttcttgtttttatttagtataacagaagagaactataatttcctgccacatagcccctccaagaaagattctgaatggaagagtggaacaaaagtcagtcgtacattcagctacatcaagaataaaatgtctagcagcaagaagagcaaagaaaaggaaaaagaaaaagataagattaaggagaaggagaaagattctaaagacaaggagaaagataagaagactgtcaacgggcacactttcagttccattcctgttgtgggtcccatcagctgtagccagtgtatgaagcccttcaccaacaaagatgcctatacttgtgcaaattgcagtgcttttgtccacaaaggctgccgagaaagtctagcctcctgtgcaaaggtcaaaatgaagcagcccaaagggagccttcaggcacatgacacatcatcactgcccacggtcattatgagaaacaagccctcacagcccaaggagcgtcctcggtccgcagtcctcctggtggatgaaaccgctaccaccccaatatttgccaatagacgatcccagcagagtgtctcgctctccaaaagtgtctccatacagaacattactggagttggcaatgatgagaacatgtcaaacacctggaaattcctgtctcattcaacagactcactaaataaaatcagcaaggtcaatgagtcaacagaatcacttactgatgagggagggtacagacatgaatgaaggacaactactgggagactttgagattgagtccaaacagctggaagcagagtcttggagtcggataatagacagcaagtttctaaaacagcaaaagaaagatgtggtcaaacggcaagaagtaatatatgagttgatgcagacagagtttcatcatgtccgcactctcaagatcatgagtggtgtgtacagccaggggatgatggcggatctgctttttgagcagcagatggtagaaaagctgttcccctgtttggatgagctgatcagtatccatagccaattcttccagaggattctggagcggaagaaggagtctctggtggataaaagtgaaaagaactttctcatcaagaggataggggatgtgcttgtaaatcagttttcaggtgagaatgcagaacgtttaaagaagacatatggcaagttttgtgggcaacataaccagtctgtaaactacttcaaagacctttatgccaaggataagcgttttcaagcctttgtaaagaagaagatgagcagttcagttgttagaaggcttggaattccagagtgcatattgcttgtaactcagcggattaccaagtacccagttttattccaaagaatattgcagtgtaccaaagacaatgaagtggagcaggaagatctagcacagtccttgagcctggtgaaggatgtgattggagctgtagacagcaaagtggcaagttatgaaaagaaagtgcgtctcaatgagatttatacaaagacagatagcaagtcaatcatgaggatgaagagtggtcagatgtttgccaaggaagatttgaaacggaagaagcttgtacgtgatgggagtgtgtttctgaagaatgcagcaggaaggttgaaagaggttcaagcagttcttctcactgacattttagttttccttcaagaaaaagaccagaagtacatctttgcatcattggaccagaagtcaacagtgatctctttaaagaagctgattgtgagagaagtggcacatgaggagaaaggtttattcctgatcagcatggggatgacagatccagagatggtagaagtccatgccagctccaaagaggaacgaaacagctggattcagatcattcaggacacaatcaacaccctgaacagagatgaagatgaaggaattcctagtgagaatgaggaagaaaagaaaatgttggacaccagagcccgagaattaaaagaacaacttcaccagaaggaccaaaaaatcctactcttgttggaagagaaggagatgattttccgggacatggctgagtgcagcacccctctcccagaggattgctccccaacacatagccctagagttctcttccgctccaacacagaagaggctctcaaaggaggacctttaatgaaaagtgcaataaatgaggtggagatccttcagggtttggtgagtggaaatctgggaggcacacttgggccgactgtcagcagccccattgagcaagatgtggtcggtcccgtttccctgccccggagagcagagacctttggaggatttgacagccatcagatgaatgcttcaaaaggaggcgagaaggaagagggagatgatggccaagatcttaggagaacggaatcagatagtggcctaaaaaagggtggaaatgctaacctggtatttatgcttaaaagaaacagtgagcaggttgtccagagcgttgttcatctctacgagctcctcagcgctctgcagggtgtggtgctgcagcaggacagctacattgaggaccagaaactggtgctgagcgagagggcgctcactcgcagcttgtcccgcccgagctccctcattgagcaggagaagcagcgcagcctggagaagcagcgccaggacctggccaacctgcagaagcagcaggcccagtacctcgaggagaagcgcaggcgcgagcgtgagtgggaagctcgtgagagggagctgcgggagcgggaggccctcctggcccagcgcgaggaggaggtgcagcaggggcagcaggacctggaaaaggagcgggaggagctccagcagaagaagggcacataccagtatgacctggagcgactgcgtgctgcccagaaacagcttgagagggaacaggagcagctgcgccgggaggcagagcggctcagccagcggcagacagaacgggacctgtgtcaggtttcccatccacataccaagctgatgaggatcccatcgttcttccccagtcctgaggagcccccctcgccatctgcaccttccatagccaaatcagggtcattggactcagaactttcagtgtccccaaaaaggaacagcatctctcggacacacaaagataaggggccttttcacatactgagttcaaccagccagacaaacaaaggaccagaagggcagagccaggcccctgcgtccacctctgcctctacccgcctgtttgggttaacaaagccaaaggaaaagaaggagaaaaaaaagaagaacaaaaccagccgctctcagcccggtgatggtcccgcgtcagaagtatcagcagagggtgaagagatcttctgctgaccctcttcctctctgctgaggcagctgcctcctgatcctggccagcccacctctcctgctgtccccgcgtgcacaagtctcttacactggacgcccactgctcctcagcgtccagtcctcctgggcggccccaggtcctggacaataagcaacagatgatattgagtgtcgggtggggaaggaggcccagactctgcttcggccatgatttgtgactgcccaggactctcaggttgggctggccctactcaggattacactgaaagtaatggcctcgtaagtacaggtgatggttttggacacgtcaggaattcctaaaggctgaaagagtgtatccaagtaaggtctgaacctccgactgccttttatttgggggaacacaaaaccaaacagcagatgttttggacttgatctgtgtacgtacatggggacctgtctgcatatacacacggggaatgccagaagaaggcccagtctgcaccaggcgtctggtcaacttagcacaagggcagtgcctggacggacccggagcccccgcatatcagcagttcacccagtactcctcagagactggtttccctctaaacccatcccgggcacataccacccctgttttgcatgtatttctcatttcattttagggatgacaaacatttgtgaaaccagtgagagaaggcttgatgtgtataaaagacgtgatgtgcaccacctcgatctcggtgtttcaggcactaaagcaacaaaacaacccatagtatctcattttgtcatcagatccagaagaaatatcctggttttccagcatgtttacccacatgttttgggcatggataaagtgaagaggcctactcaccattatccctgcagcgtgacaccttttgattgtcactgaccactcagaaggggccacggcctcctggctgtgttcctgagcccccgtcgtgcctctcccagacagcagctgtctggcccttgctgggtgagggcacaccactgccaggggtcagcctcgcacccaggccaggcagaagctgtgctctgaagctaggacagctggctgagaagtgggttcaggcgaagggtgaagccatgtgtagcagttcctgccagtgcagatctggagaggagctggcccggaaggcgtggttgtgaaagcgcccttcttatgttaggaggccttggcaaaattggatttcttcaaaaatacatgtaaaggtctgttgttgaattgtactctgcccctggaagcagatacagatggctgcctgctgctcggctttgcttttgcttttcccaccgtgttttcatctttgttcacttgaggctttccccagctggtgtgtgcaggacagttcatggtaatgttgccctctgaggccccgtacaccagaagggaggccctggaaaattttgtgcttccaacgtggccttcaattcttgcttttttgcccctcggaagcatggggcttttgagcacacttaaaaaaagaaaaatctgtaacttggtgcttattgatgaattgcaagctggccttgcagatggagatatttatctttcagtttatttgaaagaggtctggtttaaaatttgtagcctacatttgttttatttattgtatttgtgtgtttgtgtttgtttttttttaagggtgagccaggtctagcccaacagtctaaactatccagtcaataccgagtgaagtggcagccagcactgttcactctgtgtcttttgaagtgccttgaaggcccagatgaaattttaaagggagggggtccatgtccttccctcccccaccccgcctcattctttaatcaaaggatgtcttctcccttgtttgagaatgaagaaactcgccacctctgacctacctttgcctttttctgtcatggagaatactcacccttcagaaacagaccaaaggccaaaacctgctgatttttctattgaaaatatgtccccttgcaaagaccctaaacaaaaagttaagtttctttctttcacctatttgtacaactccaagttacagctgaatctgtcgtgactttcctgagatctacccggggcttggctgtctgttctgggcactggctccgagttcccctcctgggatttgcaggagggcagtactgaacctgcattcttctccttgtaaatgtaggccgggtgcccctgttctccgggtttggaacaatacgaggttggtgctgatgggatttacttgcgtacgtgctcttcacaaaaacaccgtggatgctgaagttagagcacgtcgccacagagcttgacatcaatgttagagggtctcttactccccgcccagctgtgatgtttcatctgctttggttgttttggtggtcttttttaaaaatagagatttcacatctgcccagaccccactcaaaacgatttggtcaggttctggttggacaagtttaaaatcaaagtagtgcccggaattccctcaaaccacccaacttcatccaggaatacagtctgcagtgcagcaacagaaccgcttaccaagaactgtgcttacatacctttgtcatctctcttccccccttggaagttgtcctcagggggatttgttcctgtcctggggatttacctgggatggtggctgcctgtgcttttgctcatggccttgacagtgctctagttgctggatctaatggcctgtcttggtttctatcacatgagaaggggttgtttttttggggtgactcggactgaattccccatactgtt

SEQ ID NO: 361994 - DNA, 5913 bp, Homo sapiens
cagtcttcatcccatcagacaaagtggtgaagaaagggaagaaggacaagaagatcaaaaaacgttctttgaagagctggcagtagaagataaacaggctgatgggagaagatgcgcatcttctcccatcagctgtagccagtgtatgaagcccttcaccaacaaagatgcctatacttgtgcaaattgcagtgcttttgtccacaaaggctgccgagaaagtctagcctcctgtgcaaaggtcaaaatgaagcagcccaaagggagccttcaggcacatgacacatcatcactgcccacggtcattatgagaaacaagccctcacagcccaaggagcgtcctcggtccgcagtcctcctggtggatgaaaccgctaccaccccaatatttgccaatagacgatcccagcagagtgtctcgctctccaaaagtgtctccatacagaacattactggagttggcaatgatgagaacatgtcaaacacctggaaattcctgtctcattcaacagactcactaaataaaatcagcaaggtcaatgagtcaacagaatcacttactgatgagggagggtacagacatgaatgaaggacaactactgggagactttgagattgagtccaaacagctggaagcagagtcttggagtcggataatagacagcaagtttctaaaacagcaaaagaaagatgtggtcaaacggcaagaagtaatatatgagttgatgcagacagagtttcatcatgtccgcactctcaagatcatgagtggtgtgtacagccaggggatgatggcggatctgctttttgagcagcagatggtagaaaagctgttcccctgtttggatgagctgatcagtatccatagccaattcttccagaggattctggagcggaagaaggagtctctggtggataaaagtgaaaagaactttctcatcaagaggataggggatgtgcttgtaaatcagttttcaggtgagaatgcagaacgtttaaagaagacatatggcaagttttgtgggcaacataaccagtctgtaaactacttcaaagacctttatgccaaggataagcgttttcaagcctttgtaaagaagaagatgagcagttcagttgttagaaggcttggaattccagagtgcatattgcttgtaactcagcggattaccaagtacccagttttattccaaagaatattgcagtgtaccaaagacaatgaagtggagcaggaagatctagcacagtccttgagcctggtgaaggatgtgattggagctgtagacagcaaagtggcaagttatgaaaagaaagtgcgtctcaatgagatttatacaaagacagatagcaagtcaatcatgaggatgaagagtggtcagatgtttgccaaggaagatttgaaacggaagaagcttgtacgtgatgggagtgtgtttctgaagaatgcagcaggaaggttgaaagaggttcaagcagttcttctcactgacattttagttttccttcaagaaaaagaccagaagtacatctttgcatcattggaccagaagtcaacagtgatctctttaaagaagctgattgtgagagaagtggcacatgaggagaaaggtttattcctgatcagcatggggatgacagatccagagatggtagaagtccatgccagctccaaagaggaacgaaacagctggattcagatcattcaggacacaatcaacaccctgaacagagatgaagatgaaggaattcctagtgagaatgaggaagaaaagaaaatgttggacaccagagcccgagaattaaaagaacaacttcaccagaaggaccaaaaaatcctactcttgttggaagagaaggagatgattttccgggacatggctgagtgcagcacccctctcccagaggattgctccccaacacatagccctagagttctcttccgctccaacacagaagaggctctcaaaggaggacctttaatgaaaagtgcaataaatgaggtggagatccttcagggtttggtgagtggaaatctgggaggcacacttgggccgactgtcagcagccccattgagcaagatgtggtcggtcccgtttccctgccccggagagcagagacctttggaggatttgacagccatcagatgaatgcttcaaaaggaggcgagaaggaagagggagatgatggccaagatcttaggagaacggaatcagatagtggcctaaaaaagggtggaaatgctaacctggtatttatgcttaaaagaaacagtgagcaggttgtccagagcgttgttcatctctacgagctcctcagcgctctgcagggtgtggtgctgcagcaggacagctacattgaggaccagaaactggtgctgagcgagagggcgctcactcgcagcttgtcccgcccgagctccctcattgagcaggagaagcagcgcagcctggagaagcagcgccaggacctggccaacctgcagaagcagcaggcccagtacctcgaggagaagcgcaggcgcgagcgtgagtgggaagctcgtgagagggagctgcgggagcgggaggccctcctggcccagcgcgaggaggaggtgcagcaggggcagcaggacctggaaaaggagcgggaggagctccagcagaagaagggcacataccagtatgacctggagcgactgcgtgctgcccagaaacagcttgagagggaacaggagcagctgcgccgggaggcagagcggctcagccagcggcagacagaacgggacctgtgtcaggtttcccatccacataccaagctgatgaggatcccatcgttcttccccagtcctgaggagcccccctcgccatctgcaccttccatagccaaatcagggtcattggactcagaactttcagtgtccccaaaaaggaacagcatctctcggacacacaaagataaggggccttttcacatactgagttcaaccagccagacaaacaaaggaccagaagggcagagccaggcccctgcgtccacctctgcctctacccgcctgtttgggttaacaaagccaaaggaaaagaaggagaaaaaaaagaagaacaaaaccagccgctctcagcccggtgatggtcccgcgtcagaagtatcagcagagggtgaagagatcttctgctgaccctcttcctctctgctgaggcagctgcctcctgatcctggccagcccacctctcctgctgtccccgcgtgcacaagtctcttacactggacgcccactgctcctcagcgtccagtcctcctgggcggccccaggtcctggacaataagcaacagatgatattgagtgtcgggtggggaaggaggcccagactctgcttcggccatgatttgtgactgcccaggactctcaggttgggctggccctactcaggattacactgaaagtaatggcctcgtaagtacaggtgatggttttggacacgtcaggaattcctaaaggctgaaagagtgtatccaagtaaggtctgaacctccgactgccttttatttgggggaacacaaaaccaaacagcagatgttttggacttgatctgtgtacgtacatggggacctgtctgcatatacacacggggaatgccagaagaaggcccagtctgcaccaggcgtctggtcaacttagcacaagggcagtgcctggacggacccggagcccccgcatatcagcagttcacccagtactcctcagagactggtttccctctaaacccatcccgggcacataccacccctgttttgcatgtatttctcatttcattttagggatgacaaacatttgtgaaaccagtgagagaaggcttgatgtgtataaaagacgtgatgtgcaccacctcgatctcggtgtttcaggcactaaagcaacaaaacaacccatagtatctcattttgtcatcagatccagaagaaatatcctggttttccagcatgtttacccacatgttttgggcatggataaagtgaagaggcctactcaccattatccctgcagcgtgacaccttttgattgtcactgaccactcagaaggggccacggcctcctggctgtgttcctgagcccccgtcgtgcctctcccagacagcagctgtctggcccttgctgggtgagggcacaccactgccaggggtcagcctcgcacccaggccaggcagaagctgtgctctgaagctaggacagctggctgagaagtgggttcaggcgaagggtgaagccatgtgtagcagttcctgccagtgcagatctggagaggagctggcccggaaggcgtggttgtgaaagcgcccttcttatgttaggaggccttggcaaaattggatttcttcaaaaatacatgtaaaggtctgttgttgaattgtactctgcccctggaagcagatacagatggctgcctgctgctcggctttgcttttgcttttcccaccgtgttttcatctttgttcacttgaggctttccccagctggtgtgtgcaggacagttcatggtaatgttgccctctgaggccccgtacaccagaagggaggccctggaaaattttgtgcttccaacgtggccttcaattcttgcttttttgcccctcggaagcatggggcttttgagcacacttaaaaaaagaaaaatctgtaacttggtgcttattgatgaattgcaagctggccttgcagatggagatatttatctttcagtttatttgaaagaggtctggtttaaaatttgtagcctacatttgttttatttattgtatttgtgtgtttgtgtttgtttttttttaagggtgagccaggtctagcccaacagtctaaactatccagtcaataccgagtgaagtggcagccagcactgttcactctgtgtcttttgaagtgccttgaaggcccagatgaaattttaaagggagggggtccatgtccttccctcccccaccccgcctcattctttaatcaaaggatgtcttctcccttgtttgagaatgaagaaactcgccacctctgacctacctttgcctttttctgtcatggagaatactcacccttcagaaacagaccaaaggccaaaacctgctgatttttctattgaaaatatgtccccttgcaaagaccctaaacaaaaagttaagtttctttctttcacctatttgtacaactccaagttacagctgaatctgtcgtgactttcctgagatctacccggggcttggctgtctgttctgggcactggctccgagttcccctcctgggatttgcaggagggcagtactgaacctgcattcttctccttgtaaatgtaggccgggtgcccctgttctccgggtttggaacaatacgaggttggtgctgatgggatttacttgcgtacgtgctcttcacaaaaacaccgtggatgctgaagttagagcacgtcgccacagagcttgacatcaatgttagagggtctcttactccccgcccagctgtgatgtttcatctgctttggttgttttggtggtcttttttaaaaatagagatttcacatctgcccagaccccactcaaaacgatttggtcaggttctggttggacaagtttaaaatcaaagtagtgcccggaattccctcaaaccacccaacttcatccaggaatacagtctgcagtgcagcaacagaaccgcttaccaagaactgtgcttacatacctttgtcatctctcttccccccttggaagttgtcctcagggggatttgttcctgtcctggggatttacctgggatggtggctgcctgtgcttttgctcatggccttgacagtgctctagttgctggatctaatggcctgtcttggtttctatcacatgagaaggggttgtttttttggggtgactcggactgaattccccatactgtt

SEQ ID NO: 361995 - DNA, 7273 bp, Homo sapiens
agcgggaagcgcctgtgctctgccgagactgccgtgcccattgctcgcctcggtcgccgccgctttagcccgcctccgggggagcggccgcctattgtctttctccgcggcgaaggtgaagagttgtcccagctcggcccgcgggggagccccgggagccgcacgtgtcctgggtcatgaaacttaatccacagcaagctcccttatatggtgattgtgttgttacagtgctgcttgctgaagaggacaaagctgaagatgatgtagtgttttacttggtatttttgggttccaccctccgtcactgtacaagtactcggaaggtcagttctgatacattggagaccattgctcctggtcatgattgttgtgaaacagtgaaggtgcagctctgtgcttccaaagagggccttcccgtgtttgtggtggctgaagaagactttcatttcgtccaggatgaagcgtatgatgcagctcaattcctagcaaccagtgctggaaatcagcaggctttgaactttacccgttttcttgaccagtcaggacccccatctggggatgtgaattcccttgataagaagttggtgctggcattcaggcacctgaagctgcccacggagtggaatgtattggggacagatcagagtttgcatgatgctggcccgcgagagacattgatgcattttgctgtgcggctgggactgctgaggttgacgtggttcctgttgcagaagccaggtggccgcggagctctcagtatccacaaccaggaaggggcgacgcctgtgagcttggccttggagcgaggctatcacaagctgcaccagcttctaaccgaggagaatgctggagaaccagactcctggagcagtttatcctatgaaataccgtatggagactgttctgtgaggcatcatcgagagttggacatctatacattaacctctgagtctgattcacatcatgaacacccatttcctggagacggttgcactggaccaatttttaaacttatgaacatccaacagcaactaatgaaaacaaacctcaagcagatggacagtcttatgcccttaatgatgacagcacaggatccttccagtgccccagagacagatggccagtttcttccctgtgcaccggagcccacggaccctcagcgactttcttcttctgaagagactgagagcactcagtgctgcccagggagccctgttgcacagactgaaagtccctgtgatttgtcaagcatagttgaggaggagaatacagaccgttcctgtaggaagaaaaataaaggcgtggaaagaaaaggggaagaggtggagccagcacctattgtggactctggaactgtatctgatcaagacagctgccttcagagcttgcctgattgtggagtaaagggcacggaaggcctttcgtcctgtggaaacagaaatgaagaaactggaacaaaatcttctggaatgcccacagaccaggagtccctgagcagtggagatgctgtgcttcagagagacttggtcatggagccaggcacagcccagtattcctctggaggtgaactgggaggcatttcaacaacaaatgtcagtaccccagacactgcaggggaaatggaacatgggctcatgaacccagatgccactgtttggaagaatgtgcttcagggaggggaaagtacaaaggaaagatttgagaactctaatattggcacagctggagcctctgacgtgcacgtcacaagtaagcctgtggataaaatcagtgttccaaactgtgcccctgccgccagttccctggatggtaacaaacctgctgagtcttcacttgcatttagtaatgaagaaacctccactgaaaaaacagcagaaacggaaacttcacgaagtcgtgaggagagtgctgatgctccagtagatcagaattctgtggtgattccagctgctgcaaaagacaagatttcagatggattagaaccttatactctcttagcagcaggcataggtgaggcaatgtcaccctcagatttagcccttcttgggctggaagaagatgtaatgccacaccagaactcagaaacaaattcatctcatgctcaaagccaaaagggcaaatcctcacccatttgttctacaactggagacgataaactttgtgcagactctgcatgtcaacagaacacagtgacttctagtggcgatttggttgcaaaactgtgtgataacatagttagcgagtccgaaagcaccacagcaaggcaacccagctcacaagatccacccgatgcctcccactgtgaagacccacaggctcatacagtcacctctgaccctgtaagggatacccaggaacgtgcggatttttgtcctttcaaagtggtggataacaaaggccaacgaaaagatgtgaaactagataaacctttaacaaatatgcttgaggtggtttcacatccacatccagttgtccctaaaatggagaaagaactggtgccagaccaggcagtaatatcagacagtactttctctctggcaaacagtccaggcagtgaatcagtaaccaaggatgacgcactttcttttgtcccctcccagaaagaaaagggaacagcaactcctgaactacatacagctacagattatagagatggcccagatggaaattcgaatgagcctgatacgcggccactagaagacagggcagcaggcctgtccacatcctccactgctgcagagcttcagcacgggatggggaataccagtctcacaggacttggtggagagcatgagggtcctgcccctccagcaatcccagaagctctgaatatcaaggggaacactgactcttccctgcaaagtatgggtaaggccactttggctttagattcagttttgactgaagaaggaaaacttctggtggtttcagaaagctctgcagctcaggaacaagataaggataaagcggtgacctgttcctctattaaggaaaatgctctctcttcaggaactttgcaggaagagcagagaacaccacctcctggacaagatactcaacaatttcatgaaaaatcaatctcagctgactgtgccaaggacaaagcacttcagctaagtaattcaccgggtgcatcctctgcctttcttaaggcagaaactgaacataacaaggaagtggccccacaagtctcactgctgactcaaggtggggctgcccagagcctggtgccaccaggagcaagtctggccacagagtcaaggcaggaagccttgggggcagagcacaacagctctgctctgttgccatgtctgttgccagatgggtctgatgggtccgatgctcttaactgcagtcaggcttctcctctggatgttggagtgaagaacactcaatcccagggaaaaactagtgcctgtgaggtgagtggaaatgtgacggtggatgttacaggggttaatgctctacaaggtatggctgagcccagaagagagaatatatcacacaacacccaagacatcctgattccaaacgtcttgttgagccaagagaagaatgccgttctaggtttgccagtggctctacaggacaaagctgtgactgacccacagggagttggaaccccagagatgatacctcttgattgggagaaagggaagctggagggagcagaccacagctgtaccatgggtgacgctgaggaagcccaaatagacgatgaagcacatcctgtcctactgcagcctgttgccaaggagctccccacagacatggagctctcagcccatgatgatggggccccagctggtgtgagggaagtcacgcgagccccgccttcaggcagagaaaggagcactccctctctaccttgcatggtctctgcccaggacgcacctctgcctaagggagcagacttgatagaggaggctgccagccgtatagtggatgctgtcatcgaacaagtcaaggccgctggagcactgcttactgagggggaggcctgtcacatgtcactgtccagccctgagttgggtcctctcactaaaggactagagagtgcttttacagaaaaagtgagtactttcccacctggggagagcctaccaatgggcagtactcctgaggaagccacggggagccttgcaggatgttttgctggaagggaggagccagagaagatcattttacctgtccaggggcctgagccagcagcagaaatgccagacgtgaaagctgaagatgaagtggattttagagcaagttcaatttctgaagaagtggctgtagggagcatagctgctacactgaagatgaagcaaggcccaatgacccaggcgataaaccgagaaaactggtgtacaatagagccatgccctgatgcagcatctcttctggcttccaagcagagcccagaatgtgagaacttcctggatgttggactgggcagagagtgtacctcaaaacaaggtgtacttaaaagagaatctgggagtgattctgacctctttcactcacccagtgatgacatggacagcatcatcttcccaaagccagaggaagagcatttggcctgtgatatcaccggatccagttcatccaccgatgacacggcttcactggaccgacattcttctcatggcagtgatgtgtctctctcccagattttaaagccaaacaggtcaagagatcggcaaagccttgatggattctacagccatgggatgggagctgagggtcgagaaagtgagagtgagcctgctgacccaggcgacgtggaggaggaggagatggacagtatcactgaagtgcctgcaaactgctctgtcctaaggagctccatgcgctctctttctcccttccggaggcacagctgggggcctgggaaaaatgcagccagcgatgcagaaatgaaccaccggagttcaatgcgagttcttggggatgttgtcaggagacctcccattcataggagaagtttcagtctagaaggcttgacaggaggagctggtgtcggaaacaagccatcctcatctctagaagtaagctctgcaaatgccgaagagctcagacacccattcagtggtgaggaacgggttgactctttggtgtcactttcagaagaggatctggagtcagaccagagagaacataggatgtttgatcagcagatatgtcacagatctaagcagcagggatttaattactgtacatcagccatttcctctccattgacaaaatccatctcattaatgacaatcagccatcctggattggacaattcacggcccttccacagtaccttccacaataccagtgctaatctgactgagagtataacagaagagaactataatttcctgccacatagcccctccaagaaagattctgaatggaagagtggaacaaaagtcagtcgtacattcagctacatcaagaataaaatgtctagcagcaagaagagcaaagaaaaggaaaaagaaaaagataagattaaggagaaggagaaagattctaaagacaaggagaaagataagaagactgtcaacgggcacactttcagttccattcctgttgtgggtcccatcagctgtagccagtgtatgaagcccttcaccaacaaagatgcctatacttgtgcaaattgcagtgcttttgtccacaaaggctgccgagaaagtctagcctcctgtgcaaaggtcaaaatgaagcagcccaaagggagccttcaggcacatgacacatcatcactgcccacggtcattatgagaaacaagccctcacagcccaaggagcgtcctcggtccgcagtcctcctggtggatgaaaccgctaccaccccaatatttgccaatagacgatcccagcagagtgtctcgctctccaaaagtgtctccatacagaacattactggagttggcaatgatgagaacatgtcaaacacctggaaattcctgtctcattcaacagactcactaaataaaatcagcaaggtcaatgagtcaacagaatcacttactgatgagggagggtacagacatgaatgaaggacaactactgggagactttgagattgagtccaaacagctggaagcagagtcttggagtcggataatagacagcaagtttctaaaacagcaaaagaaagatgtggtcaaacggcaagaagtaatatatgagttgatgcagacagagtttcatcatgtccgcactctcaagatcatgagtggtgtgtacagccaggggatgatggcggatctgctttttgagcagcagatggtagaaaagctgttcccctgtttggatgagctgatcagtatccatagccaattcttccagaggattctggagcggaagaaggagtctctggtggataaaagtgaaaagaactttctcatcaagaggataggggatgtgcttgtaaatcagttttcaggtgagaatgcagaacgtttaaagaagacatatggcaagttttgtgggcaacataaccagtctgtaaactacttcaaagacctttatgccaaggataagcgttttcaagcctttgtaaagaagaagatgagcagttcagttgttagaaggcttggaattccagagtgcatattgcttgtaactcagcggattaccaagtacccagttttattccaaagaatattgcagtgtaccaaagacaatgaagtggagcaggaagatctagcacagtccttgagcctggtgaaggatgtgattggagctgtagacagcaaagtggcaagttatgaaaagaaagtgcgtctcaatgagatttatacaaagacagatagcaagtcaatcatgaggatgaagagtggtcagatgtttgccaaggaagatttgaaacggaagaagcttgtacgtgatgggagtgtgtttctgaagaatgcagcaggaaggttgaaagaggttcaagcagttcttctcactgacattttagttttccttcaagaaaaagaccagaagtacatctttgcatcattggaccagaagtcaacagtgatctctttaaagaagctgattgtgagagaagtggcacatgaggagaaaggtttattcctgatcagcatggggatgacagatccagagatggtagaagtccatgccagctccaaagaggaacgaaacagctggattcagatcattcaggacacaatcaacaccctgaacagagatgaagatgaaggaattcctagtgagaatgaggaagaaaagaaaatgttggacacgcatagggtccgagctcgattcgtatcatgta

SEQ ID NO: 361996 - DNA, 5396 bp, Homo sapiens
  misc_feature (41)..(41): n is a, c, g, or t
tctccgcccaaaactaggctaggtagcgaggcccggtgttntgagggagtaggagggtacagacatgaatgaaggacaactactgggagactttgagattgagtccaaacagctggaagcagagtcttggagtcggataatagacagcaagtttctaaaacagcaaaagaaagatgtggtcaaacggcaagaagtaatatatgagttgatgcagacagagtttcatcatgtccgcactctcaagatcatgagtggtgtgtacagccaggggatgatggcggatctgctttttgagcagcagatggtagaaaagctgttcccctgtttggatgagctgatcagtatccatagccaattcttccagaggattctggagcggaagaaggagtctctggtggataaaagtgaaaagaactttctcatcaagaggataggggatgtgcttgtaaatcagttttcaggtgagaatgcagaacgtttaaagaagacatatggcaagttttgtgggcaacataaccagtctgtaaactacttcaaagacctttatgccaaggataagcgttttcaagcctttgtaaagaagaagatgagcagttcagttgttagaaggcttggaattccagagtgcatattgcttgtaactcagcggattaccaagtacccagttttattccaaagaatattgcagtgtaccaaagacaatgaagtggagcaggaagatctagcacagtccttgagcctggtgaaggatgtgattggagctgtagacagcaaagtggcaagttatgaaaagaaagtgcgtctcaatgagatttatacaaagacagatagcaagtcaatcatgaggatgaagagtggtcagatgtttgccaaggaagatttgaaacggaagaagcttgtacgtgatgggagtgtgtttctgaagaatgcagcaggaaggttgaaagaggttcaagcagttcttctcactgacattttagttttccttcaagaaaaagaccagaagtacatctttgcatcattggaccagaagtcaacagtgatctctttaaagaagctgattgtgagagaagtggcacatgaggagaaaggtttattcctgatcagcatggggatgacagatccagagatggtagaagtccatgccagctccaaagaggaacgaaacagctggattcagatcattcaggacacaatcaacaccctgaacagagatgaagatgaaggaattcctagtgagaatgaggaagaaaagaaaatgttggacaccagagcccgagaattaaaagaacaacttcaccagaaggaccaaaaaatcctactcttgttggaagagaaggagatgattttccgggacatggctgagtgcagcacccctctcccagaggattgctccccaacacatagccctagagttctcttccgctccaacacagaagaggctctcaaaggaggacctttaatgaaaagtgcaataaatgaggtggagatccttcagggtttggtgagtggaaatctgggaggcacacttgggccgactgtcagcagccccattgagcaagatgtggtcggtcccgtttccctgccccggagagcagagacctttggaggatttgacagccatcagatgaatgcttcaaaaggaggcgagaaggaagagggagatgatggccaagatcttaggagaacggaatcagatagtggcctaaaaaagggtggaaatgctaacctggtatttatgcttaaaagaaacagtgagcaggttgtccagagcgttgttcatctctacgagctcctcagcgctctgcagggtgtggtgctgcagcaggacagctacattgaggaccagaaactggtgctgagcgagagggcgctcactcgcagcttgtcccgcccgagctccctcattgagcaggagaagcagcgcagcctggagaagcagcgccaggacctggccaacctgcagaagcagcaggcccagtacctcgaggagaagcgcaggcgcgagcgtgagtgggaagctcgtgagagggagctgcgggagcgggaggccctcctggcccagcgcgaggaggaggtgcagcaggggcagcaggacctggaaaaggagcgggaggagctccagcagaagaagggcacataccagtatgacctggagcgactgcgtgctgcccagaaacagcttgagagggaacaggagcagctgcgccgggaggcagagcggctcagccagcggcagacagaacgggacctgtgtcaggtttcccatccacataccaagctgatgaggatcccatcgttcttccccagtcctgaggagcccccctcgccatctgcaccttccatagccaaatcagggtcattggactcagaactttcagtgtccccaaaaaggaacagcatctctcggacacacaaagataaggggccttttcacatactgagttcaaccagccagacaaacaaaggaccagaagggcagagccaggcccctgcgtccacctctgcctctacccgcctgtttgggttaacaaagccaaaggaaaagaaggagaaaaaaaagaagaacaaaaccagccgctctcagcccggtgatggtcccgcgtcagaagtatcagcagagggtgaagagatcttctgctgaccctcttcctctctgctgaggcagctgcctcctgatcctggccagcccacctctcctgctgtccccgcgtgcacaagtctcttacactggacgcccactgctcctcagcgtccagtcctcctgggcggccccaggtcctggacaataagcaacagatgatattgagtgtcgggtggggaaggaggcccagactctgcttcggccatgatttgtgactgcccaggactctcaggttgggctggccctactcaggattacactgaaagtaatggcctcgtaagtacaggtgatggttttggacacgtcaggaattcctaaaggctgaaagagtgtatccaagtaaggtctgaacctccgactgccttttatttgggggaacacaaaaccaaacagcagatgttttggacttgatctgtgtacgtacatggggacctgtctgcatatacacacggggaatgccagaagaaggcccagtctgcaccaggcgtctggtcaacttagcacaagggcagtgcctggacggacccggagcccccgcatatcagcagttcacccagtactcctcagagactggtttccctctaaacccatcccgggcacataccacccctgttttgcatgtatttctcatttcattttagggatgacaaacatttgtgaaaccagtgagagaaggcttgatgtgtataaaagacgtgatgtgcaccacctcgatctcggtgtttcaggcactaaagcaacaaaacaacccatagtatctcattttgtcatcagatccagaagaaatatcctggttttccagcatgtttacccacatgttttgggcatggataaagtgaagaggcctactcaccattatccctgcagcgtgacaccttttgattgtcactgaccactcagaaggggccacggcctcctggctgtgttcctgagcccccgtcgtgcctctcccagacagcagctgtctggcccttgctgggtgagggcacaccactgccaggggtcagcctcgcacccaggccaggcagaagctgtgctctgaagctaggacagctggctgagaagtgggttcaggcgaagggtgaagccatgtgtagcagttcctgccagtgcagatctggagaggagctggcccggaaggcgtggttgtgaaagcgcccttcttatgttaggaggccttggcaaaattggatttcttcaaaaatacatgtaaaggtctgttgttgaattgtactctgcccctggaagcagatacagatggctgcctgctgctcggctttgcttttgcttttcccaccgtgttttcatctttgttcacttgaggctttccccagctggtgtgtgcaggacagttcatggtaatgttgccctctgaggccccgtacaccagaagggaggccctggaaaattttgtgcttccaacgtggccttcaattcttgcttttttgcccctcggaagcatggggcttttgagcacacttaaaaaaagaaaaatctgtaacttggtgcttattgatgaattgcaagctggccttgcagatggagatatttatctttcagtttatttgaaagaggtctggtttaaaatttgtagcctacatttgttttatttattgtatttgtgtgtttgtgtttgtttttttttaagggtgagccaggtctagcccaacagtctaaactatccagtcaataccgagtgaagtggcagccagcactgttcactctgtgtcttttgaagtgccttgaaggcccagatgaaattttaaagggagggggtccatgtccttccctcccccaccccgcctcattctttaatcaaaggatgtcttctcccttgtttgagaatgaagaaactcgccacctctgacctacctttgcctttttctgtcatggagaatactcacccttcagaaacagaccaaaggccaaaacctgctgatttttctattgaaaatatgtccccttgcaaagaccctaaacaaaaagttaagtttctttctttcacctatttgtacaactccaagttacagctgaatctgtcgtgactttcctgagatctacccggggcttggctgtctgttctgggcactggctccgagttcccctcctgggatttgcaggagggcagtactgaacctgcattcttctccttgtaaatgtaggccgggtgcccctgttctccgggtttggaacaatacgaggttggtgctgatgggatttacttgcgtacgtgctcttcacaaaaacaccgtggatgctgaagttagagcacgtcgccacagagcttgacatcaatgttagagggtctcttactccccgcccagctgtgatgtttcatctgctttggttgttttggtggtcttttttaaaaatagagatttcacatctgcccagaccccactcaaaacgatttggtcaggttctggttggacaagtttaaaatcaaagtagtgcccggaattccctcaaaccacccaacttcatccaggaatacagtctgcagtgcagcaacagaaccgcttaccaagaactgtgcttacatacctttgtcatctctcttccccccttggaagttgtcctcagggggatttgttcctgtcctggggatttacctgggatggtggctgcctgtgcttttgctcatggccttgacagtgctctagttgctggatctaatggcctgtcttggtttctatcacatgagaaggggttgtttttttggggtgactcggactgaattccccatactgtt

SEQ ID NO: 361997 - DNA, 4744 bp, Homo sapiens
agctacatgatacgactcgagctggtaccctatgcgtgtacaacagacaatgaagtggagcaggaagatctagcacagtccttgagcctggtgaaggatgtgattggagctgtagacagcaaagtggcaagttatgaaaagaaagtgcgtctcaatgagatttatacaaagacagatagcaagtcaatcatgaggatgaagagtggtcagatgtttgccaaggaagatttgaaacggaagaagcttgtacgtgatgggagtgtgtttctgaagaatgcagcaggaaggttgaaagaggttcaagcagttcttctcactgacattttagttttccttcaagaaaaagaccagaagtacatctttgcatcattggaccagaagtcaacagtgatctctttaaagaagctgattgtgagagaagtggcacatgaggagaaaggtttattcctgatcagcatggggatgacagatccagagatggtagaagtccatgccagctccaaagaggaacgaaacagctggattcagatcattcaggacacaatcaacaccctgaacagagatgaagatgaaggaattcctagtgagaatgaggaagaaaagaaaatgttggacaccagagcccgagaattaaaagaacaacttcaccagaaggaccaaaaaatcctactcttgttggaagagaaggagatgattttccgggacatggctgagtgcagcacccctctcccagaggattgctccccaacacatagccctagagttctcttccgctccaacacagaagaggctctcaaaggaggacctttaatgaaaagtgcaataaatgaggtggagatccttcagggtttggtgagtggaaatctgggaggcacacttgggccgactgtcagcagccccattgagcaagatgtggtcggtcccgtttccctgccccggagagcagagacctttggaggatttgacagccatcagatgaatgcttcaaaaggaggcgagaaggaagagggagatgatggccaagatcttaggagaacggaatcagatagtggcctaaaaaagggtggaaatgctaacctggtatttatgcttaaaagaaacagtgagcaggttgtccagagcgttgttcatctctacgagctcctcagcgctctgcagggtgtggtgctgcagcaggacagctacattgaggaccagaaactggtgctgagcgagagggcgctcactcgcagcttgtcccgcccgagctccctcattgagcaggagaagcagcgcagcctggagaagcagcgccaggacctggccaacctgcagaagcagcaggcccagtacctcgaggagaagcgcaggcgcgagcgtgagtgggaagctcgtgagagggagctgcgggagcgggaggccctcctggcccagcgcgaggaggaggtgcagcaggggcagcaggacctggaaaaggagcgggaggagctccagcagaagaagggcacataccagtatgacctggagcgactgcgtgctgcccagaaacagcttgagagggaacaggagcagctgcgccgggaggcagagcggctcagccagcggcagacagaacgggacctgtgtcaggtttcccatccacataccaagctgatgaggatcccatcgttcttccccagtcctgaggagcccccctcgccatctgcaccttccatagccaaatcagggtcattggactcagaactttcagtgtccccaaaaaggaacagcatctctcggacacacaaagataaggggccttttcacatactgagttcaaccagccagacaaacaaaggaccagaagggcagagccaggcccctgcgtccacctctgcctctacccgcctgtttgggttaacaaagccaaaggaaaagaaggagaaaaaaaagaagaacaaaaccagccgctctcagcccggtgatggtcccgcgtcagaagtatcagcagagggtgaagagatcttctgctgaccctcttcctctctgctgaggcagctgcctcctgatcctggccagcccacctctcctgctgtccccgcgtgcacaagtctcttacactggacgcccactgctcctcagcgtccagtcctcctgggcggccccaggtcctggacaataagcaacagatgatattgagtgtcgggtggggaaggaggcccagactctgcttcggccatgatttgtgactgcccaggactctcaggttgggctggccctactcaggattacactgaaagtaatggcctcgtaagtacaggtgatggttttggacacgtcaggaattcctaaaggctgaaagagtgtatccaagtaaggtctgaacctccgactgccttttatttgggggaacacaaaaccaaacagcagatgttttggacttgatctgtgtacgtacatggggacctgtctgcatatacacacggggaatgccagaagaaggcccagtctgcaccaggcgtctggtcaacttagcacaagggcagtgcctggacggacccggagcccccgcatatcagcagttcacccagtactcctcagagactggtttccctctaaacccatcccgggcacataccacccctgttttgcatgtatttctcatttcattttagggatgacaaacatttgtgaaaccagtgagagaaggcttgatgtgtataaaagacgtgatgtgcaccacctcgatctcggtgtttcaggcactaaagcaacaaaacaacccatagtatctcattttgtcatcagatccagaagaaatatcctggttttccagcatgtttacccacatgttttgggcatggataaagtgaagaggcctactcaccattatccctgcagcgtgacaccttttgattgtcactgaccactcagaaggggccacggcctcctggctgtgttcctgagcccccgtcgtgcctctcccagacagcagctgtctggcccttgctgggtgagggcacaccactgccaggggtcagcctcgcacccaggccaggcagaagctgtgctctgaagctaggacagctggctgagaagtgggttcaggcgaagggtgaagccatgtgtagcagttcctgccagtgcagatctggagaggagctggcccggaaggcgtggttgtgaaagcgcccttcttatgttaggaggccttggcaaaattggatttcttcaaaaatacatgtaaaggtctgttgttgaattgtactctgcccctggaagcagatacagatggctgcctgctgctcggctttgcttttgcttttcccaccgtgttttcatctttgttcacttgaggctttccccagctggtgtgtgcaggacagttcatggtaatgttgccctctgaggccccgtacaccagaagggaggccctggaaaattttgtgcttccaacgtggccttcaattcttgcttttttgcccctcggaagcatggggcttttgagcacacttaaaaaaagaaaaatctgtaacttggtgcttattgatgaattgcaagctggccttgcagatggagatatttatctttcagtttatttgaaagaggtctggtttaaaatttgtagcctacatttgttttatttattgtatttgtgtgtttgtgtttgtttttttttaagggtgagccaggtctagcccaacagtctaaactatccagtcaataccgagtgaagtggcagccagcactgttcactctgtgtcttttgaagtgccttgaaggcccagatgaaattttaaagggagggggtccatgtccttccctcccccaccccgcctcattctttaatcaaaggatgtcttctcccttgtttgagaatgaagaaactcgccacctctgacctacctttgcctttttctgtcatggagaatactcacccttcagaaacagaccaaaggccaaaacctgctgatttttctattgaaaatatgtccccttgcaaagaccctaaacaaaaagttaagtttctttctttcacctatttgtacaactccaagttacagctgaatctgtcgtgactttcctgagatctacccggggcttggctgtctgttctgggcactggctccgagttcccctcctgggatttgcaggagggcagtactgaacctgcattcttctccttgtaaatgtaggccgggtgcccctgttctccgggtttggaacaatacgaggttggtgctgatgggatttacttgcgtacgtgctcttcacaaaaacaccgtggatgctgaagttagagcacgtcgccacagagcttgacatcaatgttagagggtctcttactccccgcccagctgtgatgtttcatctgctttggttgttttggtggtcttttttaaaaatagagatttcacatctgcccagaccccactcaaaacgatttggtcaggttctggttggacaagtttaaaatcaaagtagtgcccggaattccctcaaaccacccaacttcatccaggaatacagtctgcagtgcagcaacagaaccgcttaccaagaactgtgcttacatacctttgtcatctctcttccccccttggaagttgtcctcagggggatttgttcctgtcctggggatttacctgggatggtggctgcctgtgcttttgctcatggccttgacagtgctctagttgctggatctaatggcctgtcttggtttctatcacatgagaaggggttgtttttttggggtgactcggactgaattccccatactgtt

SEQ ID NO: 361998 - DNA, 7152 bp, Homo sapiens
agcgggaagcgcctgtgctctgccgagactgccgtgcccattgctcgcctcggtcgccgccgctttagcccgcctccgggggagcggccgcctattgtctttctccgcggcgaaggtgaagagttgtcccagctcggcccgcgggggagccccgggagccgcacgtgtcctgggtcatgaaacttaatccacagcaagctcccttatatggtgattgtgttgttacagtgctgcttgctgaagaggacaaagctgaagatgatgtagtgttttacttggtatttttgggttccaccctccgtcactgtacaagtactcggaaggtcagttctgatacattggagaccattgctcctggtcatgattgttgtgaaacagtgaaggtgcagctctgtgcttccaaagagggccttcccgtgtttgtggtggctgaagaagactttcatttcgtccaggatgaagcgtatgatgcagctcaattcctagcaaccagtgctggaaatcagcaggctttgaactttacccgttttcttgaccagtcaggacccccatctggggatgtgaattcccttgataagaagttggtgctggcattcaggcacctgaagctgcccacggagtggaatgtattggggacagatcagagtttgcatgatgctggcccgcgagagacattgatgcattttgctgtgcggctgggactgctgaggttgacgtggttcctgttgcagaagccaggtggccgcggagctctcagtatccacaaccaggaaggggcgacgcctgtgagcttggccttggagcgaggctatcacaagctgcaccagcttctaaccgaggagaatgctggagaaccagactcctggagcagtttatcctatgaaataccgtatggagactgttctgtgaggcatcatcgagagttggacatctatacattaacctctgagtctgattcacatcatgaacacccatttcctggagacggttgcactggaccaatttttaaacttatgaacatccaacagcaactaatgaaaacaaacctcaagcagatggacagtcttatgcccttaatgatgacagcacaggatccttccagtgccccagagacagatggccagtttcttccctgtgcaccggagcccacggaccctcagcgactttcttcttctgaagagactgagagcactcagtgctgcccagggagccctgttgcacagactgaaagtccctgtgatttgtcaagcatagttgaggaggagaatacagaccgttcctgtaggaagaaaaataaaggcgtggaaagaaaaggggaagaggtggagccagcacctattgtggactctggaactgtatctgatcaagacagctgccttcagagcttgcctgattgtggagtaaagggcacggaaggcctttcgtcctgtggaaacagaaatgaagaaactggaacaaaatcttctggaatgcccacagaccaggagtccctgagcagtggagatgctgtgcttcagagagacttggtcatggagccaggcacagcccagtattcctctggaggtgaactgggaggcatttcaacaacaaatgtcagtaccccagacactgcaggggaaatggaacatgggctcatgaacccagatgccactgtttggaagaatgtgcttcagggaggggaaagtacaaaggaaagatttgagaactctaatattggcacagctggagcctctgacgtgcacgtcacaagtaagcctgtggataaaatcagtgttccaaactgtgcccctgccgccagttccctggatggtaacaaacctgctgagtcttcacttgcatttagtaatgaagaaacctccactgaaaaaacagcagaaacggaaacttcacgaagtcgtgaggagagtgctgatgctccagtagatcagaattctgtggtgattccagctgctgcaaaagacaagatttcagatggattagaaccttatactctcttagcagcaggcataggtgaggcaatgtcaccctcagatttagcccttcttgggctggaagaagatgtaatgccacaccagaactcagaaacaaattcatctcatgctcaaagccaaaagggcaaatcctcacccatttgttctacaactggagacgataaactttgtgcagactctgcatgtcaacagaacacagtgacttctagtggcgatttggttgcaaaactgtgtgataacatagttagcgagtccgaaagcaccacagcaaggcaacccagctcacaagatccacccgatgcctcccactgtgaagacccacaggctcatacagtcacctctgaccctgtaagggatacccaggaacgtgcggatttttgtcctttcaaagtggtggataacaaaggccaacgaaaagatgtgaaactagataaacctttaacaaatatgcttgaggtggtttcacatccacatccagttgtccctaaaatggagaaagaactggtgccagaccaggcagtaatatcagacagtactttctctctggcaaacagtccaggcagtgaatcagtaaccaaggatgacgcactttcttttgtcccctcccagaaagaaaagggaacagcaactcctgaactacatacagctacagattatagagatggcccagatggaaattcgaatgagcctgatacgcggccactagaagacagggcagcaggcctgtccacatcctccactgctgcagagcttcagcacgggatggggaataccagtctcacaggacttggtggagagcatgagggtcctgcccctccagcaatcccagaagctctgaatatcaaggggaacactgactcttccctgcaaagtatgggtaaggccactttggctttagattcagttttgactgaagaaggaaaacttctggtggtttcagaaagctctgcagctcaggaacaagataaggataaagcggtgacctgttcctctattaaggaaaatgctctctcttcaggaactttgcaggaagagcagagaacaccacctcctggacaagatactcaacaatttcatgaaaaatcaatctcagctgactgtgccaaggacaaagcacttcagctaagtaattcaccgggtgcatcctctgcctttcttaaggcagaaactgaacataacaaggaagtggccccacaagtctcactgctgactcaaggtggggctgcccagagcctggtgccaccaggagcaagtctggccacagagtcaaggcaggaagccttgggggcagagcacaacagctctgctctgttgccatgtctgttgccagatgggtctgatgggtccgatgctcttaactgcagtcaggcttctcctctggatgttggagtgaagaacactcaatcccagggaaaaactagtgcctgtgaggtgagtggaaatgtgacggtggatgttacaggggttaatgctctacaaggtatggctgagcccagaagagagaatatatcacacaacacccaagacatcctgattccaaacgtcttgttgagccaagagaagaatgccgttctaggtttgccagtggctctacaggacaaagctgtgactgacccacagggagttggaaccccagagatgatacctcttgattgggagaaagggaagctggagggagcagaccacagctgtaccatgggtgacgctgaggaagcccaaatagacgatgaagcacatcctgtcctactgcagcctgttgccaaggagctccccacagacatggagctctcagcccatgatgatggggccccagctggtgtgagggaagtcacgcgagccccgccttcaggcagagaaaggagcactccctctctaccttgcatggtctctgcccaggacgcacctctgcctaagggagcagacttgatagaggaggctgccagccgtatagtggatgctgtcatcgaacaagtcaaggccgctggagcactgcttactgagggggaggcctgtcacatgtcactgtccagccctgagttgggtcctctcactaaaggactagagagtgcttttacagaaaaagtgagtactttcccacctggggagagcctaccaatgggcagtactcctgaggaagccacggggagccttgcaggatgttttgctggaagggaggagccagagaagatcattttacctgtccaggggcctgagccagcagcagaaatgccagacgtgaaagctgaagatgaagtggattttagagcaagttcaatttctgaagaagtggctgtagggagcatagctgctacactgaagatgaagcaaggcccaatgacccaggcgataaaccgagaaaactggtgtacaatagagccatgccctgatgcagcatctcttctggcttccaagcagagcccagaatgtgagaacttcctggatgttggactgggcagagagtgtacctcaaaacaaggtgtacttaaaagagaatctgggagtgattctgacctctttcactcacccagtgatgacatggacagcatcatcttcccaaagccagaggaagagcatttggcctgtgatatcaccggatccagttcatccaccgatgacacggcttcactggaccgacattcttctcatggcagtgatgtgtctctctcccagattttaaagccaaacaggtcaagagatcggcaaagccttgatggattctacagccatgggatgggagctgagggtcgagaaagtgagagtgagcctgctgacccaggcgacgtggaggaggaggagatggacagtatcactgaagtgcctgcaaactgctctgtcctaaggagctccatgcgctctctttctcccttccggaggcacagctgggggcctgggaaaaatgcagccagcgatgcagaaatgaaccaccggagttcaatgcgagttcttggggatgttgtcaggagacctcccattcataggagaagtttcagtctagaaggcttgacaggaggagctggtgtcggaaacaagccatcctcatctctagaagtaagctctgcaaatgccgaagagctcagacacccattcagtggtgaggaacgggttgactctttggtgtcactttcagaagaggatctggagtcagaccagagagaacataggatgtttgatcagcagatatgtcacagatctaagcagcagggatttaattactgtacatcagccatttcctctccattgacaaaatccatctcattaatgacaatcagccatcctggattggacaattcacggcccttccacagtaccttccacaataccagtgctaatctgactgagagtataacagaagagaactataatttcctgccacatagcccctccaagaaagattctgaatggaagagtggaacaaaagtcagtcgtacattcagctacatcaagaataaaatgtctagcagcaagaagagcaaagaaaaggaaaaagaaaaagataagattaaggagaaggagaaagattctaaagacaaggagaaagataagaagactgtcaacgggcacactttcagttccattcctgttgtgggtcccatcagctgtagccagtgtatgaagcccttcaccaacaaagatgcctatacttgtgcaaattgcagtgcttttgtccacaaaggctgccgagaaagtctagcctcctgtgcaaaggtcaaaatgaagcagcccaaagggagccttcaggcacatgacacatcatcactgcccacggtcattatgagaaacaagccctcacagcccaaggagcgtcctcggtccgcagtcctcctggtggatgaaaccgctaccaccccaatatttgccaatagacgatcccagcagagtgtctcgctctccaaaagtgtctccatacagaacattactggagttggcaatgatgagaacatgtcaaacacctggaaattcctgtctcattcaacagactcactaaataaaatcagcaaggtcaatgagtcaacagaatcacttactgatgagggagggtacagacatgaatgaaggacaactactgggagactttgagattgagtccaaacagctggaagcagagtcttggagtcggataatagacagcaagtttctaaaacagcaaaagaaagatgtggtcaaacggcaagaagtaatatatgagttgatgcagacagagtttcatcatgtccgcactctcaagatcatgagtggtgtgtacagccaggggatgatggcggatctgctttttgagcagcagatggtagaaaagctgttcccctgtttggatgagctgatcagtatccatagccaattcttccagaggattctggagcggaagaaggagtctctggtggataaaagtgaaaagaactttctcatcaagaggataggggatgtgcttgtaaatcagttttcaggtgagaatgcagaacgtttaaagaagacatatggcaagttttgtgggcaacataaccagtctgtaaactacttcaaagacctttatgccaaggataagcgttttcaagcctttgtaaagaagaagatgagcagttcagttgttagaaggcttggaattccagagtgcatattgcttgtaactcagcggattaccaagtacccagttttattccaaagaatattgcagtgtaccaaagacaatgaagtggagcaggaagatctagcacagtccttgagcctggtgaaggatgtgattggagctgtagacagcaaagtggcaagttatgaaaagaaagtgcgtctcaatgagatttatacaaagacagatagcaagtcaatcatgaggatgaagagtggtcagatgtttgccaaggaagatttgaaacggaagaagcttgtacgtgatgggagtgtgtttctgaagaatgcagcaggaaggttgaaagaggttcaagcagttcttctcactgacattttagttttccttcaagaaaaagaccagaagtacatctttgcatcattggaccagaagtcaacagtgatctctttaaagaagctgattgtgagagaagtggcacatgaggagaaaggtttattcctgatcagcatggggatgacagatccagagatggtagaagtccatgccagctccacttcattgtcttgggtacacgcatag

SEQ ID NO: 361999 - DNA, 4633 bp, Homo sapiens
agatctcgccactgcactccagcctgagcaactccgtctcaaaaaaacacacacagaaaaacaaaaagaatctttgttttaccccgaaagagaggcagaggcagaaagtcttcttctgctttttgcatctctaagaggctgaaaaagagaatggaagtgctggggcattttggccagggcagtaatggatatttggagttggcacttccctcagctagaggagtctcagtgtgtctgagaaaatggcagtcagccatccaggattttaggagcaacgccactgctctgtgccacatcagaaatcaggcatggccccaacctgaaggaacttgtagcttaatggggaagcacaccaagaataaaagagcctccagaacatgtggtgcctgtggtcctgagacagcaggaaatggctctcaggccagagttgctggaagaacccatgtggcaggatcggtgggaggcagttacagagggaaacgcccatcccagcaactaggggaggccgccactcctctcgtggatggatgatattcttgcttggggatgttgagacagctgcactctgcatagttcctgatttgcctctctactgctgatgaaaaacctctctttctctatagctgctgcttatattggaaggcttttggttattcagcacactcactcctgagcttatttcagtgatattccttggttatttcgaaacatggatgcttgtggcagatggagagcctgggtgtacacagatctgcctgtgttttgaaatgcataccatgttgccgtttgtttgattgattgatcttggaccacgaaagaaaattatactgacagcttccagggtagggggcagttgtagctttctgcagatgttgccaaatatattgggggtggggagcagcaaatgccatgtgttgctttttatgacataaggagggattccacccccatcccaataaaatcggtgctttgacaaaggagggttcccaggcagctaagagaacccagagtagatgatcctctttatctctggtttaacctgtgactaggattcttggtgtaagctcggcttttccacttatcctctaaccggaacaggcttctataatctctttgccttaaaataattatctgcatccctgtgtagagcaatcttaagcagctctccttgtttcttcagggaatgggaattcttttctaagtcgccccatcaaaggtactattggttttttacaacgccggcgtttgtgtatgtagtaaaagtattaacagcattaaaggcgatatttttaacatgtttatagatactacttgggggagggcagctaatgaaaccttcaagctctatgcagtccacagacgtgagctctgtagagttcgcagaggtgggtaagtacccagccagcacacccagttgaattcagccaggatttattgagttggcatcacggacgctgacagcctccaagtgaaaacccttctcttgaatatgtacaggtttcccatccacataccaagctgatgaggatcccatcgttcttccccagtcctgaggagcccccctcgccatctgcaccttccatagccaaatcagggtcattggactcagaactttcagtgtccccaaaaaggaacagcatctctcggacacacaaagataaggggccttttcacatactgagttcaaccagccagacaaacaaaggaccagaagggcagagccaggcccctgcgtccacctctgcctctacccgcctgtttgggttaacaaagccaaaggaaaagaaggagaaaaaaaagaagaacaaaaccagccgctctcagcccggtgatggtcccgcgtcagaagtatcagcagagggtgaagagatcttctgctgaccctcttcctctctgctgaggcagctgcctcctgatcctggccagcccacctctcctgctgtccccgcgtgcacaagtctcttacactggacgcccactgctcctcagcgtccagtcctcctgggcggccccaggtcctggacaataagcaacagatgatattgagtgtcgggtggggaaggaggcccagactctgcttcggccatgatttgtgactgcccaggactctcaggttgggctggccctactcaggattacactgaaagtaatggcctcgtaagtacaggtgatggttttggacacgtcaggaattcctaaaggctgaaagagtgtatccaagtaaggtctgaacctccgactgccttttatttgggggaacacaaaaccaaacagcagatgttttggacttgatctgtgtacgtacatggggacctgtctgcatatacacacggggaatgccagaagaaggcccagtctgcaccaggcgtctggtcaacttagcacaagggcagtgcctggacggacccggagcccccgcatatcagcagttcacccagtactcctcagagactggtttccctctaaacccatcccgggcacataccacccctgttttgcatgtatttctcatttcattttagggatgacaaacatttgtgaaaccagtgagagaaggcttgatgtgtataaaagacgtgatgtgcaccacctcgatctcggtgtttcaggcactaaagcaacaaaacaacccatagtatctcattttgtcatcagatccagaagaaatatcctggttttccagcatgtttacccacatgttttgggcatggataaagtgaagaggcctactcaccattatccctgcagcgtgacaccttttgattgtcactgaccactcagaaggggccacggcctcctggctgtgttcctgagcccccgtcgtgcctctcccagacagcagctgtctggcccttgctgggtgagggcacaccactgccaggggtcagcctcgcacccaggccaggcagaagctgtgctctgaagctaggacagctggctgagaagtgggttcaggcgaagggtgaagccatgtgtagcagttcctgccagtgcagatctggagaggagctggcccggaaggcgtggttgtgaaagcgcccttcttatgttaggaggccttggcaaaattggatttcttcaaaaatacatgtaaaggtctgttgttgaattgtactctgcccctggaagcagatacagatggctgcctgctgctcggctttgcttttgcttttcccaccgtgttttcatctttgttcacttgaggctttccccagctggtgtgtgcaggacagttcatggtaatgttgccctctgaggccccgtacaccagaagggaggccctggaaaattttgtgcttccaacgtggccttcaattcttgcttttttgcccctcggaagcatggggcttttgagcacacttaaaaaaagaaaaatctgtaacttggtgcttattgatgaattgcaagctggccttgcagatggagatatttatctttcagtttatttgaaagaggtctggtttaaaatttgtagcctacatttgttttatttattgtatttgtgtgtttgtgtttgtttttttttaagggtgagccaggtctagcccaacagtctaaactatccagtcaataccgagtgaagtggcagccagcactgttcactctgtgtcttttgaagtgccttgaaggcccagatgaaattttaaagggagggggtccatgtccttccctcccccaccccgcctcattctttaatcaaaggatgtcttctcccttgtttgagaatgaagaaactcgccacctctgacctacctttgcctttttctgtcatggagaatactcacccttcagaaacagaccaaaggccaaaacctgctgatttttctattgaaaatatgtccccttgcaaagaccctaaacaaaaagttaagtttctttctttcacctatttgtacaactccaagttacagctgaatctgtcgtgactttcctgagatctacccggggcttggctgtctgttctgggcactggctccgagttcccctcctgggatttgcaggagggcagtactgaacctgcattcttctccttgtaaatgtaggccgggtgcccctgttctccgggtttggaacaatacgaggttggtgctgatgggatttacttgcgtacgtgctcttcacaaaaacaccgtggatgctgaagttagagcacgtcgccacagagcttgacatcaatgttagagggtctcttactccccgcccagctgtgatgtttcatctgctttggttgttttggtggtcttttttaaaaatagagatttcacatctgcccagaccccactcaaaacgatttggtcaggttctggttggacaagtttaaaatcaaagtagtgcccggaattccctcaaaccacccaacttcatccaggaatacagtctgcagtgcagcaacagaaccgcttaccaagaactgtgcttacatacctttgtcatctctcttccccccttggaagttgtcctcagggggatttgttcctgtcctggggatttacctgggatggtggctgcctgtgcttttgctcatggccttgacagtgctctagttgctggatctaatggcctgtcttggtttctatcacatgagaaggggttgtttttttggggtgactcggactgaattccccatactgtt

SEQ ID NO: 362000 - DNA, 6725 bp, Homo sapiens
agcgggaagcgcctgtgctctgccgagactgccgtgcccattgctcgcctcggtcgccgccgctttagcccgcctccgggggagcggccgcctattgtctttctccgcggcgaaggtgaagagttgtcccagctcggcccgcgggggagccccgggagccgcacgtgtcctgggtcatgaaacttaatccacagcaagctcccttatatggtgattgtgttgttacagtgctgcttgctgaagaggacaaagctgaagatgatgtagtgttttacttggtatttttgggttccaccctccgtcactgtacaagtactcggaaggtcagttctgatacattggagaccattgctcctggtcatgattgttgtgaaacagtgaaggtgcagctctgtgcttccaaagagggccttcccgtgtttgtggtggctgaagaagactttcatttcgtccaggatgaagcgtatgatgcagctcaattcctagcaaccagtgctggaaatcagcaggctttgaactttacccgttttcttgaccagtcaggacccccatctggggatgtgaattcccttgataagaagttggtgctggcattcaggcacctgaagctgcccacggagtggaatgtattggggacagatcagagtttgcatgatgctggcccgcgagagacattgatgcattttgctgtgcggctgggactgctgaggttgacgtggttcctgttgcagaagccaggtggccgcggagctctcagtatccacaaccaggaaggggcgacgcctgtgagcttggccttggagcgaggctatcacaagctgcaccagcttctaaccgaggagaatgctggagaaccagactcctggagcagtttatcctatgaaataccgtatggagactgttctgtgaggcatcatcgagagttggacatctatacattaacctctgagtctgattcacatcatgaacacccatttcctggagacggttgcactggaccaatttttaaacttatgaacatccaacagcaactaatgaaaacaaacctcaagcagatggacagtcttatgcccttaatgatgacagcacaggatccttccagtgccccagagacagatggccagtttcttccctgtgcaccggagcccacggaccctcagcgactttcttcttctgaagagactgagagcactcagtgctgcccagggagccctgttgcacagactgaaagtccctgtgatttgtcaagcatagttgaggaggagaatacagaccgttcctgtaggaagaaaaataaaggcgtggaaagaaaaggggaagaggtggagccagcacctattgtggactctggaactgtatctgatcaagacagctgccttcagagcttgcctgattgtggagtaaagggcacggaaggcctttcgtcctgtggaaacagaaatgaagaaactggaacaaaatcttctggaatgcccacagaccaggagtccctgagcagtggagatgctgtgcttcagagagacttggtcatggagccaggcacagcccagtattcctctggaggtgaactgggaggcatttcaacaacaaatgtcagtaccccagacactgcaggggaaatggaacatgggctcatgaacccagatgccactgtttggaagaatgtgcttcagggaggggaaagtacaaaggaaagatttgagaactctaatattggcacagctggagcctctgacgtgcacgtcacaagtaagcctgtggataaaatcagtgttccaaactgtgcccctgccgccagttccctggatggtaacaaacctgctgagtcttcacttgcatttagtaatgaagaaacctccactgaaaaaacagcagaaacggaaacttcacgaagtcgtgaggagagtgctgatgctccagtagatcagaattctgtggtgattccagctgctgcaaaagacaagatttcagatggattagaaccttatactctcttagcagcaggcataggtgaggcaatgtcaccctcagatttagcccttcttgggctggaagaagatgtaatgccacaccagaactcagaaacaaattcatctcatgctcaaagccaaaagggcaaatcctcacccatttgttctacaactggagacgataaactttgtgcagactctgcatgtcaacagaacacagtgacttctagtggcgatttggttgcaaaactgtgtgataacatagttagcgagtccgaaagcaccacagcaaggcaacccagctcacaagatccacccgatgcctcccactgtgaagacccacaggctcatacagtcacctctgaccctgtaagggatacccaggaacgtgcggatttttgtcctttcaaagtggtggataacaaaggccaacgaaaagatgtgaaactagataaacctttaacaaatatgcttgaggtggtttcacatccacatccagttgtccctaaaatggagaaagaactggtgccagaccaggcagtaatatcagacagtactttctctctggcaaacagtccaggcagtgaatcagtaaccaaggatgacgcactttcttttgtcccctcccagaaagaaaagggaacagcaactcctgaactacatacagctacagattatagagatggcccagatggaaattcgaatgagcctgatacgcggccactagaagacagggcagcaggcctgtccacatcctccactgctgcagagcttcagcacgggatggggaataccagtctcacaggacttggtggagagcatgagggtcctgcccctccagcaatcccagaagctctgaatatcaaggggaacactgactcttccctgcaaagtatgggtaaggccactttggctttagattcagttttgactgaagaaggaaaacttctggtggtttcagaaagctctgcagctcaggaacaagataaggataaagcggtgacctgttcctctattaaggaaaatgctctctcttcaggaactttgcaggaagagcagagaacaccacctcctggacaagatactcaacaatttcatgaaaaatcaatctcagctgactgtgccaaggacaaagcacttcagctaagtaattcaccgggtgcatcctctgcctttcttaaggcagaaactgaacataacaaggaagtggccccacaagtctcactgctgactcaaggtggggctgcccagagcctggtgccaccaggagcaagtctggccacagagtcaaggcaggaagccttgggggcagagcacaacagctctgctctgttgccatgtctgttgccagatgggtctgatgggtccgatgctcttaactgcagtcaggcttctcctctggatgttggagtgaagaacactcaatcccagggaaaaactagtgcctgtgaggtgagtggaaatgtgacggtggatgttacaggggttaatgctctacaaggtatggctgagcccagaagagagaatatatcacacaacacccaagacatcctgattccaaacgtcttgttgagccaagagaagaatgccgttctaggtttgccagtggctctacaggacaaagctgtgactgacccacagggagttggaaccccagagatgatacctcttgattgggagaaagggaagctggagggagcagaccacagctgtaccatgggtgacgctgaggaagcccaaatagacgatgaagcacatcctgtcctactgcagcctgttgccaaggagctccccacagacatggagctctcagcccatgatgatggggccccagctggtgtgagggaagtcacgcgagccccgccttcaggcagagaaaggagcactccctctctaccttgcatggtctctgcccaggacgcacctctgcctaagggagcagacttgatagaggaggctgccagccgtatagtggatgctgtcatcgaacaagtcaaggccgctggagcactgcttactgagggggaggcctgtcacatgtcactgtccagccctgagttgggtcctctcactaaaggactagagagtgcttttacagaaaaagtgagtactttcccacctggggagagcctaccaatgggcagtactcctgaggaagccacggggagccttgcaggatgttttgctggaagggaggagccagagaagatcattttacctgtccaggggcctgagccagcagcagaaatgccagacgtgaaagctgaagatgaagtggattttagagcaagttcaatttctgaagaagtggctgtagggagcatagctgctacactgaagatgaagcaaggcccaatgacccaggcgataaaccgagaaaactggtgtacaatagagccatgccctgatgcagcatctcttctggcttccaagcagagcccagaatgtgagaacttcctggatgttggactgggcagagagtgtacctcaaaacaaggtgtacttaaaagagaatctgggagtgattctgacctctttcactcacccagtgatgacatggacagcatcatcttcccaaagccagaggaagagcatttggcctgtgatatcaccggatccagttcatccaccgatgacacggcttcactggaccgacattcttctcatggcagtgatgtgtctctctcccagattttaaagccaaacaggtcaagagatcggcaaagccttgatggattctacagccatgggatgggagctgagggtcgagaaagtgagagtgagcctgctgacccaggcgacgtggaggaggaggagatggacagtatcactgaagtgcctgcaaactgctctgtcctaaggagctccatgcgctctctttctcccttccggaggcacagctgggggcctgggaaaaatgcagccagcgatgcagaaatgaaccaccggagttcaatgcgagttcttggggatgttgtcaggagacctcccattcataggagaagtttcagtctagaaggcttgacaggaggagctggtgtcggaaacaagccatcctcatctctagaagtaagctctgcaaatgccgaagagctcagacacccattcagtggtgaggaacgggttgactctttggtgtcactttcagaagaggatctggagtcagaccagagagaacataggatgtttgatcagcagatatgtcacagatctaagcagcagggatttaattactgtacatcagccatttcctctccattgacaaaatccatctcattaatgacaatcagccatcctggattggacaattcacggcccttccacagtaccttccacaataccagtgctaatctgactgagagtataacagaagagaactataatttcctgccacatagcccctccaagaaagattctgaatggaagagtggaacaaaagtcagtcgtacattcagctacatcaagaataaaatgtctagcagcaagaagagcaaagaaaaggaaaaagaaaaagataagattaaggagaaggagaaagattctaaagacaaggagaaagataagaagactgtcaacgggcacactttcagttccattcctgttgtgggtcccatcagctgtagccagtgtatgaagcccttcaccaacaaagatgcctatacttgtgcaaattgcagtgcttttgtccacaaaggctgccgagaaagtctagcctcctgtgcaaaggtcaaaatgaagcagcccaaagggagccttcaggcacatgacacatcatcactgcccacggtcattatgagaaacaagccctcacagcccaaggagcgtcctcggtccgcagtcctcctggtggatgaaaccgctaccaccccaatatttgccaatagacgatcccagcagagtgtctcgctctccaaaagtgtctccatacagaacattactggagttggcaatgatgagaacatgtcaaacacctggaaattcctgtctcattcaacagactcactaaataaaatcagcaaggtcaatgagtcaacagaatcacttactgatgagggagggtacagacatgaatgaaggacaactactgggagactttgagattgagtccaaacagctggaagcagagtcttggagtcggataatagacagcaagtttctaaaacagcaaaagaaagatgtggtcaaacggcaagaagtaatatatgagttgatgcagacagagtttcatcatgtccgcactctcaagatcatgagtggtgtgtacagccaggggatgatggcggatctgctttttgagcagcagatggtagaaaagctgttcccctgtttggatgagctgatcagtatccatagccaattcttccagaggattctggagcggaagaaggagtctctggtggataaaagtgaaaagaactttctcatcaagaggataggggatgtgcttgtaaatcagttcaggtgagaatgcagaacggtcacgagacattggcagcttgggggaacataacgtcggaaactattcaagacttatgcagggtagggtcagcctgtaagagagtgaccgtcggtcgcagggggaccacgcatggggtacaccgggacacaccgtatccagcatgcggtccgtcagataggacgatcccaacgacggagagtcgctgatgcaatgtcatccacggacatacacacctagactcacagacaagctcggtcacgcaccaccccgctcagcgcagactctctaactatcag

SEQ ID NO: 362001 - DNA, 3726 bp, Homo sapiens
atgagacgggcttgaaaaatgaggggagagttctagtccgtcatagtgcctggtgccccctgctgtggggtcgggagggatccagaagctcgctgtcgtcctggccagagttgcagggctcccctctgtgtgcctcccagggtgtggtgctgcagcaggacagctacattgaggaccagaaactggtgctgagcgagagggcgctcactcgcagcttgtcccgcccgagctccctcattgagcaggagaagcagcgcagcctggagaagcagcgccaggacctggccaacctgcagaagcagcaggcccagtacctcgaggagaagcgcaggcgcgagcgtgagtgggaagctcgtgagagggagctgcgggagcgggaggccctcctggcccagcgcgaggaggaggtgcagcaggggcagcaggacctggaaaaggagcgggaggagctccagcagaagaagggcacataccagtatgacctggagcgactgcgtgctgcccagaaacagcttgagagggaacaggagcagctgcgccgggaggcagagcggctcagccagcggcagacagaacgggacctgtgtcaggtttcccatccacataccaagctgatgaggatcccatcgttcttccccagtcctgaggagcccccctcgccatctgcaccttccatagccaaatcagggtcattggactcagaactttcagtgtccccaaaaaggaacagcatctctcggacacacaaagataaggggccttttcacatactgagttcaaccagccagacaaacaaaggaccagaagggcagagccaggcccctgcgtccacctctgcctctacccgcctgtttgggttaacaaagccaaaggaaaagaaggagaaaaaaaagaagaacaaaaccagccgctctcagcccggtgatggtcccgcgtcagaagtatcagcagagggtgaagagatcttctgctgaccctcttcctctctgctgaggcagctgcctcctgatcctggccagcccacctctcctgctgtccccgcgtgcacaagtctcttacactggacgcccactgctcctcagcgtccagtcctcctgggcggccccaggtcctggacaataagcaacagatgatattgagtgtcgggtggggaaggaggcccagactctgcttcggccatgatttgtgactgcccaggactctcaggttgggctggccctactcaggattacactgaaagtaatggcctcgtaagtacaggtgatggttttggacacgtcaggaattcctaaaggctgaaagagtgtatccaagtaaggtctgaacctccgactgccttttatttgggggaacacaaaaccaaacagcagatgttttggacttgatctgtgtacgtacatggggacctgtctgcatatacacacggggaatgccagaagaaggcccagtctgcaccaggcgtctggtcaacttagcacaagggcagtgcctggacggacccggagcccccgcatatcagcagttcacccagtactcctcagagactggtttccctctaaacccatcccgggcacataccacccctgttttgcatgtatttctcatttcattttagggatgacaaacatttgtgaaaccagtgagagaaggcttgatgtgtataaaagacgtgatgtgcaccacctcgatctcggtgtttcaggcactaaagcaacaaaacaacccatagtatctcattttgtcatcagatccagaagaaatatcctggttttccagcatgtttacccacatgttttgggcatggataaagtgaagaggcctactcaccattatccctgcagcgtgacaccttttgattgtcactgaccactcagaaggggccacggcctcctggctgtgttcctgagcccccgtcgtgcctctcccagacagcagctgtctggcccttgctgggtgagggcacaccactgccaggggtcagcctcgcacccaggccaggcagaagctgtgctctgaagctaggacagctggctgagaagtgggttcaggcgaagggtgaagccatgtgtagcagttcctgccagtgcagatctggagaggagctggcccggaaggcgtggttgtgaaagcgcccttcttatgttaggaggccttggcaaaattggatttcttcaaaaatacatgtaaaggtctgttgttgaattgtactctgcccctggaagcagatacagatggctgcctgctgctcggctttgcttttgcttttcccaccgtgttttcatctttgttcacttgaggctttccccagctggtgtgtgcaggacagttcatggtaatgttgccctctgaggccccgtacaccagaagggaggccctggaaaattttgtgcttccaacgtggccttcaattcttgcttttttgcccctcggaagcatggggcttttgagcacacttaaaaaaagaaaaatctgtaacttggtgcttattgatgaattgcaagctggccttgcagatggagatatttatctttcagtttatttgaaagaggtctggtttaaaatttgtagcctacatttgttttatttattgtatttgtgtgtttgtgtttgtttttttttaagggtgagccaggtctagcccaacagtctaaactatccagtcaataccgagtgaagtggcagccagcactgttcactctgtgtcttttgaagtgccttgaaggcccagatgaaattttaaagggagggggtccatgtccttccctcccccaccccgcctcattctttaatcaaaggatgtcttctcccttgtttgagaatgaagaaactcgccacctctgacctacctttgcctttttctgtcatggagaatactcacccttcagaaacagaccaaaggccaaaacctgctgatttttctattgaaaatatgtccccttgcaaagaccctaaacaaaaagttaagtttctttctttcacctatttgtacaactccaagttacagctgaatctgtcgtgactttcctgagatctacccggggcttggctgtctgttctgggcactggctccgagttcccctcctgggatttgcaggagggcagtactgaacctgcattcttctccttgtaaatgtaggccgggtgcccctgttctccgggtttggaacaatacgaggttggtgctgatgggatttacttgcgtacgtgctcttcacaaaaacaccgtggatgctgaagttagagcacgtcgccacagagcttgacatcaatgttagagggtctcttactccccgcccagctgtgatgtttcatctgctttggttgttttggtggtcttttttaaaaatagagatttcacatctgcccagaccccactcaaaacgatttggtcaggttctggttggacaagtttaaaatcaaagtagtgcccggaattccctcaaaccacccaacttcatccaggaatacagtctgcagtgcagcaacagaaccgcttaccaagaactgtgcttacatacctttgtcatctctcttccccccttggaagttgtcctcagggggatttgttcctgtcctggggatttacctgggatggtggctgcctgtgcttttgctcatggccttgacagtgctctagttgctggatctaatggcctgtcttggtttctatcacatgagaaggggttgtttttttggggtgactcggactgaattccccatactgtt

SEQ ID NO: 362002 - DNA, 5465 bp, Homo sapiens
agcgggaagcgcctgtgctctgccgagactgccgtgcccattgctcgcctcggtcgccgccgctttagcccgcctccgggggagcggccgcctattgtctttctccgcggcgaaggtgaagagttgtcccagctcggcccgcgggggagccccgggagccgcacgtgtcctgggtcatgaaacttaatccacagcaagctcccttatatggtgattgtgttgttacagtgctgcttgctgaagaggacaaagctgaagatgatgtagtgttttacttggtatttttgggttccaccctccgtcactgtacaagtactcggaaggtcagttctgatacattggagaccattgctcctggtcatgattgttgtgaaacagtgaaggtgcagctctgtgcttccaaagagggccttcccgtgtttgtggtggctgaagaagactttcatttcgtccaggatgaagcgtatgatgcagctcaattcctagcaaccagtgctggaaatcagcaggctttgaactttacccgttttcttgaccagtcaggacccccatctggggatgtgaattcccttgataagaagttggtgctggcattcaggcacctgaagctgcccacggagtggaatgtattggggacagatcagagtttgcatgatgctggcccgcgagagacattgatgcattttgctgtgcggctgggactgctgaggttgacgtggttcctgttgcagaagccaggtggccgcggagctctcagtatccacaaccaggaaggggcgacgcctgtgagcttggccttggagcgaggctatcacaagctgcaccagcttctaaccgaggagaatgctggagaaccagactcctggagcagtttatcctatgaaataccgtatggagactgttctgtgaggcatcatcgagagttggacatctatacattaacctctgagtctgattcacatcatgaacacccatttcctggagacggttgcactggaccaatttttaaacttatgaacatccaacagcaactaatgaaaacaaacctcaagcagatggacagtcttatgcccttaatgatgacagcacaggatccttccagtgccccagagacagatggccagtttcttccctgtgcaccggagcccacggaccctcagcgactttcttcttctgaagagactgagagcactcagtgctgcccagggagccctgttgcacagactgaaagtccctgtgatttgtcaagcatagttgaggaggagaatacagaccgttcctgtaggaagaaaaataaaggcgtggaaagaaaaggggaagaggtggagccagcacctattgtggactctggaactgtatctgatcaagacagctgccttcagagcttgcctgattgtggagtaaagggcacggaaggcctttcgtcctgtggaaacagaaatgaagaaactggaacaaaatcttctggaatgcccacagaccaggagtccctgagcagtggagatgctgtgcttcagagagacttggtcatggagccaggcacagcccagtattcctctggaggtgaactgggaggcatttcaacaacaaatgtcagtaccccagacactgcaggggaaatggaacatgggctcatgaacccagatgccactgtttggaagaatgtgcttcagggaggggaaagtacaaaggaaagatttgagaactctaatattggcacagctggagcctctgacgtgcacgtcacaagtaagcctgtggataaaatcagtgttccaaactgtgcccctgccgccagttccctggatggtaacaaacctgctgagtcttcacttgcatttagtaatgaagaaacctccactgaaaaaacagcagaaacggaaacttcacgaagtcgtgaggagagtgctgatgctccagtagatcagaattctgtggtgattccagctgctgcaaaagacaagatttcagatggattagaaccttatactctcttagcagcaggcataggtgaggcaatgtcaccctcagatttagcccttcttgggctggaagaagatgtaatgccacaccagaactcagaaacaaattcatctcatgctcaaagccaaaagggcaaatcctcacccatttgttctacaactggagacgataaactttgtgcagactctgcatgtcaacagaacacagtgacttctagtggcgatttggttgcaaaactgtgtgataacatagttagcgagtccgaaagcaccacagcaaggcaacccagctcacaagatccacccgatgcctcccactgtgaagacccacaggctcatacagtcacctctgaccctgtaagggatacccaggaacgtgcggatttttgtcctttcaaagtggtggataacaaaggccaacgaaaagatgtgaaactagataaacctttaacaaatatgcttgaggtggtttcacatccacatccagttgtccctaaaatggagaaagaactggtgccagaccaggcagtaatatcagacagtactttctctctggcaaacagtccaggcagtgaatcagtaaccaaggatgacgcactttcttttgtcccctcccagaaagaaaagggaacagcaactcctgaactacatacagctacagattatagagatggcccagatggaaattcgaatgagcctgatacgcggccactagaagacagggcagcaggcctgtccacatcctccactgctgcagagcttcagcacgggatggggaataccagtctcacaggacttggtggagagcatgagggtcctgcccctccagcaatcccagaagctctgaatatcaaggggaacactgactcttccctgcaaagtatgggtaaggccactttggctttagattcagttttgactgaagaaggaaaacttctggtggtttcagaaagctctgcagctcaggaacaagataaggataaagcggtgacctgttcctctattaaggaaaatgctctctcttcaggaactttgcaggaagagcagagaacaccacctcctggacaagatactcaacaatttcatgaaaaatcaatctcagctgactgtgccaaggacaaagcacttcagctaagtaattcaccgggtgcatcctctgcctttcttaaggcagaaactgaacataacaaggaagtggccccacaagtctcactgctgactcaaggtggggctgcccagagcctggtgccaccaggagcaagtctggccacagagtcaaggcaggaagccttgggggcagagcacaacagctctgctctgttgccatgtctgttgccagatgggtctgatgggtccgatgctcttaactgcagtcaggcttctcctctggatgttggagtgaagaacactcaatcccagggaaaaactagtgcctgtgaggtgagtggaaatgtgacggtggatgttacaggggttaatgctctacaaggtatggctgagcccagaagagagaatatatcacacaacacccaagacatcctgattccaaacgtcttgttgagccaagagaagaatgccgttctaggtttgccagtggctctacaggacaaagctgtgactgacccacagggagttggaaccccagagatgatacctcttgattgggagaaagggaagctggagggagcagaccacagctgtaccatgggtgacgctgaggaagcccaaatagacgatgaagcacatcctgtcctactgcagcctgttgccaaggagctccccacagacatggagctctcagcccatgatgatggggccccagctggtgtgagggaagtcacgcgagccccgccttcaggcagagaaaggagcactccctctctaccttgcatggtctctgcccaggacgcacctctgcctaagggagcagacttgatagaggaggctgccagccgtatagtggatgctgtcatcgaacaagtcaaggccgctggagcactgcttactgagggggaggcctgtcacatgtcactgtccagccctgagttgggtcctctcactaaaggactagagagtgcttttacagaaaaagtgagtactttcccacctggggagagcctaccaatgggcagtactcctgaggaagccacggggagccttgcaggatgttttgctggaagggaggagccagagaagatcattttacctgtccaggggcctgagccagcagcagaaatgccagacgtgaaagctgaagatgaagtggattttagagcaagttcaatttctgaagaagtggctgtagggagcatagctgctacactgaagatgaagcaaggcccaatgacccaggcgataaaccgagaaaactggtgtacaatagagccatgccctgatgcagcatctcttctggcttccaagcagagcccagaatgtgagaacttcctggatgttggactgggcagagagtgtacctcaaaacaaggtgtacttaaaagagaatctgggagtgattctgacctctttcactcacccagtgatgacatggacagcatcatcttcccaaagccagaggaagagcatttggcctgtgatatcaccggatccagttcatccaccgatgacacggcttcactggaccgacattcttctcatggcagtgatgtgtctctctcccagattttaaagccaaacaggtcaagagatcggcaaagccttgatggattctacagccatgggatgggagctgagggtcgagaaagtgagagtgagcctgctgacccaggcgacgtggaggaggaggagatggacagtatcactgaagtgcctgcaaactgctctgtcctaaggagctccatgcgctctctttctcccttccggaggcacagctgggggcctgggaaaaatgcagccagcgatgcagaaatgaaccaccggagttcaatgcgagttcttggggatgttgtcaggagacctcccattcataggagaagtttcagtctagaaggcttgacaggaggagctggtgtcggaaacaagccatcctcatctctagaagtaagctctgcaaatgccgaagagctcagacacccattcagtggtgaggaacgggttgactctttggtgtcactttcagaagaggatctggagtcagaccagagagaacataggatgtttgatcagcagatatgtcacagatctaagcagcagggatttaattactgtacatcagccatttcctctccattgacaaaatccatctcattaatgacaatcagccatcctggattggacaattcacggcccttccacagtaccttccacaataccagtgctaatctgactgagagtataacagaagagaactataatttcctgccacatagcccctccaagaaagattctgaatggaagagtggaacaaaagtcagtcgtacattcagctacatcaagaataaaatgtctagcagcaagaagagcaaa

SEQ ID NO: 362003 - DNA, 6047 bp, Homo sapiens
agcgggaagcgcctgtgctctgccgagactgccgtgcccattgctcgcctcggtcgccgccgctttagcccgcctccgggggagcggccgcctattgtctttctccgcggcgaaggtgaagagttgtcccagctcggcccgcgggggagccccgggagccgcacgtgtcctgggtcatgaaacttaatccacagcaagctcccttatatggtgattgtgttgttacagtgctgcttgctgaagaggacaaagctgaagatgatgtagtgttttacttggtatttttgggttccaccctccgtcactgtacaagtactcggaaggtcagttctgatacattggagaccattgctcctggtcatgattgttgtgaaacagtgaaggtgcagctctgtgcttccaaagagggccttcccgtgtttgtggtggctgaagaagactttcatttcgtccaggatgaagcgtatgatgcagctcaattcctagcaaccagtgctggaaatcagcaggctttgaactttacccgttttcttgaccagtcaggacccccatctggggatgtgaattcccttgataagaagttggtgctggcattcaggcacctgaagctgcccacggagtggaatgtattggggacagatcagagtttgcatgatgctggcccgcgagagacattgatgcattttgctgtgcggctgggactgctgaggttgacgtggttcctgttgcagaagccaggtggccgcggagctctcagtatccacaaccaggaaggggcgacgcctgtgagcttggccttggagcgaggctatcacaagctgcaccagcttctaaccgaggagaatgctggagaaccagactcctggagcagtttatcctatgaaataccgtatggagactgttctgtgaggcatcatcgagagttggacatctatacattaacctctgagtctgattcacatcatgaacacccatttcctggagacggttgcactggaccaatttttaaacttatgaacatccaacagcaactaatgaaaacaaacctcaagcagatggacagtcttatgcccttaatgatgacagcacaggatccttccagtgccccagagacagatggccagtttcttccctgtgcaccggagcccacggaccctcagcgactttcttcttctgaagagactgagagcactcagtgctgcccagggagccctgttgcacagactgaaagtccctgtgatttgtcaagcatagttgaggaggagaatacagaccgttcctgtaggaagaaaaataaaggcgtggaaagaaaaggggaagaggtggagccagcacctattgtggactctggaactgtatctgatcaagacagctgccttcagagcttgcctgattgtggagtaaagggcacggaaggcctttcgtcctgtggaaacagaaatgaagaaactggaacaaaatcttctggaatgcccacagaccaggagtccctgagcagtggagatgctgtgcttcagagagacttggtcatggagccaggcacagcccagtattcctctggaggtgaactgggaggcatttcaacaacaaatgtcagtaccccagacactgcaggggaaatggaacatgggctcatgaacccagatgccactgtttggaagaatgtgcttcagggaggggaaagtacaaaggaaagatttgagaactctaatattggcacagctggagcctctgacgtgcacgtcacaagtaagcctgtggataaaatcagtgttccaaactgtgcccctgccgccagttccctggatggtaacaaacctgctgagtcttcacttgcatttagtaatgaagaaacctccactgaaaaaacagcagaaacggaaacttcacgaagtcgtgaggagagtgctgatgctccagtagatcagaattctgtggtgattccagctgctgcaaaagacaagatttcagatggattagaaccttatactctcttagcagcaggcataggtgaggcaatgtcaccctcagatttagcccttcttgggctggaagaagatgtaatgccacaccagaactcagaaacaaattcatctcatgctcaaagccaaaagggcaaatcctcacccatttgttctacaactggagacgataaactttgtgcagactctgcatgtcaacagaacacagtgacttctagtggcgatttggttgcaaaactgtgtgataacatagttagcgagtccgaaagcaccacagcaaggcaacccagctcacaagatccacccgatgcctcccactgtgaagacccacaggctcatacagtcacctctgaccctgtaagggatacccaggaacgtgcggatttttgtcctttcaaagtggtggataacaaaggccaacgaaaagatgtgaaactagataaacctttaacaaatatgcttgaggtggtttcacatccacatccagttgtccctaaaatggagaaagaactggtgccagaccaggcagtaatatcagacagtactttctctctggcaaacagtccaggcagtgaatcagtaaccaaggatgacgcactttcttttgtcccctcccagaaagaaaagggaacagcaactcctgaactacatacagctacagattatagagatggcccagatggaaattcgaatgagcctgatacgcggccactagaagacagggcagcaggcctgtccacatcctccactgctgcagagcttcagcacgggatggggaataccagtctcacaggacttggtggagagcatgagggtcctgcccctccagcaatcccagaagctctgaatatcaaggggaacactgactcttccctgcaaagtatgggtaaggccactttggctttagattcagttttgactgaagaaggaaaacttctggtggtttcagaaagctctgcagctcaggaacaagataaggataaagcggtgacctgttcctctattaaggaaaatgctctctcttcaggaactttgcaggaagagcagagaacaccacctcctggacaagatactcaacaatttcatgaaaaatcaatctcagctgactgtgccaaggacaaagcacttcagctaagtaattcaccgggtgcatcctctgcctttcttaaggcagaaactgaacataacaaggaagtggccccacaagtctcactgctgactcaaggtggggctgcccagagcctggtgccaccaggagcaagtctggccacagagtcaaggcaggaagccttgggggcagagcacaacagctctgctctgttgccatgtctgttgccagatgggtctgatgggtccgatgctcttaactgcagtcaggcttctcctctggatgttggagtgaagaacactcaatcccagggaaaaactagtgcctgtgaggtgagtggaaatgtgacggtggatgttacaggggttaatgctctacaaggtatggctgagcccagaagagagaatatatcacacaacacccaagacatcctgattccaaacgtcttgttgagccaagagaagaatgccgttctaggtttgccagtggctctacaggacaaagctgtgactgacccacagggagttggaaccccagagatgatacctcttgattgggagaaagggaagctggagggagcagaccacagctgtaccatgggtgacgctgaggaagcccaaatagacgatgaagcacatcctgtcctactgcagcctgttgccaaggagctccccacagacatggagctctcagcccatgatgatggggccccagctggtgtgagggaagtcacgcgagccccgccttcaggcagagaaaggagcactccctctctaccttgcatggtctctgcccaggacgcacctctgcctaagggagcagacttgatagaggaggctgccagccgtatagtggatgctgtcatcgaacaagtcaaggccgctggagcactgcttactgagggggaggcctgtcacatgtcactgtccagccctgagttgggtcctctcactaaaggactagagagtgcttttacagaaaaagtgagtactttcccacctggggagagcctaccaatgggcagtactcctgaggaagccacggggagccttgcaggatgttttgctggaagggaggagccagagaagatcattttacctgtccaggggcctgagccagcagcagaaatgccagacgtgaaagctgaagatgaagtggattttagagcaagttcaatttctgaagaagtggctgtagggagcatagctgctacactgaagatgaagcaaggcccaatgacccaggcgataaaccgagaaaactggtgtacaatagagccatgccctgatgcagcatctcttctggcttccaagcagagcccagaatgtgagaacttcctggatgttggactgggcagagagtgtacctcaaaacaaggtgtacttaaaagagaatctgggagtgattctgacctctttcactcacccagtgatgacatggacagcatcatcttcccaaagccagaggaagagcatttggcctgtgatatcaccggatccagttcatccaccgatgacacggcttcactggaccgacattcttctcatggcagtgatgtgtctctctcccagattttaaagccaaacaggtcaagagatcggcaaagccttgatggattctacagccatgggatgggagctgagggtcgagaaagtgagagtgagcctgctgacccaggcgacgtggaggaggaggagatggacagtatcactgaagtgcctgcaaactgctctgtcctaaggagctccatgcgctctctttctcccttccggaggcacagctgggggcctgggaaaaatgcagccagcgatgcagaaatgaaccaccggagttcaatgcgagttcttggggatgttgtcaggagacctcccattcataggagaaggtacagagttcattaacttgatggactaaccatgtcacctctgagcatatactaacaagcatctcattctgcttaatccatgattggatcatctacttttaagtaatgtcccatctaattcaggcaaataaaatataggtacttattaattgctagtgtccattttatatgaaatggtttctttaatttgaagttttatgctattttatcttttttaaaaattatttttaatttttttaaatcttgtgcttattgttgttcagatgactgtgagaatagggtctcacctagctttctctaggagagttcgaagaattgtctatgtcgtgcctatttaatggaccctggggagtactttttttttcttttccacaaaagaaaaaccaggaatgtgtgtgtgcttgtgcacaggccctaaagtattgtcaacacattgtttaataatgtaatgaaagactttattactaggccacctggcattttccattccattgtggatatagtcatttcttaaagcaagtcagaggcataagttcattccttggcctttgaattccttaattagtatttgtcaggtaatattttgaagctaaaaataaacgatttataagctgagaagtaatttctagtcagattgctaatttgcttcaaattttccgttggattttctttagaagtcattagtgaccttccattgtttagaaaaatatttagaaatccaaaaattagggttatattactgttagtttctcaggaggcatttgtaaagaagtatttttaactattagctgaacctgtttgttggcaagtgggcaaatagtgatctttcctactttgtctttttcaagtggatgctttctttaattccagattttaggcaagaaattgagctgaaattcagatattctcatgaatttcagataatcatgattcctatgaaattgttcttccagaaaataagttgttaaataagttttaaccccatctctactaaataagtttttcagtagaaggttctttggagatacgtttgtctgggtctttattaaagctcttcaatatgagcttatta

SEQ ID NO: 362004 - DNA, 3986 bp, Homo sapiens
  misc_feature (997)..(997): n is a, c, g, or t
  misc_feature (1019)..(1019): n is a, c, g, or t
  misc_feature (1025)..(1025): n is a, c, g, or t
  misc_feature (1028)..(1028): n is a, c, g, or t
cccgccaaaagcccaagcccccttccaagcccaggttccgccggcaataacgagcaacacgtgggaccaagacggagacaagtgaaaacgctaaccgccaaacttaacgcctaggacagccggggcatcgacgaggaactgggaccgaacgtcggaccaaagcctcacccaactgccgccgagcccctcattgagcagagaaaaaaagaagaacaaaccacccgctctcagcccgtgagtccgcgtcagaagtatcagcagaggtgaagagatcttctgctgaccctcttcctctctgctgaggcagctgcctccgatccggccagcccacctctcctgcgtccccgcgtgcacaagtctcttacactgacgcccactgctcctcagcgtccagtcctcctgggcggccccaggtcctggacaataagcagcgcagcctggagaagcagcgccaggacctggccaacctgcagaagcagcaggcccagtacctcgaggagaagcgcaggcgcgagcgtgagtgggaagctcgtgagagggagctgcgggagcgggaggccctcctggcccagcgcgaggaggaggtgcagcaggggcagcaggacctggaaaaggagcgggaggagctccagcagaagaagggcacataccagtatgacctggagcgactgcgtgctgcccagaaacagcttgagagggaacaggagcagctgcgccgggaggcagagcggctcagccagcggcagacagaacgggacctgtgtcaggtttcccatccacataccaagctgatgaggatcccatcgttcttccccagtcctgaggagcccccctcgccatctgcaccttccatagccaaatcagggtcattggactcagaactttcagtgtccccaaaaaggaacagcatctctcggacacacaaagataaggggccttttcacatactgagttcaaccagccagacaaacaaaggaccagaagggcagagccaggnccctgcgtcccctctgcctcanccgccngtntgggttaacaaagccaaaggaaaaaaaaaggaccagaagggcagagccaggcccctgcgtccacctctgcctctacccgcctgtttgggttaacaaagccaaaggaaaagaaggagaaaaaaaagaagaacaaaaccagccgctctcagcccggtgatggtcccgcgtcagaagtatcagcagagggtgaagagatcttctgctgaccctcttcctctctgctgaggcagctgcctcctgatcctggccagcccacctctcctgctgtccccgcgtgcacaagtctcttacactggacgcccactgctcctcagcgtccagtcctcctgggcggccccaggtcctggacaataagcaacagatgatattgagtgtcgggtggggaaggaggcccagactctgcttcggccatgatttgtgactgcccaggactctcaggttgggctggccctactcaggattacactgaaagtaatggcctcgtaagtacaggtgatggttttggacacgtcaggaattcctaaaggctgaaagagtgtatccaagtaaggtctgaacctccgactgccttttatttgggggaacacaaaaccaaacagcagatgttttggacttgatctgtgtacgtacatggggacctgtctgcatatacacacggggaatgccagaagaaggcccagtctgcaccaggcgtctggtcaacttagcacaagggcagtgcctggacggacccggagcccccgcatatcagcagttcacccagtactcctcagagactggtttccctctaaacccatcccgggcacataccacccctgttttgcatgtatttctcatttcattttagggatgacaaacatttgtgaaaccagtgagagaaggcttgatgtgtataaaagacgtgatgtgcaccacctcgatctcggtgtttcaggcactaaagcaacaaaacaacccatagtatctcattttgtcatcagatccagaagaaatatcctggttttccagcatgtttacccacatgttttgggcatggataaagtgaagaggcctactcaccattatccctgcagcgtgacaccttttgattgtcactgaccactcagaaggggccacggcctcctggctgtgttcctgagcccccgtcgtgcctctcccagacagcagctgtctggcccttgctgggtgagggcacaccactgccaggggtcagcctcgcacccaggccaggcagaagctgtgctctgaagctaggacagctggctgagaagtgggttcaggcgaagggtgaagccatgtgtagcagttcctgccagtgcagatctggagaggagctggcccggaaggcgtggttgtgaaagcgcccttcttatgttaggaggccttggcaaaattggatttcttcaaaaatacatgtaaaggtctgttgttgaattgtactctgcccctggaagcagatacagatggctgcctgctgctcggctttgcttttgcttttcccaccgtgttttcatctttgttcacttgaggctttccccagctggtgtgtgcaggacagttcatggtaatgttgccctctgaggccccgtacaccagaagggaggccctggaaaattttgtgcttccaacgtggccttcaattcttgcttttttgcccctcggaagcatggggcttttgagcacacttaaaaaaagaaaaatctgtaacttggtgcttattgatgaattgcaagctggccttgcagatggagatatttatctttcagtttatttgaaagaggtctggtttaaaatttgtagcctacatttgttttatttattgtatttgtgtgtttgtgtttgtttttttttaagggtgagccaggtctagcccaacagtctaaactatccagtcaataccgagtgaagtggcagccagcactgttcactctgtgtcttttgaagtgccttgaaggcccagatgaaattttaaagggagggggtccatgtccttccctcccccaccccgcctcattctttaatcaaaggatgtcttctcccttgtttgagaatgaagaaactcgccacctctgacctacctttgcctttttctgtcatggagaatactcacccttcagaaacagaccaaaggccaaaacctgctgatttttctattgaaaatatgtccccttgcaaagaccctaaacaaaaagttaagtttctttctttcacctatttgtacaactccaagttacagctgaatctgtcgtgactttcctgagatctacccggggcttggctgtctgttctgggcactggctccgagttcccctcctgggatttgcaggagggcagtactgaacctgcattcttctccttgtaaatgtaggccgggtgcccctgttctccgggtttggaacaatacgaggttggtgctgatgggatttacttgcgtacgtgctcttcacaaaaacaccgtggatgctgaagttagagcacgtcgccacagagcttgacatcaatgttagagggtctcttactccccgcccagctgtgatgtttcatctgctttggttgttttggtggtcttttttaaaaatagagatttcacatctgcccagaccccactcaaaacgatttggtcaggttctggttggacaagtttaaaatcaaagtagtgcccggaattccctcaaaccacccaacttcatccaggaatacagtctgcagtgcagcaacagaaccgcttaccaagaactgtgcttacatacctttgtcatctctcttccccccttggaagttgtcctcagggggatttgttcctgtcctggggatttacctgggatggtggctgcctgtgcttttgctcatggccttgacagtgctctagttgctggatctaatggcctgtcttggtttctatcacatgagaaggggttgtttttttggggtgactcggactgaattccccatactgtt

SEQ ID NO: 362005 - DNA, 5299 bp, Homo sapiens
agcgggaagcgcctgtgctctgccgagactgccgtgcccattgctcgcctcggtcgccgccgctttagcccgcctccgggggagcggccgcctattgtctttctccgcggcgaaggtgaagagttgtcccagctcggcccgcgggggagccccgggagccgcacgtgtcctgggtcatgaaacttaatccacagcaagctcccttatatggtgattgtgttgttacagtgctgcttgctgaagaggacaaagctgaagatgatgtagtgttttacttggtatttttgggttccaccctccgtcactgtacaagtactcggaaggtcagttctgatacattggagaccattgctcctggtcatgattgttgtgaaacagtgaaggtgcagctctgtgcttccaaagagggccttcccgtgtttgtggtggctgaagaagactttcatttcgtccaggatgaagcgtatgatgcagctcaattcctagcaaccagtgctggaaatcagcaggctttgaactttacccgttttcttgaccagtcaggacccccatctggggatgtgaattcccttgataagaagttggtgctggcattcaggcacctgaagctgcccacggagtggaatgtattggggacagatcagagtttgcatgatgctggcccgcgagagacattgatgcattttgctgtgcggctgggactgctgaggttgacgtggttcctgttgcagaagccaggtggccgcggagctctcagtatccacaaccaggaaggggcgacgcctgtgagcttggccttggagcgaggctatcacaagctgcaccagcttctaaccgaggagaatgctggagaaccagactcctggagcagtttatcctatgaaataccgtatggagactgttctgtgaggcatcatcgagagttggacatctatacattaacctctgagtctgattcacatcatgaacacccatttcctggagacggttgcactggaccaatttttaaacttatgaacatccaacagcaactaatgaaaacaaacctcaagcagatggacagtcttatgcccttaatgatgacagcacaggatccttccagtgccccagagacagatggccagtttcttccctgtgcaccggagcccacggaccctcagcgactttcttcttctgaagagactgagagcactcagtgctgcccagggagccctgttgcacagactgaaagtccctgtgatttgtcaagcatagttgaggaggagaatacagaccgttcctgtaggaagaaaaataaaggcgtggaaagaaaaggggaagaggtggagccagcacctattgtggactctggaactgtatctgatcaagacagctgccttcagagcttgcctgattgtggagtaaagggcacggaaggcctttcgtcctgtggaaacagaaatgaagaaactggaacaaaatcttctggaatgcccacagaccaggagtccctgagcagtggagatgctgtgcttcagagagacttggtcatggagccaggcacagcccagtattcctctggaggtgaactgggaggcatttcaacaacaaatgtcagtaccccagacactgcaggggaaatggaacatgggctcatgaacccagatgccactgtttggaagaatgtgcttcagggaggggaaagtacaaaggaaagatttgagaactctaatattggcacagctggagcctctgacgtgcacgtcacaagtaagcctgtggataaaatcagtgttccaaactgtgcccctgccgccagttccctggatggtaacaaacctgctgagtcttcacttgcatttagtaatgaagaaacctccactgaaaaaacagcagaaacggaaacttcacgaagtcgtgaggagagtgctgatgctccagtagatcagaattctgtggtgattccagctgctgcaaaagacaagatttcagatggattagaaccttatactctcttagcagcaggcataggtgaggcaatgtcaccctcagatttagcccttcttgggctggaagaagatgtaatgccacaccagaactcagaaacaaattcatctcatgctcaaagccaaaagggcaaatcctcacccatttgttctacaactggagacgataaactttgtgcagactctgcatgtcaacagaacacagtgacttctagtggcgatttggttgcaaaactgtgtgataacatagttagcgagtccgaaagcaccacagcaaggcaacccagctcacaagatccacccgatgcctcccactgtgaagacccacaggctcatacagtcacctctgaccctgtaagggatacccaggaacgtgcggatttttgtcctttcaaagtggtggataacaaaggccaacgaaaagatgtgaaactagataaacctttaacaaatatgcttgaggtggtttcacatccacatccagttgtccctaaaatggagaaagaactggtgccagaccaggcagtaatatcagacagtactttctctctggcaaacagtccaggcagtgaatcagtaaccaaggatgacgcactttcttttgtcccctcccagaaagaaaagggaacagcaactcctgaactacatacagctacagattatagagatggcccagatggaaattcgaatgagcctgatacgcggccactagaagacagggcagcaggcctgtccacatcctccactgctgcagagcttcagcacgggatggggaataccagtctcacaggacttggtggagagcatgagggtcctgcccctccagcaatcccagaagctctgaatatcaaggggaacactgactcttccctgcaaagtatgggtaaggccactttggctttagattcagttttgactgaagaaggaaaacttctggtggtttcagaaagctctgcagctcaggaacaagataaggataaagcggtgacctgttcctctattaaggaaaatgctctctcttcaggaactttgcaggaagagcagagaacaccacctcctggacaagatactcaacaatttcatgaaaaatcaatctcagctgactgtgccaaggacaaagcacttcagctaagtaattcaccgggtgcatcctctgcctttcttaaggcagaaactgaacataacaaggaagtggccccacaagtctcactgctgactcaaggtggggctgcccagagcctggtgccaccaggagcaagtctggccacagagtcaaggcaggaagccttgggggcagagcacaacagctctgctctgttgccatgtctgttgccagatgggtctgatgggtccgatgctcttaactgcagtcaggcttctcctctggatgttggagtgaagaacactcaatcccagggaaaaactagtgcctgtgaggtgagtggaaatgtgacggtggatgttacaggggttaatgctctacaaggtatggctgagcccagaagagagaatatatcacacaacacccaagacatcctgattccaaacgtcttgttgagccaagagaagaatgccgttctaggtttgccagtggctctacaggacaaagctgtgactgacccacagggagttggaaccccagagatgatacctcttgattgggagaaagggaagctggagggagcagaccacagctgtaccatgggtgacgctgaggaagcccaaatagacgatgaagcacatcctgtcctactgcagcctgttgccaaggagctccccacagacatggagctctcagcccatgatgatggggccccagctggtgtgagggaagtcacgcgagccccgccttcaggcagagaaaggagcactccctctctaccttgcatggtctctgcccaggacgcacctctgcctaagggagcagacttgatagaggaggctgccagccgtatagtggatgctgtcatcgaacaagtcaaggccgctggagcactgcttactgagggggaggcctgtcacatgtcactgtccagccctgagttgggtcctctcactaaaggactagagagtgcttttacagaaaaagtgagtactttcccacctggggagagcctaccaatgggcagtactcctgaggaagccacggggagccttgcaggatgttttgctggaagggaggagccagagaagatcattttacctgtccaggggcctgagccagcagcagaaatgccagacgtgaaagctgaagatgaagtggattttagagcaagttcaatttctgaagaagtggctgtagggagcatagctgctacactgaagatgaagcaaggcccaatgacccaggcgataaaccgagaaaactggtgtacaatagagccatgccctgatgcagcatctcttctggcttccaagcagagcccagaatgtgagaacttcctggatgttggactgggcagagagtgtacctcaaaacaaggtgtacttaaaagagaatctgggagtgattctgacctctttcactcacccagtgatgacatggacagcatcatcttcccaaagccagaggaagagcatttggcctgtgatatcaccggatccagttcatccaccgatgacacggcttcactggaccgacattcttctcatggcagtgatgtgtctctctcccagattttaaagccaaacaggtcaagagatcggcaaagccttgatggattctacagccatgggatgggagctgagggtcgagaaagtgagagtgagcctgctgacccaggcgacgtggaggaggaggagatggacagtatcactgaagtgcctgcaaactgctctgtcctaaggagctccatgcgctctctttctcccttccggaggcacagctgggggcctgggaaaaatgcagccagcgatgcagaaatgaaccaccggagtttcagtctagaaggcttgacaggaggagctggtgtcggaaacaagccatcctcatctctagaagtaagctctgcaaatgccgaagagctcagacacccattcagtggtgaggaacgggttgactctttggtgtcactttcagaagaggatctggagtcagaccagagagaacataggatgtttgatcagcagatatgtcacagatctaagcagcagggatttaattactgtacatcagccatttcctctccattgacaaaatccatctcattaatgacaatcagccatcctggattggacatattcacggcccttccaccagtacccgccaccatacccgtgctaatctgacttgagtataacgagtcgagaacata

SEQ ID NO: 362006 - DNA, 2894 bp, Homo sapiens
cctttgcctataccctcgtgactgggggagctgatccctccgatgtgaggggaaaccatgtgaggagcgacacagctcttctcccgcccgtgttggtgccacagtggaaggattggcggagggtgaagagatcttctgctgaccctcttcctctctgctgaggcagctgcctcctgatcctggccagcccacctctcctgctgtccccgcgtgcacaagtctcttacactggacgcccactgctcctcagcgtccagtcctcctgggcggccccaggtcctggacaataagcaacagatgatattgagtgtcgggtggggaaggaggcccagactctgcttcggccatgatttgtgactgcccaggactctcaggttgggctggccctactcaggattacactgaaagtaatggcctcgtaagtacaggtgatggttttggacacgtcaggaattcctaaaggctgaaagagtgtatccaagtaaggtctgaacctccgactgccttttatttgggggaacacaaaaccaaacagcagatgttttggacttgatctgtgtacgtacatggggacctgtctgcatatacacacggggaatgccagaagaaggcccagtctgcaccaggcgtctggtcaacttagcacaagggcagtgcctggacggacccggagcccccgcatatcagcagttcacccagtactcctcagagactggtttccctctaaacccatcccgggcacataccacccctgttttgcatgtatttctcatttcattttagggatgacaaacatttgtgaaaccagtgagagaaggcttgatgtgtataaaagacgtgatgtgcaccacctcgatctcggtgtttcaggcactaaagcaacaaaacaacccatagtatctcattttgtcatcagatccagaagaaatatcctggttttccagcatgtttacccacatgttttgggcatggataaagtgaagaggcctactcaccattatccctgcagcgtgacaccttttgattgtcactgaccactcagaaggggccacggcctcctggctgtgttcctgagcccccgtcgtgcctctcccagacagcagctgtctggcccttgctgggtgagggcacaccactgccaggggtcagcctcgcacccaggccaggcagaagctgtgctctgaagctaggacagctggctgagaagtgggttcaggcgaagggtgaagccatgtgtagcagttcctgccagtgcagatctggagaggagctggcccggaaggcgtggttgtgaaagcgcccttcttatgttaggaggccttggcaaaattggatttcttcaaaaatacatgtaaaggtctgttgttgaattgtactctgcccctggaagcagatacagatggctgcctgctgctcggctttgcttttgcttttcccaccgtgttttcatctttgttcacttgaggctttccccagctggtgtgtgcaggacagttcatggtaatgttgccctctgaggccccgtacaccagaagggaggccctggaaaattttgtgcttccaacgtggccttcaattcttgcttttttgcccctcggaagcatggggcttttgagcacacttaaaaaaagaaaaatctgtaacttggtgcttattgatgaattgcaagctggccttgcagatggagatatttatctttcagtttatttgaaagaggtctggtttaaaatttgtagcctacatttgttttatttattgtatttgtgtgtttgtgtttgtttttttttaagggtgagccaggtctagcccaacagtctaaactatccagtcaataccgagtgaagtggcagccagcactgttcactctgtgtcttttgaagtgccttgaaggcccagatgaaattttaaagggagggggtccatgtccttccctcccccaccccgcctcattctttaatcaaaggatgtcttctcccttgtttgagaatgaagaaactcgccacctctgacctacctttgcctttttctgtcatggagaatactcacccttcagaaacagaccaaaggccaaaacctgctgatttttctattgaaaatatgtccccttgcaaagaccctaaacaaaaagttaagtttctttctttcacctatttgtacaactccaagttacagctgaatctgtcgtgactttcctgagatctacccggggcttggctgtctgttctgggcactggctccgagttcccctcctgggatttgcaggagggcagtactgaacctgcattcttctccttgtaaatgtaggccgggtgcccctgttctccgggtttggaacaatacgaggttggtgctgatgggatttacttgcgtacgtgctcttcacaaaaacaccgtggatgctgaagttagagcacgtcgccacagagcttgacatcaatgttagagggtctcttactccccgcccagctgtgatgtttcatctgctttggttgttttggtggtcttttttaaaaatagagatttcacatctgcccagaccccactcaaaacgatttggtcaggttctggttggacaagtttaaaatcaaagtagtgcccggaattccctcaaaccacccaacttcatccaggaatacagtctgcagtgcagcaacagaaccgcttaccaagaactgtgcttacatacctttgtcatctctcttccccccttggaagttgtcctcagggggatttgttcctgtcctggggatttacctgggatggtggctgcctgtgcttttgctcatggccttgacagtgctctagttgctggatctaatggcctgtcttggtttctatcacatgagaaggggttgtttttttggggtgactcggactgaattccccatactgtt

SEQ ID NO: 362007 - DNA, 2503 bp, Homo sapiens
  misc_feature (31)..(31): n is a, c, g, or t
  misc_feature (958)..(958): n is a, c, g, or t
cgtcgtgtatcccaccaccgttccgtacggntgtgtcgccctctacgaattcacggcccttccacagtaccttccacaataccagtgctaatctgactgagagtataacagaagagaactataatttcctgccacatagcccctccaagaaagattctgaatggaagagtggaacaaaagtcagtcgtacattcagctacatcaagaataaaatgtctagcagcaagaagagcaaagtgagtatcactgtgggcattgcttgtgatcacctcagtaggatcctgtcacagcctgcattcacaccaaaactggttaaatcatggggacataaatggaaataaattcaggattactctccgaaatcgcctaatatttaaaggaaaataataagaagaaaaatagcaagaagtggaactaccagttactgagttttcactatatgctaagtgctttccatatattatttaaccctttcaacaaccctgtcaggtaggtgttatctctcttttctaaaagtgatgtaccttaccgaggatactcctctaatgtgaagaagtagttcaaaccagatctctttggtttcaaatcccatactcttaaaccacagtgcttaaatctgtaatatcagtttaaatgcaacagaaggattttatgcaaagatcaaaggattgaaaatatttatatttgggtttagagggaaggattatcccacagaagattacaagaacttttaagactaatatgatttcttagatctatttctaattaggagcatttggaatatattctcttagtgattaagagattaaataaatgtttaaaccgtgtgtgtgtgtgtgtgtgtgtgtgtctgtgtgtgtgtgtgtgtaaggctccactgtatcacccaggctggagcacagtggcgtgaccatagctcactgcagtcttgaactgccaggcttaagcagtttcctgnctcgcaccgtagcctcccgagtagccaggactacagtcatgttgtgccatcgtgctgagctatgtttaaatttgtttgtaaagatgaagtcttgctgttgtgtctaggccggtctaatgccttacctcaaacactcttctcgctgcaggcttccgaagccctgggtgtgatccaccgtgcccagcctaaagtaacattttttatctaattatttttcacatgctcattatggaaatcttcaaaatctaaaagtaaaagaatgaaaatctcctggaataaccccgcttagagataactacacttaatgttttggtttatatatttctaatcttttttaaaaatgtattttcaaaagaaagggagaaaagaagttcactttcttatactgattcccagtgctaaaccaaaactgattccatttcaagtccgtggggaaaaacttttcgcctctcacaccctgttcatctacccacaacaccctctaacaaaataaagacataagtaaataaaaatttgaaatcagttaaggaactcttgcaaggaatcactgtgtgtgtgtgtgtgtgtatgtgtgtgtgtgcacgtgcatgcatgtgtgtgtgtgtgtgtgtgtggtatatacatgtacatacagatatatacacacgtagatacatgcatatttagaagtaagggaataaacaaacattgaattcaagaatattgtcataaaagggcattgcctcctccctcacaaaacaaggtgcactaagcttctcaagccctcacttcagtgggctgatggaaatatagccaaagtattttaccatgttttgtaagatctcttggtttagcaaatacattcaaagaaatttttccaccaaacgtgccacaagaattgtgttttcatttctcctgtgcaagtacagaatggagagaaagtaggaatcagggagagatgcaaagagtctagcaaattatttctagcataatcacacatttaacttcagactcagccttgtattataattccaaaaaaaaaaaaaaatgagggtcaaagaatacggtttacccagtatcctacgtattaacatttgggcagccaggttaaaaatagagcctaacctatttaactaaccactgccggctgggatactagtgggtatcaacaaaagaaaatcccccttggacagagcaatataaattagccaagtattattaaatgccttgtatagtcttagcatcccactaggtgttaacaggcacctaagagaactaaagctcatagtcctgaccttgaaaaactttatgatctagttgggatgaattccaaaatgtttccatggttttttatttggctttaaaactactgaatcttgtcttcaaacaagcttttcgtggaagaccaataaataagtggagattccccctttctagccatctccccaatgtcatggagttttaggacagagcagtgaatgtaccacttatctcatggataaggtaaaacatacacatgataggaaaaaaacaacgtaagttggaatttagaaactggaccctgac

SEQ ID NO: 362008 - DNA, 887 bp, Homo sapiens
agcgggaagcgcctgtgctctgccgagactgccgtgcccattgctcgcctcggtcgccgccgctttagcccgcctccgggggagcggccgcctattgtctttctccgcggcgaaggtgaagagttgtcccagctcggcccgcgggggagccccgggagccgcacgtgtcctgggtcatgaaacttaatccacagcaagctcccttatatggtgattgtgttgttacagtgctgcttgctgaagaggacaaagctgaagatgatgtagtgttttacttggtatttttgggttccaccctccgtcactgtacaagtactcggaaggtcagttctgatacattggagaccattgctcctggtcatgattgttgtgaaacagtgaaggtgcagctctgtgcttccaaagagggccttcccgtgtttgtggtggctgaagaagactttcatttcgtccaggatgaagcgtatgatgcagctcaattcctagcaaccagtgctggaaatcagcaggctttgaactttacccgttttcttgaccagtcaggacccccatctggggatgtgaattcccttgataagaagttggtgctggcattcaggcacctgaagctgcccacggagtggaatgtattggggacagatcagagtttgcatgatgctggcccgcgagagacattgatgcattttgctgtgcggctgggactgctgaggttgacgtggttcctgttgcagaagccaggtggccgcggagctctcagtatccacaaccaggaaggggcgacgcctgtgagcttggccttggagcgaggctatcacaagctgcaccagcttctaaccgagtaagtgctccttctgccttatttctctcctctcatccccagccccacc

SEQ ID NO: 362009 - DNA, 590 bp, Homo sapiens
tcagctttgcatgtttcctttattccagtggagatccttcagggtttggtgagtggaaatctgggaggcacacttgggccgactgtcagcagccccattgagcaagatgtggtcggtcccgtttccctgccccggagagcagagacctttggaggatttgacagccatcagatgaatgcttcaaaaggtaaatgatgtgaagtcatgagcttttataggcaatccttgactatctcacacaactcaaaatgacttgtactttagtagctacatcaccgctcccaatcagcaaatttcttagtgagatttcaagacactcaagagcttgtcagtcagactcatattcattttgagtaacaaaaaagattttcctaagatctcagctaaaagagtaataatacatgttcctgcttccatttcttctgcatccgtaaaattattaataatcacttagctgccaccaagcagctccccctttttgggggcatcagtaggtttcagacatactacatccccaagatgcctatatgatattctttccttggctaatctgtttcacaactttaaaaaaaaaaacaaccctatttttt

SEQ ID NO: 362010 - DNA, 465 bp, Homo sapiens
aaaaagaaaaggcagtgtgggtggggagggtgtcctgtcttgtcactttccataaattaccacaaggtggtgctcgtgtcttagtcattctcgtaattactaaacaccaatcaaatcacagatcattttctccttcctgcagaacaacttcaccagaaggaccaaaaaatcctactcttgttggaagagaaggagatgattttccgggacatggctgagtgcagcacccctctcccagaggattgctccccaacacatagccctagagttctcttccgctccaacacagaagaggctctcaaaggaggacctttaatgaaaagtgcaataaatgagggtaattaacattcagcattgccccctcttcatctactcccagagtggtttacacactaatattacctgccagtttttacttttttactttaaagcacaaatgcagaaaattacccaaaacaaatattt

SEQ ID NO: 362011 - DNA, 287 bp, Homo sapiens
caattgtgatcatcctattaaaaaaacaagtctctgaggccaattatgatcttacctgcctggaatccactgagaagccattggcttgatctagaataactgaggctatctgattggccctgctggcttcaaccatatgtgctttctctccattacagccagaggaagagcatttggcctgtgatatcaccggatccagttcatccaccgatgacacggcttcactggaccgacattcttctcatggcagtgatgtgtctctctcccagattttaaagccaaacagg

SEQ ID NO: 362012 - DNA, 445 bp, Homo sapiens
cgctgacaacaaaagaatacttttccattttaacgcaaaagcaaaacaaaacacatgaaacctggagcatgttgtatgaatagtaaggcacaggaatcagtttttaaaaatgtactctgtaacccccctgcactttcagaaaaatgccagacgtgaaagctgaagatgaagtggattttagagcaagttcaatttctgaagaagtggctgtagggagcatagctgctacactgaagatgaagcaaggcccaatgacccaggcggtaagtggcatcagtaagtctataagggcacaaaatgtgtttatcctgttctgctgtgtcttatttatggctttgtcttttatttgagggtaagtgggcaaaatagtattttcccccttccctcttgtgctgttatataaatgtgtttatgttgctgcagctaagctttcataaatggtata

SEQ ID NO: 362013 - DNA, 853 bp, Homo sapiens
atgagacgggcttgaaaaatgaggggagagttctagtccgtcatagtgcctggtgccccctgctgtggggtcgggagggatccagaagctcgctgtcgtcctggccagagttgcagggctcccctctgtgtgcctcccagggtgtggtgctgcagcaggacagctacattgaggaccagaaactggtgctgagcgagagggcgctcactcgcagcttgtcccgcccgagctccctcattgagcaggagaagcagcgcagcctggagaagcagcgccaggacctggccaacctgcagaagcagcaggcccagtacctcgaggagaagcgcaggcgcgagcgtgagtgggaagctcgtgagagggagctgcgggagcgggaggccctcctggcccagcgcgaggaggaggtgcagcaggggcagcaggacctggaaaaaaaaactaaaacaaggggggcaaaaggcccccccggagcgggaggagctccagcagaagaagggcacataccagtatgacctggagcgactgcgtgctgcccagaaacagcttgagagggaacaggagcagctgcgccgggaggcagagcggctcagccagcggcagacagaacgggacctgtgtcaggtaatgggactccctgccgagagcaacctaatgatgatattaattaagaccccctgtgtattaagcaaggtaagaaagtgagcagaaatatagagcctgtttttggccagatgctcatgcctgtgatcccagcactttaggaggctgaggtgagagggtagcttgaccagcctgggcaacagagggagactctgtctctcctaaaaaaaaaaaaaaaaaacaaacaaac

SEQ ID NO: 362014 - DNA, 5337 bp, Homo sapiens
agatgtttttagtatacttttaaggaagagaaccccaggtatgaattgtgatcattcttattttcataatctaacaggtatgtatttattagccaaattttttagaaactgcattagaattctgtatattcagaaatggagatgagaatgtaaacaaattattacatcattcacctagacagcatttcccggaaccgcataggccattgacattatgctgtttccccatgtgctgaaggccctggcataatccgagcatgctctaatgtcttctgtgaacctccttctcagctcagcagcagatgcggccagcaaggcggatctccatcagcatctctccgctcctccttaagtctaaaactctcttttctcttggctcttcttattcgagtgatgaggaggaggagttgcataattcacggcccttccacagtaccttccacaataccagtgctaatctgactgagagtataacagaagagaactataatttcctgccacatagcccctccaagaaagattctgaatggaagagtggaacaaaagtcagtcgtacattcagctacatcaagaataaaatgtctagcagcaagaagagcaaagaaaaggaaaaagaaaaagataagattaaggagaaggagaaagattctaaagacaaggagaaagataagaagactgtcaacgggcacactttcagttccattcctgttgtgggtcccatcagctgtagccagtgtatgaagcccttcaccaacaaagatgcctatacttgtgcaaattgcagtgcttttgtccacaaaggctgccgagaaagtctagcctcctgtgcaaaggtcaaaatgaagcagcccaaagggagccttcaggcacatgacacatcatcactgcccacggtcattatgagaaacaagccctcacagcccaaggagcgtcctcggtccgcagtcctcctggtggatgaaaccgctaccaccccaatatttgccaatagacgatcccagcagagtgtctcgctctccaaaagtgtctccatacagaacattactggagttggcaatgatgagaacatgtcaaacacctggaaattcctgtctcattcaacagactcactaaataaaatcagcaaggtcaatgagtcaacagaatcacttactgatgagggagggtacagacatgaatgaaggacaactactgggagactttgagattgagtccaaacagctggaagcagagtcttggagtcggataatagacagcaagtttctaaaacagcaaaagaaagatgtggtcaaacggcaagaagtaatatatgagttgatgcagacagagtttcatcatgtccgcactctcaagatcatgagtggtgtgtacagccaggggatgatggcggatctgctttttgagcagcagatggtagaaaagctgttcccctgtttggatgagctgatcagtatccatagccaattcttccagaggattctggagcggaagaaggagtctctggtggataaaagtgaaaagaactttctcatcaagaggataggggatgtgcttgtaaatcagttttcaggtgagaatgcagaacgtttaaagaagacatatggcaagttttgtgggcaacataaccagtctgtaaactacttcaaagacctttatgccaaggataagcgttttcaagcctttgtaaagaagaagatgagcagttcagttgttagaaggcttggaattccagagtgcatattgcttgtaactcagcggattaccaagtacccagttttattccaaagaatattgcagtgtaccaaagacaatgaagtggagcaggaagatctagcacagtccttgagcctggtgaaggatgtgattggagctgtagacagcaaagtggcaagttatgaaaagaaagtgcgtctcaatgagatttatacaaagacagatagcaagtcaatcatgaggatgaagagtggtcagatgtttgccaaggaagatttgaaacggaagaagcttgtacgtgatgggagtgtgtttctgaagaatgcagcaggaaggttgaaagaggttcaagcagttcttctcactgacattttagttttccttcaagaaaaagaccagaagtacatctttgcatcattggaccagaagtcaacagtgatctctttaaagaagctgattgtgagagaagtggcacatgaggagaaaggtttattcctgatcagcatggggatgacagatccagagatggtagaagtccatgccagctccaaagaggaacgaaacagctggattcagatcattcaggacacaatcaacaccctgaacagagatgaagatgaaggaattcctagtgagaatgaggaagaaaagaaaatgttggacaccagagcccgagaattaaaagaacaacttcaccagaaggaccaaaaaatcctactcttgttggaagagaaggagatgattttccgggacatggctgagtgcagcacccctctcccagaggattgctccccaacacatagccctagagttctcttccgctccaacacagaagaggctctcaaaggaggacctttaatgaaaagtgcaataaatgaggtggagatccttcagggtttggtgagtggaaatctgggaggcacacttgggccgactgtcagcagccccattgagcaagatgtggtcggtcccgtttccctgccccggagagcagagacctttggaggatttgacagccatcagatgaatgcttcaaaaggaggcgagaaggaagagggagatgatggccaagatcttaggagaacggaatcagatagtggcctaaaaaagggtggaaatgctaacctggtatttatgcttaaaagaaacagtgagcaggttgtccagagcgttgttcatctctacgagctcctcagcgctctgcagggtgtggtgctgcagcaggacagctacattgaggaccagaaactggtgctgagcgagagggcgctcactcgcagcttgtcccgcccgagctccctcattgagcaggagaagcagcgcagcctggagaagcagcgccaggacctggccaacctgcagaagcagcaggcccagtacctcgaggagaagcgcaggcgcgagcgtgagtgggaagctcgtgagagggagctgcgggagcgggaggccctcctggcccagcgcgaggaggaggtgcagcaggggcagcaggacctggaaaaggagcgggaggagctccagcagaagaagggcacataccagtatgacctggagcgactgcgtgctgcccagaaacagcttgagagggaacaggagcagctgcgccgggaggcagagcggctcagccagcggcagacagaacgggacctgtgtcaggtttcccatccacataccaagctgatgaggatcccatcgttcttccccagtcctgaggagcccccctcgccatctgcaccttccatagccaaatcagggtcattggactcagaactttcagtgtccccaaaaaggaacagcatctctcggacacacaaagataaggggccttttcacatactgagttcaaccagccagacaaacaaaggaccagaagggcagagccaggcccctgcgtccacctctgcctctacccgcctgtttgggttaacaaagccaaaggaaaagaaggagaaaaaaaagaagaacaaaaccagccgctctcagcccggtgatggtcccgcgtcagaagtatcagcagagggtgaagagatcttctgctgaccctcttcctctctgctgaggcagctgcctcctgatcctggccagcccacctctcctgctgtccccgcgtgcacaagtctcttacactggacgcccactgctcctcagcgtccagtcctcctgggcggccccaggtcctggacaataagcaacagatgatattgagtgtcgggtggggaaggaggcccagactctgcttcggccatgatttgtgactgcccaggactctcaggttgggctggccctactcaggattacactgaaagtaatggcctcgtaagtacaggtgatggttttggacacgtcaggaattcctaaaggctgaaagagtgtatccaagtaaggtctgaacctccgactgccttttatttgggggaacacaaaaccaaacagcagatgttttggacttgatctgtgtacgtacatggggacctgtctgcatatacacacggggaatgccagaagaaggcccagtctgcaccaggcgtctggtcaacttagcacaagggcagtgcctggacggacccggagcccccgcatatcagcagttcacccagtactcctcagagactggtttccctctaaacccatcccgggcacataccacccctgttttgcatgtatttctcatttcattttagggatgacaaacatttgtgaaaccagtgagagaaggcttgatgtgtataaaagacgtgatgtgcaccacctcgatctcggtgtttcaggcactaaagcaacaaaacaacccatagtatctcattttgtcatcagatccagaagaaatatcctggttttccagcatgtttacccacatgttttgggcatggataaagtgaagaggcctactcaccattatccctgcagcgtgacaccttttgattgtcactgaccactcagaaggggccacggcctcctggctgtgttcctgaggcaatgcactaatgtgtaaaaattaaccgaatgcaactattttataatggagagctcttaccttttccttccagttcttaaactggcataaactttattgacttcatcctcctatttttatagcaacctagttttagatggtacaagttgaatttctatcacaagacaataaaataacatgaaagcattatcctagttaatgctatttcaacttaagaaatatctacattgaagtatttgataataattgtaaagttacttaaccgtatgtcatgttcagacagtatgtagcagctagtaacgtgcctggcacagagttgatgcttaataaatagttgctgaataaatgaaaaagaaaaacctgcctttggttgtgcatactttaatcactttctgatttagaaaaagatcagtctagagctcactactgcacactacatcaaactttgctgtaaacaaaagtaacaacttcaaacagaaaaatattacctgttagtgatagtcaacttatataaagagcccacacatttctatgcaaataattaaatttgatgttctgatgtttaacccttaggtaaagaaggccaaagtgtgctgactggctaatttgtatgctttatagtaataatgattagttcctcaagcggccgc

SEQ ID NO: 362015 - DNA, 644 bp, Homo sapiens
atctgatacgggcgagcgctgaccctatgcgtgtaccaaagacaatgaagtggagcaggaagatctagcacagtccttgagcctggtgaaggatgtgattggagctgtagacagcaaagtggcaagttatgaaaagaaagtgcgtctcaatgagatttatacaaagacagatagcaagtcaatcatgaggatgaagagtggtcagatgtttgccaaggaagatttgaaacggaagaagcttgtacgtgatgggagtgtgtttctgaagaatgcagcaggaaggttgaaagaggttcaagcagttcttctcactgacattttagttttccttcaagaaaaagaccagaagtacatctttgcatcattggaccagaagtcaacagtgatctctttaaagaagctgattgtgagagaagtggcacatgaggagaaaggtttattcctgatcagcatggggatgacagatccagagatggtagaagtccatgccagctccaaagaggaacgaaacagctggattcagatcattcaggacacaatcaacaccctgaacagagatgaagatgaaggaattcctagtgagaatgaggaagaaaagaaaatgttggacacgcatagggtccgagctcgattcgtatcatgta

SEQ ID NO: 362016 - DNA, 9324 bp, Homo sapiens
agcgggaagcgcctgtgctctgccgagactgccgtgcccattgctcgcctcggtcgccgccgctttagcccgcctccgggggagcggccgcctattgtctttctccgcggcgaaggtgaagagttgtcccagctcggcccgcgggggagccccgggagccgcacgtgtcctgggtcatgaaacttaatccacagcaagctcccttatatggtgattgtgttgttacagtgctgcttgctgaagaggacaaagctgaagatgatgtagtgttttacttggtatttttgggttccaccctccgtcactgtacaagtactcggaaggtcagttctgatacattggagaccattgctcctggtcatgattgttgtgaaacagtgaaggtgcagctctgtgcttccaaagagggccttcccgtgtttgtggtggctgaagaagactttcatttcgtccaggatgaagcgtatgatgcagctcaattcctagcaaccagtgctggaaatcagcaggctttgaactttacccgttttcttgaccagtcaggacccccatctggggatgtgaattcccttgataagaagttggtgctggcattcaggcacctgaagctgcccacggagtggaatgtattggggacagatcagagtttgcatgatgctggcccgcgagagacattgatgcattttgctgtgcggctgggactgctgaggttgacgtggttcctgttgcagaagccaggtggccgcggagctctcagtatccacaaccaggaaggggcgacgcctgtgagcttggccttggagcgaggctatcacaagctgcaccagcttctaaccgaggagaatgctggagaaccagactcctggagcagtttatcctatgaaataccgtatggagactgttctgtgaggcatcatcgagagttggacatctatacattaacctctgagtctgattcacatcatgaacacccatttcctggagacggttgcactggaccaatttttaaacttatgaacatccaacagcaactaatgaaaacaaacctcaagcagatggacagtcttatgcccttaatgatgacagcacaggatccttccagtgccccagagacagatggccagtttcttccctgtgcaccggagcccacggaccctcagcgactttcttcttctgaagagactgagagcactcagtgctgcccagggagccctgttgcacagactgaaagtccctgtgatttgtcaagcatagttgaggaggagaatacagaccgttcctgtaggaagaaaaataaaggcgtggaaagaaaaggggaagaggtggagccagcacctattgtggactctggaactgtatctgatcaagacagctgccttcagagcttgcctgattgtggagtaaagggcacggaaggcctttcgtcctgtggaaacagaaatgaagaaactggaacaaaatcttctggaatgcccacagaccaggagtccctgagcagtggagatgctgtgcttcagagagacttggtcatggagccaggcacagcccagtattcctctggaggtgaactgggaggcatttcaacaacaaatgtcagtaccccagacactgcaggggaaatggaacatgggctcatgaacccagatgccactgtttggaagaatgtgcttcagggaggggaaagtacaaaggaaagatttgagaactctaatattggcacagctggagcctctgacgtgcacgtcacaagtaagcctgtggataaaatcagtgttccaaactgtgcccctgccgccagttccctggatggtaacaaacctgctgagtcttcacttgcatttagtaatgaagaaacctccactgaaaaaacagcagaaacggaaacttcacgaagtcgtgaggagagtgctgatgctccagtagatcagaattctgtggtgattccagctgctgcaaaagacaagatttcagatggattagaaccttatactctcttagcagcaggcataggtgaggcaatgtcaccctcagatttagcccttcttgggctggaagaagatgtaatgccacaccagaactcagaaacaaattcatctcatgctcaaagccaaaagggcaaatcctcacccatttgttctacaactggagacgataaactttgtgcagactctgcatgtcaacagaacacagtgacttctagtggcgatttggttgcaaaactgtgtgataacatagttagcgagtccgaaagcaccacagcaaggcaacccagctcacaagatccacccgatgcctcccactgtgaagacccacaggctcatacagtcacctctgaccctgtaagggatacccaggaacgtgcggatttttgtcctttcaaagtggtggataacaaaggccaacgaaaagatgtgaaactagataaacctttaacaaatatgcttgaggtggtttcacatccacatccagttgtccctaaaatggagaaagaactggtgccagaccaggcagtaatatcagacagtactttctctctggcaaacagtccaggcagtgaatcagtaaccaaggatgacgcactttcttttgtcccctcccagaaagaaaagggaacagcaactcctgaactacatacagctacagattatagagatggcccagatggaaattcgaatgagcctgatacgcggccactagaagacagggcagcaggcctgtccacatcctccactgctgcagagcttcagcacgggatggggaataccagtctcacaggacttggtggagagcatgagggtcctgcccctccagcaatcccagaagctctgaatatcaaggggaacactgactcttccctgcaaagtatgggtaaggccactttggctttagattcagttttgactgaagaaggaaaacttctggtggtttcagaaagctctgcagctcaggaacaagataaggataaagcggtgacctgttcctctattaaggaaaatgctctctcttcaggaactttgcaggaagagcagagaacaccacctcctggacaagatactcaacaatttcatgaaaaatcaatctcagctgactgtgccaaggacaaagcacttcagctaagtaattcaccgggtgcatcctctgcctttcttaaggcagaaactgaacataacaaggaagtggccccacaagtctcactgctgactcaaggtggggctgcccagagcctggtgccaccaggagcaagtctggccacagagtcaaggcaggaagccttgggggcagagcacaacagctctgctctgttgccatgtctgttgccagatgggtctgatgggtccgatgctcttaactgcagtcaggcttctcctctggatgttggagtgaagaacactcaatcccagggaaaaactagtgcctgtgaggtgagtggaaatgtgacggtggatgttacaggggttaatgctctacaaggtatggctgagcccagaagagagaatatatcacacaacacccaagacatcctgattccaaacgtcttgttgagccaagagaagaatgccgttctaggtttgccagtggctctacaggacaaagctgtgactgacccacagggagttggaaccccagagatgatacctcttgattgggagaaagggaagctggagggagcagaccacagctgtaccatgggtgacgctgaggaagcccaaatagacgatgaagcacatcctgtcctactgcagcctgttgccaaggagctccccacagacatggagctctcagcccatgatgatggggccccagctggtgtgagggaagtcacgcgagccccgccttcaggcagagaaaggagcactccctctctaccttgcatggtctctgcccaggacgcacctctgcctaagggagcagacttgatagaggaggctgccagccgtatagtggatgctgtcatcgaacaagtcaaggccgctggagcactgcttactgagggggaggcctgtcacatgtcactgtccagccctgagttgggtcctctcactaaaggactagagagtgcttttacagaaaaagtgagtactttcccacctggggagagcctaccaatgggcagtactcctgaggaagccacggggagccttgcaggatgttttgctggaagggaggagccagagaagatcattttacctgtccaggggcctgagccagcagcagaaatgccagacgtgaaagctgaagatgaagtggattttagagcaagttcaatttctgaagaagtggctgtagggagcatagctgctacactgaagatgaagcaaggcccaatgacccaggcgataaaccgagaaaactggtgtacaatagagccatgccctgatgcagcatctcttctggcttccaagcagagcccagaatgtgagaacttcctggatgttggactgggcagagagtgtacctcaaaacaaggtgtacttaaaagagaatctgggagtgattctgacctctttcactcacccagtgatgacatggacagcatcatcttcccaaagccagaggaagagcatttggcctgtgatatcaccggatccagttcatccaccgatgacacggcttcactggaccgacattcttctcatggcagtgatgtgtctctctcccagattttaaagccaaacaggtcaagagatcggcaaagccttgatggattctacagccatgggatgggagctgagggtcgagaaagtgagagtgagcctgctgacccaggcgacgtggaggaggaggagatggacagtatcactgaagtgcctgcaaactgctctgtcctaaggagctccatgcgctctctttctcccttccggaggcacagctgggggcctgggaaaaatgcagccagcgatgcagaaatgaaccaccggagttcaatgcgagttcttggggatgttgtcaggagacctcccattcataggagaagtttcagtctagaaggcttgacaggaggagctggtgtcggaaacaagccatcctcatctctagaagtaagctctgcaaatgccgaagagctcagacacccattcagtggtgaggaacgggttgactctttggtgtcactttcagaagaggatctggagtcagaccagagagaacataggatgtttgatcagcagatatgtcacagatctaagcagcagggatttaattactgtacatcagccatttcctctccattgacaaaatccatctcattaatgacaatcagccatcctggattggacaattcacggcccttccacagtaccttccacaataccagtgctaatctgactgagagtataacagaagagaactataatttcctgccacatagcccctccaagaaagattctgaatggaagagtggaacaaaagtcagtcgtacattcagctacatcaagaataaaatgtctagcagcaagaagagcaaagaaaaggaaaaagaaaaagataagattaaggagaaggagaaagattctaaagacaaggagaaagataagaagactgtcaacgggcacactttcagttccattcctgttgtgggtcccatcagctgtagccagtgtatgaagcccttcaccaacaaagatgcctatacttgtgcaaattgcagtgcttttgtccacaaaggctgccgagaaagtctagcctcctgtgcaaaggtcaaaatgaagcagcccaaagggagccttcaggcacatgacacatcatcactgcccacggtcattatgagaaacaagccctcacagcccaaggagcgtcctcggtccgcagtcctcctggtggatgaaaccgctaccaccccaatatttgccaatagacgatcccagcagagtgtctcgctctccaaaagtgtctccatacagaacattactggagttggcaatgatgagaacatgtcaaacacctggaaattcctgtctcattcaacagactcactaaataaaatcagcaaggtcaatgagtcaacagaatcacttactgatgagggagggtacagacatgaatgaaggacaactactgggagactttgagattgagtccaaacagctggaagcagagtcttggagtcggataatagacagcaagtttctaaaacagcaaaagaaagatgtggtcaaacggcaagaagtaatatatgagttgatgcagacagagtttcatcatgtccgcactctcaagatcatgagtggtgtgtacagccaggggatgatggcggatctgctttttgagcagcagatggtagaaaagctgttcccctgtttggatgagctgatcagtatccatagccaattcttccagaggattctggagcggaagaaggagtctctggtggataaaagtgaaaagaactttctcatcaagaggataggggatgtgcttgtaaatcagttttcaggtgagaatgcagaacgtttaaagaagacatatggcaagttttgtgggcaacataaccagtctgtaaactacttcaaagacctttatgccaaggataagcgttttcaagcctttgtaaagaagaagatgagcagttcagttgttagaaggcttggaattccagagtgcatattgcttgtaactcagcggattaccaagtacccagttttattccaaagaatattgcagtgtaccaaagacaatgaagtggagcaggaagatctagcacagtccttgagcctggtgaaggatgtgattggagctgtagacagcaaagtggcaagttatgaaaagaaagtgcgtctcaatgagatttatacaaagacagatagcaagtcaatcatgaggatgaagagtggtcagatgtttgccaaggaagatttgaaacggaagaagcttgtacgtgatgggagtgtgtttctgaagaatgcagcaggaaggttgaaagaggttcaagcagttcttctcactgacattttagttttccttcaagaaaaagaccagaagtacatctttgcatcattggaccagaagtcaacagtgatctctttaaagaagctgattgtgagagaagtggcacatgaggagaaaggtttattcctgatcagcatggggatgacagatccagagatggtagaagtccatgccagctccaaagaggaacgaaacagctggattcagatcattcaggacacaatcaacaccctgaacagagatgaagatgaaggaattcctagtgagaatgaggaagaaaagaaaatgttggacaccagagcccgagaattaaaagaacaacttcaccagaaggaccaaaaaatcctactcttgttggaagagaaggagatgattttccgggacatggctgagtgcagcacccctctcccagaggattgctccccaacacatagccctagagttctcttccgctccaacacagaagaggctctcaaaggaggacctttaatgaaaagtgcaataaatgaggtggagatccttcagggtttggtgagtggaaatctgggaggcacacttgggccgactgtcagcagccccattgagcaagatgtggtcggtcccgtttccctgccccggagagcagagacctttggaggatttgacagccatcagatgaatgcttcaaaaggaggcgagaaggaagagggagatgatggccaagatcttaggagaacggaatcagatagtggcctaaaaaagggtggaaatgctaacctggtatttatgcttaaaagaaacagtgagcaggttgtccagagcgttgttcatctctacgagctcctcagcgctctgcagggtgtggtgctgcagcaggacagctacattgaggaccagaaactggtgctgagcgagagggcgctcactcgcagcttgtcccgcccgagctccctcattgagcaggagaagcagcgcagcctggagaagcagcgccaggacctggccaacctgcagaagcagcaggcccagtacctcgaggagaagcgcaggcgcgagcgtgagtgggaagctcgtgagagggagctgcgggagcgggaggccctcctggcccagcgcgaggaggaggtgcagcaggggcagcaggacctggaaaaggagcgggaggagctccagcagaagaagggcacataccagtatgacctggagcgactgcgtgctgcccagaaacagcttgagagggaacaggagcagctgcgccgggaggcagagcggctcagccagcggcagacagaacgggacctgtgtcaggtttcccatccacataccaagctgatgaggatcccatcgttcttccccagtcctgaggagcccccctcgccatctgcaccttccatagccaaatcagggtcattggactcagaactttcagtgtccccaaaaaggaacagcatctctcggacacacaaagataaggggccttttcacatactgagttcaaccagccagacaaacaaaggaccagaagggcagagccaggcccctgcgtccacctctgcctctacccgcctgtttgggttaacaaagccaaaggaaaagaaggagaaaaaaaagaagaacaaaaccagccgctctcagcccggtgatggtcccgcgtcagaagtatcagcagagggtgaagagatcttctgctgaccctcttcctctctgctgaggcagctgcctcctgatcctggccagcccacctctcctgctgtccccgcgtgcacaagtctcttacactggacgcccactgctcctcagcgtccagtcctcctgggcggccccaggtcctggacaataagcaacagatgatattgagtgtcgggtggggaaggaggcccagactctgcttcggccatgatttgtgactgcccaggactctcaggttgggctggccctactcaggattacactgaaagtaatggcctcgtaagtacaggtgatggttttggacacgtcaggaattcctaaaggctgaaagagtgtatccaagtaaggtctgaacctccgactgccttttatttgggggaacacaaaaccaaacagcagatgttttggacttgatctgtgtacgtacatggggacctgtctgcatatacacacggggaatgccagaagaaggcccagtctgcaccaggcgtctggtcaacttagcacaagggcagtgcctggacggacccggagcccccgcatatcagcagttcacccagtactcctcagagactggtttccctctaaacccatcccgggcacataccacccctgttttgcatgtatttctcatttcattttagggatgacaaacatttgtgaaaccagtgagagaaggcttgatgtgtataaaagacgtgatgtgcacca

SEQ ID NO: 362017 - DNA, 11481 bp, Homo sapiens
agcgggaagcgcctgtgctctgccgagactgccgtgcccattgctcgcctcggtcgccgccgctttagcccgcctccgggggagcggccgcctattgtctttctccgcggcgaaggtgaagagttgtcccagctcggcccgcgggggagccccgggagccgcacgtgtcctgggtcatgaaacttaatccacagcaagctcccttatatggtgattgtgttgttacagtgctgcttgctgaagaggacaaagctgaagatgatgtagtgttttacttggtatttttgggttccaccctccgtcactgtacaagtactcggaaggtcagttctgatacattggagaccattgctcctggtcatgattgttgtgaaacagtgaaggtgcagctctgtgcttccaaagagggccttcccgtgtttgtggtggctgaagaagactttcatttcgtccaggatgaagcgtatgatgcagctcaattcctagcaaccagtgctggaaatcagcaggctttgaactttacccgttttcttgaccagtcaggacccccatctggggatgtgaattcccttgataagaagttggtgctggcattcaggcacctgaagctgcccacggagtggaatgtattggggacagatcagagtttgcatgatgctggcccgcgagagacattgatgcattttgctgtgcggctgggactgctgaggttgacgtggttcctgttgcagaagccaggtggccgcggagctctcagtatccacaaccaggaaggggcgacgcctgtgagcttggccttggagcgaggctatcacaagctgcaccagcttctaaccgaggagaatgctggagaaccagactcctggagcagtttatcctatgaaataccgtatggagactgttctgtgaggcatcatcgagagttggacatctatacattaacctctgagtctgattcacatcatgaacacccatttcctggagacggttgcactggaccaatttttaaacttatgaacatccaacagcaactaatgaaaacaaacctcaagcagatggacagtcttatgcccttaatgatgacagcacaggatccttccagtgccccagagacagatggccagtttcttccctgtgcaccggagcccacggaccctcagcgactttcttcttctgaagagactgagagcactcagtgctgcccagggagccctgttgcacagactgaaagtccctgtgatttgtcaagcatagttgaggaggagaatacagaccgttcctgtaggaagaaaaataaaggcgtggaaagaaaaggggaagaggtggagccagcacctattgtggactctggaactgtatctgatcaagacagctgccttcagagcttgcctgattgtggagtaaagggcacggaaggcctttcgtcctgtggaaacagaaatgaagaaactggaacaaaatcttctggaatgcccacagaccaggagtccctgagcagtggagatgctgtgcttcagagagacttggtcatggagccaggcacagcccagtattcctctggaggtgaactgggaggcatttcaacaacaaatgtcagtaccccagacactgcaggggaaatggaacatgggctcatgaacccagatgccactgtttggaagaatgtgcttcagggaggggaaagtacaaaggaaagatttgagaactctaatattggcacagctggagcctctgacgtgcacgtcacaagtaagcctgtggataaaatcagtgttccaaactgtgcccctgccgccagttccctggatggtaacaaacctgctgagtcttcacttgcatttagtaatgaagaaacctccactgaaaaaacagcagaaacggaaacttcacgaagtcgtgaggagagtgctgatgctccagtagatcagaattctgtggtgattccagctgctgcaaaagacaagatttcagatggattagaaccttatactctcttagcagcaggcataggtgaggcaatgtcaccctcagatttagcccttcttgggctggaagaagatgtaatgccacaccagaactcagaaacaaattcatctcatgctcaaagccaaaagggcaaatcctcacccatttgttctacaactggagacgataaactttgtgcagactctgcatgtcaacagaacacagtgacttctagtggcgatttggttgcaaaactgtgtgataacatagttagcgagtccgaaagcaccacagcaaggcaacccagctcacaagatccacccgatgcctcccactgtgaagacccacaggctcatacagtcacctctgaccctgtaagggatacccaggaacgtgcggatttttgtcctttcaaagtggtggataacaaaggccaacgaaaagatgtgaaactagataaacctttaacaaatatgcttgaggtggtttcacatccacatccagttgtccctaaaatggagaaagaactggtgccagaccaggcagtaatatcagacagtactttctctctggcaaacagtccaggcagtgaatcagtaaccaaggatgacgcactttcttttgtcccctcccagaaagaaaagggaacagcaactcctgaactacatacagctacagattatagagatggcccagatggaaattcgaatgagcctgatacgcggccactagaagacagggcagcaggcctgtccacatcctccactgctgcagagcttcagcacgggatggggaataccagtctcacaggacttggtggagagcatgagggtcctgcccctccagcaatcccagaagctctgaatatcaaggggaacactgactcttccctgcaaagtatgggtaaggccactttggctttagattcagttttgactgaagaaggaaaacttctggtggtttcagaaagctctgcagctcaggaacaagataaggataaagcggtgacctgttcctctattaaggaaaatgctctctcttcaggaactttgcaggaagagcagagaacaccacctcctggacaagatactcaacaatttcatgaaaaatcaatctcagctgactgtgccaaggacaaagcacttcagctaagtaattcaccgggtgcatcctctgcctttcttaaggcagaaactgaacataacaaggaagtggccccacaagtctcactgctgactcaaggtggggctgcccagagcctggtgccaccaggagcaagtctggccacagagtcaaggcaggaagccttgggggcagagcacaacagctctgctctgttgccatgtctgttgccagatgggtctgatgggtccgatgctcttaactgcagtcaggcttctcctctggatgttggagtgaagaacactcaatcccagggaaaaactagtgcctgtgaggtgagtggaaatgtgacggtggatgttacaggggttaatgctctacaaggtatggctgagcccagaagagagaatatatcacacaacacccaagacatcctgattccaaacgtcttgttgagccaagagaagaatgccgttctaggtttgccagtggctctacaggacaaagctgtgactgacccacagggagttggaaccccagagatgatacctcttgattgggagaaagggaagctggagggagcagaccacagctgtaccatgggtgacgctgaggaagcccaaatagacgatgaagcacatcctgtcctactgcagcctgttgccaaggagctccccacagacatggagctctcagcccatgatgatggggccccagctggtgtgagggaagtcacgcgagccccgccttcaggcagagaaaggagcactccctctctaccttgcatggtctctgcccaggacgcacctctgcctaagggagcagacttgatagaggaggctgccagccgtatagtggatgctgtcatcgaacaagtcaaggccgctggagcactgcttactgagggggaggcctgtcacatgtcactgtccagccctgagttgggtcctctcactaaaggactagagagtgcttttacagaaaaagtgagtactttcccacctggggagagcctaccaatgggcagtactcctgaggaagccacggggagccttgcaggatgttttgctggaagggaggagccagagaagatcattttacctgtccaggggcctgagccagcagcagaaatgccagacgtgaaagctgaagatgaagtggattttagagcaagttcaatttctgaagaagtggctgtagggagcatagctgctacactgaagatgaagcaaggcccaatgacccaggcgataaaccgagaaaactggtgtacaatagagccatgccctgatgcagcatctcttctggcttccaagcagagcccagaatgtgagaacttcctggatgttggactgggcagagagtgtacctcaaaacaaggtgtacttaaaagagaatctgggagtgattctgacctctttcactcacccagtgatgacatggacagcatcatcttcccaaagccagaggaagagcatttggcctgtgatatcaccggatccagttcatccaccgatgacacggcttcactggaccgacattcttctcatggcagtgatgtgtctctctcccagattttaaagccaaacaggtcaagagatcggcaaagccttgatggattctacagccatgggatgggagctgagggtcgagaaagtgagagtgagcctgctgacccaggcgacgtggaggaggaggagatggacagtatcactgaagtgcctgcaaactgctctgtcctaaggagctccatgcgctctctttctcccttccggaggcacagctgggggcctgggaaaaatgcagccagcgatgcagaaatgaaccaccggagttcaatgcgagttcttggggatgttgtcaggagacctcccattcataggagaagtttcagtctagaaggcttgacaggaggagctggtgtcggaaacaagccatcctcatctctagaagtaagctctgcaaatgccgaagagctcagacacccattcagtggtgaggaacgggttgactctttggtgtcactttcagaagaggatctggagtcagaccagagagaacataggatgtttgatcagcagatatgtcacagatctaagcagcagggatttaattactgtacatcagccatttcctctccattgacaaaatccatctcattaatgacaatcagccatcctggattggacaattcacggcccttccacagtaccttccacaataccagtgctaatctgactgagagtataacagaagagaactataatttcctgccacatagcccctccaagaaagattctgaatggaagagtggaacaaaagtcagtcgtacattcagctacatcaagaataaaatgtctagcagcaagaagagcaaagaaaaggaaaaagaaaaagataagattaaggagaaggagaaagattctaaagacaaggagaaagataagaagactgtcaacgggcacactttcagttccattcctgttgtgggtcccatcagctgtagccagtgtatgaagcccttcaccaacaaagatgcctatacttgtgcaaattgcagtgcttttgtccacaaaggctgccgagaaagtctagcctcctgtgcaaaggtcaaaatgaagcagcccaaagggagccttcaggcacatgacacatcatcactgcccacggtcattatgagaaacaagccctcacagcccaaggagcgtcctcggtccgcagtcctcctggtggatgaaaccgctaccaccccaatatttgccaatagacgatcccagcagagtgtctcgctctccaaaagtgtctccatacagaacattactggagttggcaatgatgagaacatgtcaaacacctggaaattcctgtctcattcaacagactcactaaataaaatcagcaaggtcaatgagtcaacagaatcacttactgatgagggagggtacagacatgaatgaaggacaactactgggagactttgagattgagtccaaacagctggaagcagagtcttggagtcggataatagacagcaagtttctaaaacagcaaaagaaagatgtggtcaaacggcaagaagtaatatatgagttgatgcagacagagtttcatcatgtccgcactctcaagatcatgagtggtgtgtacagccaggggatgatggcggatctgctttttgagcagcagatggtagaaaagctgttcccctgtttggatgagctgatcagtatccatagccaattcttccagaggattctggagcggaagaaggagtctctggtggataaaagtgaaaagaactttctcatcaagaggataggggatgtgcttgtaaatcagttttcaggtgagaatgcagaacgtttaaagaagacatatggcaagttttgtgggcaacataaccagtctgtaaactacttcaaagacctttatgccaaggataagcgttttcaagcctttgtaaaggtattgataagaaacatgaaaatccccgttattgttgagagccatgtgtccctgtcggctttcactagagcctttttcatgtgattcctcacagtctgtttactcccttgcagaagaagatgagcagttcagttgttagaaggcttggaattccagagtgcatattgcttgtaactcagcggattaccaagtacccagttttattccaaagaatattgcagtgtaccaaagacaatgaagtggagcaggaagatctagcacagtccttgagcctggtgaaggatgtgattggagctgtagacagcaaagtggcaagttatgaaaagaaagtgcgtctcaatgagatttatacaaagacagatagcaagtcaatcatgaggatgaagagtggtcagatgtttgccaaggaagatttgaaacggaagaagcttgtacgtgatgggagtgtgtttctgaagaatgcagcaggaaggttgaaagaggttcaagcagttcttctcactgacattttagttttccttcaagaaaaagaccagaagtacatctttgcatcattggaccagaagtcaacagtgatctctttaaagaagctgattgtgagagaagtggcacatgaggagaaaggtttattcctgatcagcatggggatgacagatccagagatggtagaagtccatgccagctccaaagaggaacgaaacagctggattcagatcattcaggacacaatcaacaccctgaacagagatgaagatgaaggaattcctagtgagaatgaggaagaaaagaaaatgttggacaccagagcccgagaattaaaagaacaacttcaccagaaggaccaaaaaatcctactcttgttggaagagaaggagatgattttccgggacatggctgagtgcagcacccctctcccagaggattgctccccaacacatagccctagagttctcttccgctccaacacagaagaggctctcaaaggaggacctttaatgaaaagtgcaataaatgaggtggagatccttcagggtttggtgagtggaaatctgggaggcacacttgggccgactgtcagcagccccattgagcaagatgtggtcggtcccgtttccctgccccggagagcagagacctttggaggatttgacagccatcagatgaatgcttcaaaaggaggcgagaaggaagagggagatgatggccaagatcttaggagaacggaatcagatagtggcctaaaaaagggtggaaatgctaacctggtatttatgcttaaaagaaacagtgagcaggttgtccagagcgttgttcatctctacgagctcctcagcgctctgcagggtgtggtgctgcagcaggacagctacattgaggaccagaaactggtgctgagcgagagggcgctcactcgcagcttgtcccgcccgagctccctcattgagcaggagaagcagcgcagcctggagaagcagcgccaggacctggccaacctgcagaagcagcaggcccagtacctcgaggagaagcgcaggcgcgagcgtgagtgggaagctcgtgagagggagctgcgggagcgggaggccctcctggcccagcgcgaggaggaggtgcagcaggggcagcaggacctggaaaaggagcgggaggagctccagcagaagaagggcacataccagtatgacctggagcgactgcgtgctgcccagaaacagcttgagagggaacaggagcagctgcgccgggaggcagagcggctcagccagcggcagacagaacgggacctgtgtcaggtttcccatccacataccaagctgatgaggatcccatcgttcttccccagtcctgaggagcccccctcgccatctgcaccttccatagccaaatcagggtcattggactcagaactttcagtgtccccaaaaaggaacagcatctctcggacacacaaagataaggggccttttcacatactgagttcaaccagccagacaaacaaaggaccagaagggcagagccaggcccctgcgtccacctctgcctctacccgcctgtttgggttaacaaagccaaaggaaaagaaggagaaaaaaaagaagaacaaaaccagccgctctcagcccggtgatggtcccgcgtcagaagtatcagcagagggtgaagagatcttctgctgaccctcttcctctctgctgaggcagctgcctcctgatcctggccagcccacctctcctgctgtccccgcgtgcacaagtctcttacactggacgcccactgctcctcagcgtccagtcctcctgggcggccccaggtcctggacaataagcaacagatgatattgagtgtcgggtggggaaggaggcccagactctgcttcggccatgatttgtgactgcccaggactctcaggttgggctggccctactcaggattacactgaaagtaatggcctcgtaagtacaggtgatggttttggacacgtcaggaattcctaaaggctgaaagagtgtatccaagtaaggtctgaacctccgactgccttttatttgggggaacacaaaaccaaacagcagatgttttggacttgatctgtgtacgtacatggggacctgtctgcatatacacacggggaatgccagaagaaggcccagtctgcaccaggcgtctggtcaacttagcacaagggcagtgcctggacggacccggagcccccgcatatcagcagttcacccagtactcctcagagactggtttccctctaaacccatcccgggcacataccacccctgttttgcatgtatttctcatttcattttagggatgacaaacatttgtgaaaccagtgagagaaggcttgatgtgtataaaagacgtgatgtgcaccacctcgatctcggtgtttcaggcactaaagcaacaaaacaacccatagtatctcattttgtcatcagatccagaagaaatatcctggttttccagcatgtttacccacatgttttgggcatggataaagtgaagaggcctactcaccattatccctgcagcgtgacaccttttgattgtcactgaccactcagaaggggccacggcctcctggctgtgttcctgagcccccgtcgtgcctctcccagacagcagctgtctggcccttgctgggtgagggcacaccactgccaggggtcagcctcgcacccaggccaggcagaagctgtgctctgaagctaggacagctggctgagaagtgggttcaggcgaagggtgaagccatgtgtagcagttcctgccagtgcagatctggagaggagctggcccggaaggcgtggttgtgaaagcgcccttcttatgttaggaggccttggcaaaattggatttcttcaaaaatacatgtaaaggtctgttgttgaattgtactctgcccctggaagcagatacagatggctgcctgctgctcggctttgcttttgcttttcccaccgtgttttcatctttgttcacttgaggctttccccagctggtgtgtgcaggacagttcatggtaatgttgccctctgaggccccgtacaccagaagggaggccctggaaaattttgtgcttccaacgtggccttcaattcttgcttttttgcccctcggaagcatggggcttttgagcacacttaaaaaaagaaaaatctgtaacttggtgcttattgatgaattgcaagctggccttgcagatggagatatttatctttcagtttatttgaaagaggtctggtttaaaatttgtagcctacatttgttttatttattgtatttgtgtgtttgtgtttgtttttttttaagggtgagccaggtctagcccaacagtctaaactatccagtcaataccgagtgaagtggcagccagcactgttcactctgtgtcttttgaagtgccttgaaggcccagatgaaattttaaagggagggggtccatgtccttccctcccccaccccgcctcattctttaatcaaaggatgtcttctcccttgtttgagaatgaagaaactcgccacctctgacctacctttgcctttttctgtcatggagaatactcacccttcagaaacagaccaaaggccaaaacctgctgatttttctattgaaaatatgtccccttgcaaagaccctaaacaaaaagttaagtttctttctttcacctatttgtacaactccaagttacagctgaatctgtcgtgactttcctgagatctacccggggcttggctgtctgttctgggcactggctccgagttcccctcctgggatttgcaggagggcagtactgaacctgcattcttctccttgtaaatgtaggccgggtgcccctgttctccgggtttggaacaatacgaggttggtgctgatgggatttacttgcgtacgtgctcttcacaaaaacaccgtggatgctgaagttagagcacgtcgccacagagcttgacatcaatgttagagggtctcttactccccgcccagctgtgatgtttcatctgctttggttgttttggtggtcttttttaaaaatagagatttcacatctgcccagaccccactcaaaacgatttggtcaggttctggttggacaagtttaaaatcaaagtagtgcccggaattccctcaaaccacccaacttcatccaggaatacagtctgcagtgcagcaacagaaccgcttaccaagaactgtgcttacatacctttgtcatctctcttccccccttggaagttgtcctcagggggatttgttcctgtcctggggatttacctgggatggtggctgcctgtgcttttgctcatggccttgacagtgctctagttgctggatctaatggcctgtcttggtttctatcacatgagaaggggttgtttttttggggtgactcggactgaattccccatactgtt

SEQ ID NO: 362018 - DNA, 11561 bp, Homo sapiens
agcgggaagcgcctgtgctctgccgagactgccgtgcccattgctcgcctcggtcgccgccgctttagcccgcctccgggggagcggccgcctattgtctttctccgcggcgaaggtgaagagttgtcccagctcggcccgcgggggagccccgggagccgcacgtgtcctgggtcatgaaacttaatccacagcaagctcccttatatggtgattgtgttgttacagtgctgcttgctgaagaggacaaagctgaagatgatgtagtgttttacttggtatttttgggttccaccctccgtcactgtacaagtactcggaaggtcagttctgatacattggagaccattgctcctggtcatgattgttgtgaaacagtgaaggtgcagctctgtgcttccaaagagggccttcccgtgtttgtggtggctgaagaagactttcatttcgtccaggatgaagcgtatgatgcagctcaattcctagcaaccagtgctggaaatcagcaggctttgaactttacccgttttcttgaccagtcaggacccccatctggggatgtgaattcccttgataagaagttggtgctggcattcaggcacctgaagctgcccacggagtggaatgtattggggacagatcagagtttgcatgatgctggcccgcgagagacattgatgcattttgctgtgcggctgggactgctgaggttgacgtggttcctgttgcagaagccaggtggccgcggagctctcagtatccacaaccaggaaggggcgacgcctgtgagcttggccttggagcgaggctatcacaagctgcaccagcttctaaccgaggagaatgctggagaaccagactcctggagcagtttatcctatgaaataccgtatggagactgttctgtgaggcatcatcgagagttggacatctatacattaacctctgagtctgattcacatcatgaacacccatttcctggagacggttgcactggaccaatttttaaacttatgaacatccaacagcaactaatgaaaacaaacctcaagcagatggacagtcttatgcccttaatgatgacagcacaggatccttccagtgccccagagacagatggccagtttcttccctgtgcaccggagcccacggaccctcagcgactttcttcttctgaagagactgagagcactcagtgctgcccagggagccctgttgcacagactgaaagtccctgtgatttgtcaagcatagttgaggaggagaatacagaccgttcctgtaggaagaaaaataaaggcgtggaaagaaaaggggaagaggtggagccagcacctattgtggactctggaactgtatctgatcaagacagctgccttcagagcttgcctgattgtggagtaaagggcacggaaggcctttcgtcctgtggaaacagaaatgaagaaactggaacaaaatcttctggaatgcccacagaccaggagtccctgagcagtggagatgctgtgcttcagagagacttggtcatggagccaggcacagcccagtattcctctggaggtgaactgggaggcatttcaacaacaaatgtcagtaccccagacactgcaggggaaatggaacatgggctcatgaacccagatgccactgtttggaagaatgtgcttcagggaggggaaagtacaaaggaaagatttgagaactctaatattggcacagctggagcctctgacgtgcacgtcacaagtaagcctgtggataaaatcagtgttccaaactgtgcccctgccgccagttccctggatggtaacaaacctgctgagtcttcacttgcatttagtaatgaagaaacctccactgaaaaaacagcagaaacggaaacttcacgaagtcgtgaggagagtgctgatgctccagtagatcagaattctgtggtgattccagctgctgcaaaagacaagatttcagatggattagaaccttatactctcttagcagcaggcataggtgaggcaatgtcaccctcagatttagcccttcttgggctggaagaagatgtaatgccacaccagaactcagaaacaaattcatctcatgctcaaagccaaaagggcaaatcctcacccatttgttctacaactggagacgataaactttgtgcagactctgcatgtcaacagaacacagtgacttctagtggcgatttggttgcaaaactgtgtgataacatagttagcgagtccgaaagcaccacagcaaggcaacccagctcacaagatccacccgatgcctcccactgtgaagacccacaggctcatacagtcacctctgaccctgtaagggatacccaggaacgtgcggatttttgtcctttcaaagtggtggataacaaaggccaacgaaaagatgtgaaactagataaacctttaacaaatatgcttgaggtggtttcacatccacatccagttgtccctaaaatggagaaagaactggtgccagaccaggcagtaatatcagacagtactttctctctggcaaacagtccaggcagtgaatcagtaaccaaggatgacgcactttcttttgtcccctcccagaaagaaaagggaacagcaactcctgaactacatacagctacagattatagagatggcccagatggaaattcgaatgagcctgatacgcggccactagaagacagggcagcaggcctgtccacatcctccactgctgcagagcttcagcacgggatggggaataccagtctcacaggacttggtggagagcatgagggtcctgcccctccagcaatcccagaagctctgaatatcaaggggaacactgactcttccctgcaaagtatgggtaaggccactttggctttagattcagttttgactgaagaaggaaaacttctggtggtttcagaaagctctgcagctcaggaacaagataaggataaagcggtgacctgttcctctattaaggaaaatgctctctcttcaggaactttgcaggaagagcagagaacaccacctcctggacaagatactcaacaatttcatgaaaaatcaatctcagctgactgtgccaaggacaaagcacttcagctaagtaattcaccgggtgcatcctctgcctttcttaaggcagaaactgaacataacaaggaagtggccccacaagtctcactgctgactcaaggtggggctgcccagagcctggtgccaccaggagcaagtctggccacagagtcaaggcaggaagccttgggggcagagcacaacagctctgctctgttgccatgtctgttgccagatgggtctgatgggtccgatgctcttaactgcagtcaggcttctcctctggatgttggagtgaagaacactcaatcccagggaaaaactagtgcctgtgaggtgagtggaaatgtgacggtggatgttacaggggttaatgctctacaaggtatggctgagcccagaagagagaatatatcacacaacacccaagacatcctgattccaaacgtcttgttgagccaagagaagaatgccgttctaggtttgccagtggctctacaggacaaagctgtgactgacccacagggagttggaaccccagagatgatacctcttgattgggagaaagggaagctggagggagcagaccacagctgtaccatgggtgacgctgaggaagcccaaatagacgatgaagcacatcctgtcctactgcagcctgttgccaaggagctccccacagacatggagctctcagcccatgatgatggggccccagctggtgtgagggaagtcacgcgagccccgccttcaggcagagaaaggagcactccctctctaccttgcatggtctctgcccaggacgcacctctgcctaagggagcagacttgatagaggaggctgccagccgtatagtggatgctgtcatcgaacaagtcaaggccgctggagcactgcttactgagggggaggcctgtcacatgtcactgtccagccctgagttgggtcctctcactaaaggactagagagtgcttttacagaaaaagtgagtactttcccacctggggagagcctaccaatgggcagtactcctgaggaagccacggggagccttgcaggatgttttgctggaagggaggagccagagaagatcattttacctgtccaggggcctgagccagcagcagaaatgccagacgtgaaagctgaagatgaagtggattttagagcaagttcaatttctgaagaagtggctgtagggagcatagctgctacactgaagatgaagcaaggcccaatgacccaggcgataaaccgagaaaactggtgtacaatagagccatgccctgatgcagcatctcttctggcttccaagcagagcccagaatgtgagaacttcctggatgttggactgggcagagagtgtacctcaaaacaaggtgtacttaaaagagaatctgggagtgattctgacctctttcactcacccagtgatgacatggacagcatcatcttcccaaagccagaggaagagcatttggcctgtgatatcaccggatccagttcatccaccgatgacacggcttcactggaccgacattcttctcatggcagtgatgtgtctctctcccagattttaaagccaaacaggtcaagagatcggcaaagccttgatggattctacagccatgggatgggagctgagggtcgagaaagtgagagtgagcctgctgacccaggcgacgtggaggaggaggagatggacagtatcactgaagtgcctgcaaactgctctgtcctaaggagctccatgcgctctctttctcccttccggaggcacagctgggggcctgggaaaaatgcagccagcgatgcagaaatgaaccaccggagttcaatgcgagttcttggggatgttgtcaggagacctcccattcataggagaagtttcagtctagaaggcttgacaggaggagctggtgtcggaaacaagccatcctcatctctagaagtaagctctgcaaatgccgaagagctcagacacccattcagtggtgaggaacgggttgactctttggtgtcactttcagaagaggatctggagtcagaccagagagaacataggatgtttgatcagcagatatgtcacagatctaagcagcagggatttaattactgtacatcagccatttcctctccattgacaaaatccatctcattaatgacaatcagccatcctggattggacaattcacggcccttccacagtaccttccacaataccagtgctaatctgactgagagtataacagaagagaactataatttcctgccacatagcccctccaagaaagattctgaatggaagagtggaacaaaagtcagtcgtacattcagctacatcaagaataaaatgtctagcagcaagaagagcaaagaaaaggaaaaagaaaaagataagattaaggagaaggagaaagattctaaagacaaggagaaagataagaagactgtcaacgggcacactttcagttccattcctgttgtgggtcccatcagctgtagccagtgtatgaagcccttcaccaacaaagatgcctatacttgtgcaaattgcagtgcttttgtccacaaaggctgccgagaaagtctagcctcctgtgcaaaggtcaaaatgaagcagcccaaagggagccttcaggcacatgacacatcatcactgcccacggtcattatgagaaacaagccctcacagcccaaggagcgtcctcggtccgcagtcctcctggtggatgaaaccgctaccaccccaatatttgccaatagacgatcccagcagagtgtctcgctctccaaaagtgtctccatacagaacattactggagttggcaatgatgagaacatgtcaaacacctggaaattcctgtctcattcaacagactcactaaataaaatcagcaaggtcaatgagtcaacagaatcacttactgatgagggagggtacagacatgaatgaaggacaactactgggagactttgagattgagtccaaacagctggaagcagagtcttggagtcggataatagacagcaagtttctaaaacagcaaaagaaagatgtggtcaaacggcaagaagtaatatatgagttgatgcagacagagtttcatcatgtccgcactctcaagatcatgagtggtgtgtacagccaggggatgatggcggatctgctttttgagcagcagatggtagaaaagctgttcccctgtttggatgagctgatcagtatccatagccaattcttccagaggattctggagcggaagaaggagtctctggtggataaaagtgaaaagaactttctcatcaagaggataggggatgtgcttgtaaatcagttttcaggtgagaatgcagaacgtttaaagaagacatatggcaagttttgtgggcaacataaccagtctgtaaactacttcaaagacctttatgccaaggataagcgttttcaagcctttgtaaagaagaagatgagcagttcagttgttagaaggcttggaattccagagtgcatattgcttgtaactcagcggattaccaagtacccagttttattccaaagaatattgcagtgtaccaaagacaatgaagtggagcaggaagatctagcacagtccttgagcctggtgaaggatgtgattggagctgtagacagcaaagtggcaagttatgaaaagaaagtgcgtctcaatgagatttatacaaagacagatagcaagtcaatcatgaggatgaagagtggtcagatgtttgccaaggaagatttgaaacggaagaagcttgtacgtgatgggagtgtgtttctgaagaatgcagcaggaaggttgaaagaggttcaagcagttcttctcactgacattttagttttccttcaagaaaaagaccagaagtacatctttgcatcattggaccagaagtcaacagtgatctctttaaagaagctgattgtgagagaagtggcacatgaggagaaaggtttattcctgatcagcatggggatgacagatccagagatggtagaagtccatgccagctccaaagaggaacgaaacagctggattcagatcattcaggacacaatcaacaccctgaacagagatgaagatgaaggaattcctagtgagaatgaggaagaaaagaaaatgttggacaccagagcccgagaattaaaagaacaacttcaccagaaggaccaaaaaatcctactcttgttggaagagaaggagatgattttccgggacatggctgagtgcagcacccctctcccagaggattgctccccaacacatagccctagagttctcttccgctccaacacagaagaggctctcaaaggaggacctttaatgaaaagtgcaataaatgaggtggagatccttcagggtttggtgagtggaaatctgggaggcacacttgggccgactgtcagcagccccattgagcaagatgtggtcggtcccgtttccctgccccggagagcagagacctttggaggatttgacagccatcagatgaatgcttcaaaaggaggcgagaaggaagagggagatgatggccaagatcttaggagaacggaatcagatagtggcctaaaaaagggtggaaatgctaacctggtatttatgcttaaaagaaacagtgagcaggttgtccagagcgttgttcatctctacgagctcctcagcgctctgcagggtgtggtgctgcagcaggacagctacattgaggaccagaaactggtgctgagcgagagggcgctcactcgcagcttgtcccgcccgagctccctcattgagcaggagaagcagcgcagcctggagaagcagcgccaggacctggccaacctgcagaagcagcaggcccagtacctcgaggagaagcgcaggcgcgagcgtgagtgggaagctcgtgagagggagctgcgggagcgggaggccctcctggcccagcgcgaggaggaggtgcagcaggggcagcaggacctggaaaaggagcgggaggagctccagcagaagaagggcacataccagtatgacctggagcgactgcgtgctgcccagaaacagcttgagagggaacaggagcagctgcgccgggaggcagagcggctcagccagcggcagacagaacgggacctgtgtcagatactacttgggggagggcagctaatgaaaccttcaagctctatgcagtccacagacgtgagctctgtagagttcgcagaggtgggtaagtacccagccagcacacccagttgaattcagccaggatttattgagttggcatcacggacgctgacagcctccaagtgaaaacccttctcttgaatatgtacaggtttcccatccacataccaagctgatgaggatcccatcgttcttccccagtcctgaggagcccccctcgccatctgcaccttccatagccaaatcagggtcattggactcagaactttcagtgtccccaaaaaggaacagcatctctcggacacacaaagataaggggccttttcacatactgagttcaaccagccagacaaacaaaggaccagaagggcagagccaggcccctgcgtccacctctgcctctacccgcctgtttgggttaacaaagccaaaggaaaagaaggagaaaaaaaagaagaacaaaaccagccgctctcagcccggtgatggtcccgcgtcagaagtatcagcagagggtgaagagatcttctgctgaccctcttcctctctgctgaggcagctgcctcctgatcctggccagcccacctctcctgctgtccccgcgtgcacaagtctcttacactggacgcccactgctcctcagcgtccagtcctcctgggcggccccaggtcctggacaataagcaacagatgatattgagtgtcgggtggggaaggaggcccagactctgcttcggccatgatttgtgactgcccaggactctcaggttgggctggccctactcaggattacactgaaagtaatggcctcgtaagtacaggtgatggttttggacacgtcaggaattcctaaaggctgaaagagtgtatccaagtaaggtctgaacctccgactgccttttatttgggggaacacaaaaccaaacagcagatgttttggacttgatctgtgtacgtacatggggacctgtctgcatatacacacggggaatgccagaagaaggcccagtctgcaccaggcgtctggtcaacttagcacaagggcagtgcctggacggacccggagcccccgcatatcagcagttcacccagtactcctcagagactggtttccctctaaacccatcccgggcacataccacccctgttttgcatgtatttctcatttcattttagggatgacaaacatttgtgaaaccagtgagagaaggcttgatgtgtataaaagacgtgatgtgcaccacctcgatctcggtgtttcaggcactaaagcaacaaaacaacccatagtatctcattttgtcatcagatccagaagaaatatcctggttttccagcatgtttacccacatgttttgggcatggataaagtgaagaggcctactcaccattatccctgcagcgtgacaccttttgattgtcactgaccactcagaaggggccacggcctcctggctgtgttcctgagcccccgtcgtgcctctcccagacagcagctgtctggcccttgctgggtgagggcacaccactgccaggggtcagcctcgcacccaggccaggcagaagctgtgctctgaagctaggacagctggctgagaagtgggttcaggcgaagggtgaagccatgtgtagcagttcctgccagtgcagatctggagaggagctggcccggaaggcgtggttgtgaaagcgcccttcttatgttaggaggccttggcaaaattggatttcttcaaaaatacatgtaaaggtctgttgttgaattgtactctgcccctggaagcagatacagatggctgcctgctgctcggctttgcttttgcttttcccaccgtgttttcatctttgttcacttgaggctttccccagctggtgtgtgcaggacagttcatggtaatgttgccctctgaggccccgtacaccagaagggaggccctggaaaattttgtgcttccaacgtggccttcaattcttgcttttttgcccctcggaagcatggggcttttgagcacacttaaaaaaagaaaaatctgtaacttggtgcttattgatgaattgcaagctggccttgcagatggagatatttatctttcagtttatttgaaagaggtctggtttaaaatttgtagcctacatttgttttatttattgtatttgtgtgtttgtgtttgtttttttttaagggtgagccaggtctagcccaacagtctaaactatccagtcaataccgagtgaagtggcagccagcactgttcactctgtgtcttttgaagtgccttgaaggcccagatgaaattttaaagggagggggtccatgtccttccctcccccaccccgcctcattctttaatcaaaggatgtcttctcccttgtttgagaatgaagaaactcgccacctctgacctacctttgcctttttctgtcatggagaatactcacccttcagaaacagaccaaaggccaaaacctgctgatttttctattgaaaatatgtccccttgcaaagaccctaaacaaaaagttaagtttctttctttcacctatttgtacaactccaagttacagctgaatctgtcgtgactttcctgagatctacccggggcttggctgtctgttctgggcactggctccgagttcccctcctgggatttgcaggagggcagtactgaacctgcattcttctccttgtaaatgtaggccgggtgcccctgttctccgggtttggaacaatacgaggttggtgctgatgggatttacttgcgtacgtgctcttcacaaaaacaccgtggatgctgaagttagagcacgtcgccacagagcttgacatcaatgttagagggtctcttactccccgcccagctgtgatgtttcatctgctttggttgttttggtggtcttttttaaaaatagagatttcacatctgcccagaccccactcaaaacgatttggtcaggttctggttggacaagtttaaaatcaaagtagtgcccggaattccctcaaaccacccaacttcatccaggaatacagtctgcagtgcagcaacagaaccgcttaccaagaactgtgcttacatacctttgtcatctctcttccccccttggaagttgtcctcagggggatttgttcctgtcctggggatttacctgggatggtggctgcctgtgcttttgctcatggccttgacagtgctctagttgctggatctaatggcctgtcttggtttctatcacatgagaaggggttgtttttttggggtgactcggactgaattccccatactgtt

SEQ ID NO: 362019 - DNA, 11451 bp, Homo sapiens
  misc_feature (8462)..(8462): n is a, c, g, or t
  misc_feature (8484)..(8484): n is a, c, g, or t
  misc_feature (8490)..(8490): n is a, c, g, or t
  misc_feature (8493)..(8493): n is a, c, g, or t
agcgggaagcgcctgtgctctgccgagactgccgtgcccattgctcgcctcggtcgccgccgctttagcccgcctccgggggagcggccgcctattgtctttctccgcggcgaaggtgaagagttgtcccagctcggcccgcgggggagccccgggagccgcacgtgtcctgggtcatgaaacttaatccacagcaagctcccttatatggtgattgtgttgttacagtgctgcttgctgaagaggacaaagctgaagatgatgtagtgttttacttggtatttttgggttccaccctccgtcactgtacaagtactcggaaggtcagttctgatacattggagaccattgctcctggtcatgattgttgtgaaacagtgaaggtgcagctctgtgcttccaaagagggccttcccgtgtttgtggtggctgaagaagactttcatttcgtccaggatgaagcgtatgatgcagctcaattcctagcaaccagtgctggaaatcagcaggctttgaactttacccgttttcttgaccagtcaggacccccatctggggatgtgaattcccttgataagaagttggtgctggcattcaggcacctgaagctgcccacggagtggaatgtattggggacagatcagagtttgcatgatgctggcccgcgagagacattgatgcattttgctgtgcggctgggactgctgaggttgacgtggttcctgttgcagaagccaggtggccgcggagctctcagtatccacaaccaggaaggggcgacgcctgtgagcttggccttggagcgaggctatcacaagctgcaccagcttctaaccgaggagaatgctggagaaccagactcctggagcagtttatcctatgaaataccgtatggagactgttctgtgaggcatcatcgagagttggacatctatacattaacctctgagtctgattcacatcatgaacacccatttcctggagacggttgcactggaccaatttttaaacttatgaacatccaacagcaactaatgaaaacaaacctcaagcagatggacagtcttatgcccttaatgatgacagcacaggatccttccagtgccccagagacagatggccagtttcttccctgtgcaccggagcccacggaccctcagcgactttcttcttctgaagagactgagagcactcagtgctgcccagggagccctgttgcacagactgaaagtccctgtgatttgtcaagcatagttgaggaggagaatacagaccgttcctgtaggaagaaaaataaaggcgtggaaagaaaaggggaagaggtggagccagcacctattgtggactctggaactgtatctgatcaagacagctgccttcagagcttgcctgattgtggagtaaagggcacggaaggcctttcgtcctgtggaaacagaaatgaagaaactggaacaaaatcttctggaatgcccacagaccaggagtccctgagcagtggagatgctgtgcttcagagagacttggtcatggagccaggcacagcccagtattcctctggaggtgaactgggaggcatttcaacaacaaatgtcagtaccccagacactgcaggggaaatggaacatgggctcatgaacccagatgccactgtttggaagaatgtgcttcagggaggggaaagtacaaaggaaagatttgagaactctaatattggcacagctggagcctctgacgtgcacgtcacaagtaagcctgtggataaaatcagtgttccaaactgtgcccctgccgccagttccctggatggtaacaaacctgctgagtcttcacttgcatttagtaatgaagaaacctccactgaaaaaacagcagaaacggaaacttcacgaagtcgtgaggagagtgctgatgctccagtagatcagaattctgtggtgattccagctgctgcaaaagacaagatttcagatggattagaaccttatactctcttagcagcaggcataggtgaggcaatgtcaccctcagatttagcccttcttgggctggaagaagatgtaatgccacaccagaactcagaaacaaattcatctcatgctcaaagccaaaagggcaaatcctcacccatttgttctacaactggagacgataaactttgtgcagactctgcatgtcaacagaacacagtgacttctagtggcgatttggttgcaaaactgtgtgataacatagttagcgagtccgaaagcaccacagcaaggcaacccagctcacaagatccacccgatgcctcccactgtgaagacccacaggctcatacagtcacctctgaccctgtaagggatacccaggaacgtgcggatttttgtcctttcaaagtggtggataacaaaggccaacgaaaagatgtgaaactagataaacctttaacaaatatgcttgaggtggtttcacatccacatccagttgtccctaaaatggagaaagaactggtgccagaccaggcagtaatatcagacagtactttctctctggcaaacagtccaggcagtgaatcagtaaccaaggatgacgcactttcttttgtcccctcccagaaagaaaagggaacagcaactcctgaactacatacagctacagattatagagatggcccagatggaaattcgaatgagcctgatacgcggccactagaagacagggcagcaggcctgtccacatcctccactgctgcagagcttcagcacgggatggggaataccagtctcacaggacttggtggagagcatgagggtcctgcccctccagcaatcccagaagctctgaatatcaaggggaacactgactcttccctgcaaagtatgggtaaggccactttggctttagattcagttttgactgaagaaggaaaacttctggtggtttcagaaagctctgcagctcaggaacaagataaggataaagcggtgacctgttcctctattaaggaaaatgctctctcttcaggaactttgcaggaagagcagagaacaccacctcctggacaagatactcaacaatttcatgaaaaatcaatctcagctgactgtgccaaggacaaagcacttcagctaagtaattcaccgggtgcatcctctgcctttcttaaggcagaaactgaacataacaaggaagtggccccacaagtctcactgctgactcaaggtggggctgcccagagcctggtgccaccaggagcaagtctggccacagagtcaaggcaggaagccttgggggcagagcacaacagctctgctctgttgccatgtctgttgccagatgggtctgatgggtccgatgctcttaactgcagtcaggcttctcctctggatgttggagtgaagaacactcaatcccagggaaaaactagtgcctgtgaggtgagtggaaatgtgacggtggatgttacaggggttaatgctctacaaggtatggctgagcccagaagagagaatatatcacacaacacccaagacatcctgattccaaacgtcttgttgagccaagagaagaatgccgttctaggtttgccagtggctctacaggacaaagctgtgactgacccacagggagttggaaccccagagatgatacctcttgattgggagaaagggaagctggagggagcagaccacagctgtaccatgggtgacgctgaggaagcccaaatagacgatgaagcacatcctgtcctactgcagcctgttgccaaggagctccccacagacatggagctctcagcccatgatgatggggccccagctggtgtgagggaagtcacgcgagccccgccttcaggcagagaaaggagcactccctctctaccttgcatggtctctgcccaggacgcacctctgcctaagggagcagacttgatagaggaggctgccagccgtatagtggatgctgtcatcgaacaagtcaaggccgctggagcactgcttactgagggggaggcctgtcacatgtcactgtccagccctgagttgggtcctctcactaaaggactagagagtgcttttacagaaaaagtgagtactttcccacctggggagagcctaccaatgggcagtactcctgaggaagccacggggagccttgcaggatgttttgctggaagggaggagccagagaagatcattttacctgtccaggggcctgagccagcagcagaaatgccagacgtgaaagctgaagatgaagtggattttagagcaagttcaatttctgaagaagtggctgtagggagcatagctgctacactgaagatgaagcaaggcccaatgacccaggcgataaaccgagaaaactggtgtacaatagagccatgccctgatgcagcatctcttctggcttccaagcagagcccagaatgtgagaacttcctggatgttggactgggcagagagtgtacctcaaaacaaggtgtacttaaaagagaatctgggagtgattctgacctctttcactcacccagtgatgacatggacagcatcatcttcccaaagccagaggaagagcatttggcctgtgatatcaccggatccagttcatccaccgatgacacggcttcactggaccgacattcttctcatggcagtgatgtgtctctctcccagattttaaagccaaacaggtcaagagatcggcaaagccttgatggattctacagccatgggatgggagctgagggtcgagaaagtgagagtgagcctgctgacccaggcgacgtggaggaggaggagatggacagtatcactgaagtgcctgcaaactgctctgtcctaaggagctccatgcgctctctttctcccttccggaggcacagctgggggcctgggaaaaatgcagccagcgatgcagaaatgaaccaccggagttcaatgcgagttcttggggatgttgtcaggagacctcccattcataggagaagtttcagtctagaaggcttgacaggaggagctggtgtcggaaacaagccatcctcatctctagaagtaagctctgcaaatgccgaagagctcagacacccattcagtggtgaggaacgggttgactctttggtgtcactttcagaagaggatctggagtcagaccagagagaacataggatgtttgatcagcagatatgtcacagatctaagcagcagggatttaattactgtacatcagccatttcctctccattgacaaaatccatctcattaatgacaatcagccatcctggattggacaattcacggcccttccacagtaccttccacaataccagtgctaatctgactgagagtataacagaagagaactataatttcctgccacatagcccctccaagaaagattctgaatggaagagtggaacaaaagtcagtcgtacattcagctacatcaagaataaaatgtctagcagcaagaagagcaaagaaaaggaaaaagaaaaagataagattaaggagaaggagaaagattctaaagacaaggagaaagataagaagactgtcaacgggcacactttcagttccattcctgttgtgggtcccatcagctgtagccagtgtatgaagcccttcaccaacaaagatgcctatacttgtgcaaattgcagtgcttttgtccacaaaggctgccgagaaagtctagcctcctgtgcaaaggtcaaaatgaagcagcccaaagggagccttcaggcacatgacacatcatcactgcccacggtcattatgagaaacaagccctcacagcccaaggagcgtcctcggtccgcagtcctcctggtggatgaaaccgctaccaccccaatatttgccaatagacgatcccagcagagtgtctcgctctccaaaagtgtctccatacagaacattactggagttggcaatgatgagaacatgtcaaacacctggaaattcctgtctcattcaacagactcactaaataaaatcagcaaggtcaatgagtcaacagaatcacttactgatgagggagggtacagacatgaatgaaggacaactactgggagactttgagattgagtccaaacagctggaagcagagtcttggagtcggataatagacagcaagtttctaaaacagcaaaagaaagatgtggtcaaacggcaagaagtaatatatgagttgatgcagacagagtttcatcatgtccgcactctcaagatcatgagtggtgtgtacagccaggggatgatggcggatctgctttttgagcagcagatggtagaaaagctgttcccctgtttggatgagctgatcagtatccatagccaattcttccagaggattctggagcggaagaaggagtctctggtggataaaagtgaaaagaactttctcatcaagaggataggggatgtgcttgtaaatcagttttcaggtgagaatgcagaacgtttaaagaagacatatggcaagttttgtgggcaacataaccagtctgtaaactacttcaaagacctttatgccaaggataagcgttttcaagcctttgtaaagaagaagatgagcagttcagttgttagaaggcttggaattccagagtgcatattgcttgtaactcagcggattaccaagtacccagttttattccaaagaatattgcagtgtaccaaagacaatgaagtggagcaggaagatctagcacagtccttgagcctggtgaaggatgtgattggagctgtagacagcaaagtggcaagttatgaaaagaaagtgcgtctcaatgagatttatacaaagacagatagcaagtcaatcatgaggatgaagagtggtcagatgtttgccaaggaagatttgaaacggaagaagcttgtacgtgatgggagtgtgtttctgaagaatgcagcaggaaggttgaaagaggttcaagcagttcttctcactgacattttagttttccttcaagaaaaagaccagaagtacatctttgcatcattggaccagaagtcaacagtgatctctttaaagaagctgattgtgagagaagtggcacatgaggagaaaggtttattcctgatcagcatggggatgacagatccagagatggtagaagtccatgccagctccaaagaggaacgaaacagctggattcagatcattcaggacacaatcaacaccctgaacagagatgaagatgaaggaattcctagtgagaatgaggaagaaaagaaaatgttggacaccagagcccgagaattaaaagaacaacttcaccagaaggaccaaaaaatcctactcttgttggaagagaaggagatgattttccgggacatggctgagtgcagcacccctctcccagaggattgctccccaacacatagccctagagttctcttccgctccaacacagaagaggctctcaaaggaggacctttaatgaaaagtgcaataaatgaggtggagatccttcagggtttggtgagtggaaatctgggaggcacacttgggccgactgtcagcagccccattgagcaagatgtggtcggtcccgtttccctgccccggagagcagagacctttggaggatttgacagccatcagatgaatgcttcaaaaggaggcgagaaggaagagggagatgatggccaagatcttaggagaacggaatcagatagtggcctaaaaaagggtggaaatgctaacctggtatttatgcttaaaagaaacagtgagcaggttgtccagagcgttgttcatctctacgagctcctcagcgctctgcagggtgtggtgctgcagcaggacagctacattgaggaccagaaactggtgctgagcgagagggcgctcactcgcagcttgtcccgcccgagctccctcattgagcaggagaagcagcgcagcctggagaagcagcgccaggacctggccaacctgcagaagcagcaggcccagtacctcgaggagaagcgcaggcgcgagcgtgagtgggaagctcgtgagagggagctgcgggagcgggaggccctcctggcccagcgcgaggaggaggtgcagcaggggcagcaggacctggaaaaggagcgggaggagctccagcagaagaagggcacataccagtatgacctggagcgactgcgtgctgcccagaaacagcttgagagggaacaggagcagctgcgccgggaggcagagcggctcagccagcggcagacagaacgggacctgtgtcaggtttcccatccacataccaagctgatgaggatcccatcgttcttccccagtcctgaggagcccccctcgccatctgcaccttccatagccaaatcagggtcattggactcagaactttcagtgtccccaaaaaggaacagcatctctcggacacacaaagataaggggccttttcacatactgagttcaaccagccagacaaacaaaggaccagaagggcagagccaggnccctgcgtcccctctgcctcanccgccngtntgggttaacaaagccaaaggaaaaaaaaaggaccagaagggcagagccaggcccctgcgtccacctctgcctctacccgcctgtttgggttaacaaagccaaaggaaaagaaggagaaaaaaaagaagaacaaaaccagccgctctcagcccggtgatggtcccgcgtcagaagtatcagcagagggtgaagagatcttctgctgaccctcttcctctctgctgaggcagctgcctcctgatcctggccagcccacctctcctgctgtccccgcgtgcacaagtctcttacactggacgcccactgctcctcagcgtccagtcctcctgggcggccccaggtcctggacaataagcaacagatgatattgagtgtcgggtggggaaggaggcccagactctgcttcggccatgatttgtgactgcccaggactctcaggttgggctggccctactcaggattacactgaaagtaatggcctcgtaagtacaggtgatggttttggacacgtcaggaattcctaaaggctgaaagagtgtatccaagtaaggtctgaacctccgactgccttttatttgggggaacacaaaaccaaacagcagatgttttggacttgatctgtgtacgtacatggggacctgtctgcatatacacacggggaatgccagaagaaggcccagtctgcaccaggcgtctggtcaacttagcacaagggcagtgcctggacggacccggagcccccgcatatcagcagttcacccagtactcctcagagactggtttccctctaaacccatcccgggcacataccacccctgttttgcatgtatttctcatttcattttagggatgacaaacatttgtgaaaccagtgagagaaggcttgatgtgtataaaagacgtgatgtgcaccacctcgatctcggtgtttcaggcactaaagcaacaaaacaacccatagtatctcattttgtcatcagatccagaagaaatatcctggttttccagcatgtttacccacatgttttgggcatggataaagtgaagaggcctactcaccattatccctgcagcgtgacaccttttgattgtcactgaccactcagaaggggccacggcctcctggctgtgttcctgagcccccgtcgtgcctctcccagacagcagctgtctggcccttgctgggtgagggcacaccactgccaggggtcagcctcgcacccaggccaggcagaagctgtgctctgaagctaggacagctggctgagaagtgggttcaggcgaagggtgaagccatgtgtagcagttcctgccagtgcagatctggagaggagctggcccggaaggcgtggttgtgaaagcgcccttcttatgttaggaggccttggcaaaattggatttcttcaaaaatacatgtaaaggtctgttgttgaattgtactctgcccctggaagcagatacagatggctgcctgctgctcggctttgcttttgcttttcccaccgtgttttcatctttgttcacttgaggctttccccagctggtgtgtgcaggacagttcatggtaatgttgccctctgaggccccgtacaccagaagggaggccctggaaaattttgtgcttccaacgtggccttcaattcttgcttttttgcccctcggaagcatggggcttttgagcacacttaaaaaaagaaaaatctgtaacttggtgcttattgatgaattgcaagctggccttgcagatggagatatttatctttcagtttatttgaaagaggtctggtttaaaatttgtagcctacatttgttttatttattgtatttgtgtgtttgtgtttgtttttttttaagggtgagccaggtctagcccaacagtctaaactatccagtcaataccgagtgaagtggcagccagcactgttcactctgtgtcttttgaagtgccttgaaggcccagatgaaattttaaagggagggggtccatgtccttccctcccccaccccgcctcattctttaatcaaaggatgtcttctcccttgtttgagaatgaagaaactcgccacctctgacctacctttgcctttttctgtcatggagaatactcacccttcagaaacagaccaaaggccaaaacctgctgatttttctattgaaaatatgtccccttgcaaagaccctaaacaaaaagttaagtttctttctttcacctatttgtacaactccaagttacagctgaatctgtcgtgactttcctgagatctacccggggcttggctgtctgttctgggcactggctccgagttcccctcctgggatttgcaggagggcagtactgaacctgcattcttctccttgtaaatgtaggccgggtgcccctgttctccgggtttggaacaatacgaggttggtgctgatgggatttacttgcgtacgtgctcttcacaaaaacaccgtggatgctgaagttagagcacgtcgccacagagcttgacatcaatgttagagggtctcttactccccgcccagctgtgatgtttcatctgctttggttgttttggtggtcttttttaaaaatagagatttcacatctgcccagaccccactcaaaacgatttggtcaggttctggttggacaagtttaaaatcaaagtagtgcccggaattccctcaaaccacccaacttcatccaggaatacagtctgcagtgcagcaacagaaccgcttaccaagaactgtgcttacatacctttgtcatctctcttccccccttggaagttgtcctcagggggatttgttcctgtcctggggatttacctgggatggtggctgcctgtgcttttgctcatggccttgacagtgctctagttgctggatctaatggcctgtcttggtttctatcacatgagaaggggttgtttttttggggtgactcggactgaattccccatactgtt

SEQ ID NO: 362020 - DNA, 11314 bp, Homo sapiens
agcgggaagcgcctgtgctctgccgagactgccgtgcccattgctcgcctcggtcgccgccgctttagcccgcctccgggggagcggccgcctattgtctttctccgcggcgaaggtgaagagttgtcccagctcggcccgcgggggagccccgggagccgcacgtgtcctgggtcatgaaacttaatccacagcaagctcccttatatggtgattgtgttgttacagtgctgcttgctgaagaggacaaagctgaagatgatgtagtgttttacttggtatttttgggttccaccctccgtcactgtacaagtactcggaaggtcagttctgatacattggagaccattgctcctggtcatgattgttgtgaaacagtgaaggtgcagctctgtgcttccaaagagggccttcccgtgtttgtggtggctgaagaagactttcatttcgtccaggatgaagcgtatgatgcagctcaattcctagcaaccagtgctggaaatcagcaggctttgaactttacccgttttcttgaccagtcaggacccccatctggggatgtgaattcccttgataagaagttggtgctggcattcaggcacctgaagctgcccacggagtggaatgtattggggacagatcagagtttgcatgatgctggcccgcgagagacattgatgcattttgctgtgcggctgggactgctgaggttgacgtggttcctgttgcagaagccaggtggccgcggagctctcagtatccacaaccaggaaggggcgacgcctgtgagcttggccttggagcgaggctatcacaagctgcaccagcttctaaccgaggagaatgctggagaaccagactcctggagcagtttatcctatgaaataccgtatggagactgttctgtgaggcatcatcgagagttggacatctatacattaacctctgagtctgattcacatcatgaacacccatttcctggagacggttgcactggaccaatttttaaacttatgaacatccaacagcaactaatgaaaacaaacctcaagcagatggacagtcttatgcccttaatgatgacagcacaggatccttccagtgccccagagacagatggccagtttcttccctgtgcaccggagcccacggaccctcagcgactttcttcttctgaagagactgagagcactcagtgctgcccagggagccctgttgcacagactgaaagtccctgtgatttgtcaagcatagttgaggaggagaatacagaccgttcctgtaggaagaaaaataaaggcgtggaaagaaaaggggaagaggtggagccagcacctattgtggactctggaactgtatctgatcaagacagctgccttcagagcttgcctgattgtggagtaaagggcacggaaggcctttcgtcctgtggaaacagaaatgaagaaactggaacaaaatcttctggaatgcccacagaccaggagtccctgagcagtggagatgctgtgcttcagagagacttggtcatggagccaggcacagcccagtattcctctggaggtgaactgggaggcatttcaacaacaaatgtcagtaccccagacactgcaggggaaatggaacatgggctcatgaacccagatgccactgtttggaagaatgtgcttcagggaggggaaagtacaaaggaaagatttgagaactctaatattggcacagctggagcctctgacgtgcacgtcacaagtaagcctgtggataaaatcagtgttccaaactgtgcccctgccgccagttccctggatggtaacaaacctgctgagtcttcacttgcatttagtaatgaagaaacctccactgaaaaaacagcagaaacggaaacttcacgaagtcgtgaggagagtgctgatgctccagtagatcagaattctgtggtgattccagctgctgcaaaagacaagatttcagatggattagaaccttatactctcttagcagcaggcataggtgaggcaatgtcaccctcagatttagcccttcttgggctggaagaagatgtaatgccacaccagaactcagaaacaaattcatctcatgctcaaagccaaaagggcaaatcctcacccatttgttctacaactggagacgataaactttgtgcagactctgcatgtcaacagaacacagtgacttctagtggcgatttggttgcaaaactgtgtgataacatagttagcgagtccgaaagcaccacagcaaggcaacccagctcacaagatccacccgatgcctcccactgtgaagacccacaggctcatacagtcacctctgaccctgtaagggatacccaggaacgtgcggatttttgtcctttcaaagtggtggataacaaaggccaacgaaaagatgtgaaactagataaacctttaacaaatatgcttgaggtggtttcacatccacatccagttgtccctaaaatggagaaagaactggtgccagaccaggcagtaatatcagacagtactttctctctggcaaacagtccaggcagtgaatcagtaaccaaggatgacgcactttcttttgtcccctcccagaaagaaaagggaacagcaactcctgaactacatacagctacagattatagagatggcccagatggaaattcgaatgagcctgatacgcggccactagaagacagggcagcaggcctgtccacatcctccactgctgcagagcttcagcacgggatggggaataccagtctcacaggacttggtggagagcatgagggtcctgcccctccagcaatcccagaagctctgaatatcaaggggaacactgactcttccctgcaaagtatgggtaaggccactttggctttagattcagttttgactgaagaaggaaaacttctggtggtttcagaaagctctgcagctcaggaacaagataaggataaagcggtgacctgttcctctattaaggaaaatgctctctcttcaggaactttgcaggaagagcagagaacaccacctcctggacaagatactcaacaatttcatgaaaaatcaatctcagctgactgtgccaaggacaaagcacttcagctaagtaattcaccgggtgcatcctctgcctttcttaaggcagaaactgaacataacaaggaagtggccccacaagtctcactgctgactcaaggtggggctgcccagagcctggtgccaccaggagcaagtctggccacagagtcaaggcaggaagccttgggggcagagcacaacagctctgctctgttgccatgtctgttgccagatgggtctgatgggtccgatgctcttaactgcagtcaggcttctcctctggatgttggagtgaagaacactcaatcccagggaaaaactagtgcctgtgaggtgagtggaaatgtgacggtggatgttacaggggttaatgctctacaaggtatggctgagcccagaagagagaatatatcacacaacacccaagacatcctgattccaaacgtcttgttgagccaagagaagaatgccgttctaggtttgccagtggctctacaggacaaagctgtgactgacccacagggagttggaaccccagagatgatacctcttgattgggagaaagggaagctggagggagcagaccacagctgtaccatgggtgacgctgaggaagcccaaatagacgatgaagcacatcctgtcctactgcagcctgttgccaaggagctccccacagacatggagctctcagcccatgatgatggggccccagctggtgtgagggaagtcacgcgagccccgccttcaggcagagaaaggagcactccctctctaccttgcatggtctctgcccaggacgcacctctgcctaagggagcagacttgatagaggaggctgccagccgtatagtggatgctgtcatcgaacaagtcaaggccgctggagcactgcttactgagggggaggcctgtcacatgtcactgtccagccctgagttgggtcctctcactaaaggactagagagtgcttttacagaaaaagtgagtactttcccacctggggagagcctaccaatgggcagtactcctgaggaagccacggggagccttgcaggatgttttgctggaagggaggagccagagaagatcattttacctgtccaggggcctgagccagcagcagaaatgccagacgtgaaagctgaagatgaagtggattttagagcaagttcaatttctgaagaagtggctgtagggagcatagctgctacactgaagatgaagcaaggcccaatgacccaggcgataaaccgagaaaactggtgtacaatagagccatgccctgatgcagcatctcttctggcttccaagcagagcccagaatgtgagaacttcctggatgttggactgggcagagagtgtacctcaaaacaaggtgtacttaaaagagaatctgggagtgattctgacctctttcactcacccagtgatgacatggacagcatcatcttcccaaagccagaggaagagcatttggcctgtgatatcaccggatccagttcatccaccgatgacacggcttcactggaccgacattcttctcatggcagtgatgtgtctctctcccagattttaaagccaaacaggtcaagagatcggcaaagccttgatggattctacagccatgggatgggagctgagggtcgagaaagtgagagtgagcctgctgacccaggcgacgtggaggaggaggagatggacagtatcactgaagtgcctgcaaactgctctgtcctaaggagctccatgcgctctctttctcccttccggaggcacagctgggggcctgggaaaaatgcagccagcgatgcagaaatgaaccaccggagtttcagtctagaaggcttgacaggaggagctggtgtcggaaacaagccatcctcatctctagaagtaagctctgcaaatgccgaagagctcagacacccattcagtggtgaggaacgggttgactctttggtgtcactttcagaagaggatctggagtcagaccagagagaacataggatgtttgatcagcagatatgtcacagatctaagcagcagggatttaattactgtacatcagccatttcctctccattgacaaaatccatctcattaatgacaatcagccatcctggattggacaattcacggcccttccacagtaccttccacaataccagtgctaatctgactgagagtataacagaagagaactataatttcctgccacatagcccctccaagaaagattctgaatggaagagtggaacaaaagtcagtcgtacattcagctacatcaagaataaaatgtctagcagcaagaagagcaaagaaaaggaaaaagaaaaagataagattaaggagaaggagaaagattctaaagacaaggagaaagataagaagactgtcaacgggcacactttcagttccattcctgttgtgggtcccatcagctgtagccagtgtatgaagcccttcaccaacaaagatgcctatacttgtgcaaattgcagtgcttttgtccacaaaggctgccgagaaagtctagcctcctgtgcaaaggtcaaaatgaagcagcccaaagggagccttcaggcacatgacacatcatcactgcccacggtcattatgagaaacaagccctcacagcccaaggagcgtcctcggtccgcagtcctcctggtggatgaaaccgctaccaccccaatatttgccaatagacgatcccagcagagtgtctcgctctccaaaagtgtctccatacagaacattactggagttggcaatgatgagaacatgtcaaacacctggaaattcctgtctcattcaacagactcactaaataaaatcagcaaggtcaatgagtcaacagaatcacttactgatgagggagggtacagacatgaatgaaggacaactactgggagactttgagattgagtccaaacagctggaagcagagtcttggagtcggataatagacagcaagtttctaaaacagcaaaagaaagatgtggtcaaacggcaagaagtaatatatgagttgatgcagacagagtttcatcatgtccgcactctcaagatcatgagtggtgtgtacagccaggggatgatggcggatctgctttttgagcagcagatggtagaaaagctgttcccctgtttggatgagctgatcagtatccatagccaattcttccagaggattctggagcggaagaaggagtctctggtggataaaagtgaaaagaactttctcatcaagaggataggggatgtgcttgtaaatcagttttcaggtgagaatgcagaacgtttaaagaagacatatggcaagttttgtgggcaacataaccagtctgtaaactacttcaaagacctttatgccaaggataagcgttttcaagcctttgtaaagaagaagatgagcagttcagttgttagaaggcttggaattccagagtgcatattgcttgtaactcagcggattaccaagtacccagttttattccaaagaatattgcagtgtaccaaagacaatgaagtggagcaggaagatctagcacagtccttgagcctggtgaaggatgtgattggagctgtagacagcaaagtggcaagttatgaaaagaaagtgcgtctcaatgagatttatacaaagacagatagcaagtcaatcatgaggatgaagagtggtcagatgtttgccaaggaagatttgaaacggaagaagcttgtacgtgatgggagtgtgtttctgaagaatgcagcaggaaggttgaaagaggttcaagcagttcttctcactgacattttagttttccttcaagaaaaagaccagaagtacatctttgcatcattggaccagaagtcaacagtgatctctttaaagaagctgattgtgagagaagtggcacatgaggagaaaggtttattcctgatcagcatggggatgacagatccagagatggtagaagtccatgccagctccaaagaggaacgaaacagctggattcagatcattcaggacacaatcaacaccctgaacagagatgaagatgaaggaattcctagtgagaatgaggaagaaaagaaaatgttggacaccagagcccgagaattaaaagaacaacttcaccagaaggaccaaaaaatcctactcttgttggaagagaaggagatgattttccgggacatggctgagtgcagcacccctctcccagaggattgctccccaacacatagccctagagttctcttccgctccaacacagaagaggctctcaaaggaggacctttaatgaaaagtgcaataaatgaggtggagatccttcagggtttggtgagtggaaatctgggaggcacacttgggccgactgtcagcagccccattgagcaagatgtggtcggtcccgtttccctgccccggagagcagagacctttggaggatttgacagccatcagatgaatgcttcaaaaggaggcgagaaggaagagggagatgatggccaagatcttaggagaacggaatcagatagtggcctaaaaaagggtggaaatgctaacctggtatttatgcttaaaagaaacagtgagcaggttgtccagagcgttgttcatctctacgagctcctcagcgctctgcagggtgtggtgctgcagcaggacagctacattgaggaccagaaactggtgctgagcgagagggcgctcactcgcagcttgtcccgcccgagctccctcattgagcaggagaagcagcgcagcctggagaagcagcgccaggacctggccaacctgcagaagcagcaggcccagtacctcgaggagaagcgcaggcgcgagcgtgagtgggaagctcgtgagagggagctgcgggagcgggaggccctcctggcccagcgcgaggaggaggtgcagcaggggcagcaggacctggaaaaggagcgggaggagctccagcagaagaagggcacataccagtatgacctggagcgactgcgtgctgcccagaaacagcttgagagggaacaggagcagctgcgccgggaggcagagcggctcagccagcggcagacagaacgggacctgtgtcaggtttcccatccacataccaagctgatgaggatcccatcgttcttccccagtcctgaggagcccccctcgccatctgcaccttccatagccaaatcagggtcattggactcagaactttcagtgtccccaaaaaggaacagcatctctcggacacacaaagataaggggccttttcacatactgagttcaaccagccagacaaacaaaggaccagaagggcagagccaggcccctgcgtccacctctgcctctacccgcctgtttgggttaacaaagccaaaggaaaagaaggagaaaaaaaagaagaacaaaaccagccgctctcagcccggtgatggtcccgcgtcagaagtatcagcagagggtgaagagatcttctgctgaccctcttcctctctgctgaggcagctgcctcctgatcctggccagcccacctctcctgctgtccccgcgtgcacaagtctcttacactggacgcccactgctcctcagcgtccagtcctcctgggcggccccaggtcctggacaataagcaacagatgatattgagtgtcgggtggggaaggaggcccagactctgcttcggccatgatttgtgactgcccaggactctcaggttgggctggccctactcaggattacactgaaagtaatggcctcgtaagtacaggtgatggttttggacacgtcaggaattcctaaaggctgaaagagtgtatccaagtaaggtctgaacctccgactgccttttatttgggggaacacaaaaccaaacagcagatgttttggacttgatctgtgtacgtacatggggacctgtctgcatatacacacggggaatgccagaagaaggcccagtctgcaccaggcgtctggtcaacttagcacaagggcagtgcctggacggacccggagcccccgcatatcagcagttcacccagtactcctcagagactggtttccctctaaacccatcccgggcacataccacccctgttttgcatgtatttctcatttcattttagggatgacaaacatttgtgaaaccagtgagagaaggcttgatgtgtataaaagacgtgatgtgcaccacctcgatctcggtgtttcaggcactaaagcaacaaaacaacccatagtatctcattttgtcatcagatccagaagaaatatcctggttttccagcatgtttacccacatgttttgggcatggataaagtgaagaggcctactcaccattatccctgcagcgtgacaccttttgattgtcactgaccactcagaaggggccacggcctcctggctgtgttcctgagcccccgtcgtgcctctcccagacagcagctgtctggcccttgctgggtgagggcacaccactgccaggggtcagcctcgcacccaggccaggcagaagctgtgctctgaagctaggacagctggctgagaagtgggttcaggcgaagggtgaagccatgtgtagcagttcctgccagtgcagatctggagaggagctggcccggaaggcgtggttgtgaaagcgcccttcttatgttaggaggccttggcaaaattggatttcttcaaaaatacatgtaaaggtctgttgttgaattgtactctgcccctggaagcagatacagatggctgcctgctgctcggctttgcttttgcttttcccaccgtgttttcatctttgttcacttgaggctttccccagctggtgtgtgcaggacagttcatggtaatgttgccctctgaggccccgtacaccagaagggaggccctggaaaattttgtgcttccaacgtggccttcaattcttgcttttttgcccctcggaagcatggggcttttgagcacacttaaaaaaagaaaaatctgtaacttggtgcttattgatgaattgcaagctggccttgcagatggagatatttatctttcagtttatttgaaagaggtctggtttaaaatttgtagcctacatttgttttatttattgtatttgtgtgtttgtgtttgtttttttttaagggtgagccaggtctagcccaacagtctaaactatccagtcaataccgagtgaagtggcagccagcactgttcactctgtgtcttttgaagtgccttgaaggcccagatgaaattttaaagggagggggtccatgtccttccctcccccaccccgcctcattctttaatcaaaggatgtcttctcccttgtttgagaatgaagaaactcgccacctctgacctacctttgcctttttctgtcatggagaatactcacccttcagaaacagaccaaaggccaaaacctgctgatttttctattgaaaatatgtccccttgcaaagaccctaaacaaaaagttaagtttctttctttcacctatttgtacaactccaagttacagctgaatctgtcgtgactttcctgagatctacccggggcttggctgtctgttctgggcactggctccgagttcccctcctgggatttgcaggagggcagtactgaacctgcattcttctccttgtaaatgtaggccgggtgcccctgttctccgggtttggaacaatacgaggttggtgctgatgggatttacttgcgtacgtgctcttcacaaaaacaccgtggatgctgaagttagagcacgtcgccacagagcttgacatcaatgttagagggtctcttactccccgcccagctgtgatgtttcatctgctttggttgttttggtggtcttttttaaaaatagagatttcacatctgcccagaccccactcaaaacgatttggtcaggttctggttggacaagtttaaaatcaaagtagtgcccggaattccctcaaaccacccaacttcatccaggaatacagtctgcagtgcagcaacagaaccgcttaccaagaactgtgcttacatacctttgtcatctctcttccccccttggaagttgtcctcagggggatttgttcctgtcctggggatttacctgggatggtggctgcctgtgcttttgctcatggccttgacagtgctctagttgctggatctaatggcctgtcttggtttctatcacatgagaaggggttgtttttttggggtgactcggactgaattccccatactgtt

SEQ ID NO: 362021 - DNA, 11434 bp, Homo sapiens
agcgggaagcgcctgtgctctgccgagactgccgtgcccattgctcgcctcggtcgccgccgctttagcccgcctccgggggagcggccgcctattgtctttctccgcggcgaaggtgaagagttgtcccagctcggcccgcgggggagccccgggagccgcacgtgtcctgggtcatgaaacttaatccacagcaagctcccttatatggtgattgtgttgttacagtgctgcttgctgaagaggacaaagctgaagatgatgtagtgttttacttggtatttttgggttccaccctccgtcactgtacaagtactcggaaggtcagttctgatacattggagaccattgctcctggtcatgattgttgtgaaacagtgaaggtgcagctctgtgcttccaaagagggccttcccgtgtttgtggtggctgaagaagactttcatttcgtccaggatgaagcgtatgatgcagctcaattcctagcaaccagtgctggaaatcagcaggctttgaactttacccgttttcttgaccagtcaggacccccatctggggatgtgaattcccttgataagaagttggtgctggcattcaggcacctgaagctgcccacggagtggaatgtattggggacagatcagagtttgcatgatgctggcccgcgagagacattgatgcattttgctgtgcggctgggactgctgaggttgacgtggttcctgttgcagaagccaggtggccgcggagctctcagtatccacaaccaggaaggggcgacgcctgtgagcttggccttggagcgaggctatcacaagctgcaccagcttctaaccgaggagaatgctggagaaccagactcctggagcagtttatcctatgaaataccgtatggagactgttctgtgaggcatcatcgagagttggacatctatacattaacctctgagtctgattcacatcatgaacacccatttcctggagacggttgcactggaccaatttttaaacttatgaacatccaacagcaactaatgaaaacaaacctcaagcagatggacagtcttatgcccttaatgatgacagcacaggatccttccagtgccccagagacagatggccagtttcttccctgtgcaccggagcccacggaccctcagcgactttcttcttctgaagagactgagagcactcagtgctgcccagggagccctgttgcacagactgaaagtccctgtgatttgtcaagcatagttgaggaggagaatacagaccgttcctgtaggaagaaaaataaaggcgtggaaagaaaaggggaagaggtggagccagcacctattgtggactctggaactgtatctgatcaagacagctgccttcagagcttgcctgattgtggagtaaagggcacggaaggcctttcgtcctgtggaaacagaaatgaagaaactggaacaaaatcttctggaatgcccacagaccaggagtccctgagcagtggagatgctgtgcttcagagagacttggtcatggagccaggcacagcccagtattcctctggaggtgaactgggaggcatttcaacaacaaatgtcagtaccccagacactgcaggggaaatggaacatgggctcatgaacccagatgccactgtttggaagaatgtgcttcagggaggggaaagtacaaaggaaagatttgagaactctaatattggcacagctggagcctctgacgtgcacgtcacaagtaagcctgtggataaaatcagtgttccaaactgtgcccctgccgccagttccctggatggtaacaaacctgctgagtcttcacttgcatttagtaatgaagaaacctccactgaaaaaacagcagaaacggaaacttcacgaagtcgtgaggagagtgctgatgctccagtagatcagaattctgtggtgattccagctgctgcaaaagacaagatttcagatggattagaaccttatactctcttagcagcaggcataggtgaggcaatgtcaccctcagatttagcccttcttgggctggaagaagatgtaatgccacaccagaactcagaaacaaattcatctcatgctcaaagccaaaagggcaaatcctcacccatttgttctacaactggagacgataaactttgtgcagactctgcatgtcaacagaacacagtgacttctagtggcgatttggttgcaaaactgtgtgataacatagttagcgagtccgaaagcaccacagcaaggcaacccagctcacaagatccacccgatgcctcccactgtgaagacccacaggctcatacagtcacctctgaccctgtaagggatacccaggaacgtgcggatttttgtcctttcaaagtggtggataacaaaggccaacgaaaagatgtgaaactagataaacctttaacaaatatgcttgaggtggtttcacatccacatccagttgtccctaaaatggagaaagaactggtgccagaccaggcagtaatatcagacagtactttctctctggcaaacagtccaggcagtgaatcagtaaccaaggatgacgcactttcttttgtcccctcccagaaagaaaagggaacagcaactcctgaactacatacagctacagattatagagatggcccagatggaaattcgaatgagcctgatacgcggccactagaagacagggcagcaggcctgtccacatcctccactgctgcagagcttcagcacgggatggggaataccagtctcacaggacttggtggagagcatgagggtcctgcccctccagcaatcccagaagctctgaatatcaaggggaacactgactcttccctgcaaagtatgggtaaggccactttggctttagattcagttttgactgaagaaggaaaacttctggtggtttcagaaagctctgcagctcaggaacaagataaggataaagcggtgacctgttcctctattaaggaaaatgctctctcttcaggaactttgcaggaagagcagagaacaccacctcctggacaagatactcaacaatttcatgaaaaatcaatctcagctgactgtgccaaggacaaagcacttcagctaagtaattcaccgggtgcatcctctgcctttcttaaggcagaaactgaacataacaaggaagtggccccacaagtctcactgctgactcaaggtggggctgcccagagcctggtgccaccaggagcaagtctggccacagagtcaaggcaggaagccttgggggcagagcacaacagctctgctctgttgccatgtctgttgccagatgggtctgatgggtccgatgctcttaactgcagtcaggcttctcctctggatgttggagtgaagaacactcaatcccagggaaaaactagtgcctgtgaggtgagtggaaatgtgacggtggatgttacaggggttaatgctctacaaggtatggctgagcccagaagagagaatatatcacacaacacccaagacatcctgattccaaacgtcttgttgagccaagagaagaatgccgttctaggtttgccagtggctctacaggacaaagctgtgactgacccacagggagttggaaccccagagatgatacctcttgattgggagaaagggaagctggagggagcagaccacagctgtaccatgggtgacgctgaggaagcccaaatagacgatgaagcacatcctgtcctactgcagcctgttgccaaggagctccccacagacatggagctctcagcccatgatgatggggccccagctggtgtgagggaagtcacgcgagccccgccttcaggcagagaaaggagcactccctctctaccttgcatggtctctgcccaggacgcacctctgcctaagggagcagacttgatagaggaggctgccagccgtatagtggatgctgtcatcgaacaagtcaaggccgctggagcactgcttactgagggggaggcctgtcacatgtcactgtccagccctgagttgggtcctctcactaaaggactagagagtgcttttacagaaaaagtgagtactttcccacctggggagagcctaccaatgggcagtactcctgaggaagccacggggagccttgcaggatgttttgctggaagggaggagccagagaagatcattttacctgtccaggggcctgagccagcagcagaaatgccagacgtgaaagctgaagatgaagtggattttagagcaagttcaatttctgaagaagtggctgtagggagcatagctgctacactgaagatgaagcaaggcccaatgacccaggcgataaaccgagaaaactggtgtacaatagagccatgccctgatgcagcatctcttctggcttccaagcagagcccagaatgtgagaacttcctggatgttggactgggcagagagtgtacctcaaaacaaggtgtacttaaaagagaatctgggagtgattctgacctctttcactcacccagtgatgacatggacagcatcatcttcccaaagccagaggaagagcatttggcctgtgatatcaccggatccagttcatccaccgatgacacggcttcactggaccgacattcttctcatggcagtgatgtgtctctctcccagattttaaagccaaacaggtcaagagatcggcaaagccttgatggattctacagccatgggatgggagctgagggtcgagaaagtgagagtgagcctgctgacccaggcgacgtggaggaggaggagatggacagtatcactgaagtgcctgcaaactgctctgtcctaaggagctccatgcgctctctttctcccttccggaggcacagctgggggcctgggaaaaatgcagccagcgatgcagaaatgaaccaccggagttcaatgcgagttcttggggatgttgtcaggagacctcccattcataggagaagtatgagctggtgcccctctggtgtgcagtactctgctggcctgagtgctgactttaattacagaagtttcagtctagaaggcttgacaggaggagctggtgtcggaaacaagccatcctcatctctagaagtaagctctgcaaatgccgaagagctcagacacccattcagtggtgaggaacgggttgactctttggtgtcactttcagaagaggatctggagtcagaccagagagaacataggatgtttgatcagcagatatgtcacagatctaagcagcagggatttaattactgtacatcagccatttcctctccattgacaaaatccatctcattaatgacaatcagccatcctggattggacaattcacggcccttccacagtaccttccacaataccagtgctaatctgactgagagtataacagaagagaactataatttcctgccacatagcccctccaagaaagattctgaatggaagagtggaacaaaagtcagtcgtacattcagctacatcaagaataaaatgtctagcagcaagaagagcaaagaaaaggaaaaagaaaaagataagattaaggagaaggagaaagattctaaagacaaggagaaagataagaagactgtcaacgggcacactttcagttccattcctgttgtgggtcccatcagctgtagccagtgtatgaagcccttcaccaacaaagatgcctatacttgtgcaaattgcagtgcttttgtccacaaaggctgccgagaaagtctagcctcctgtgcaaaggtcaaaatgaagcagcccaaagggagccttcaggcacatgacacatcatcactgcccacggtcattatgagaaacaagccctcacagcccaaggagcgtcctcggtccgcagtcctcctggtggatgaaaccgctaccaccccaatatttgccaatagacgatcccagcagagtgtctcgctctccaaaagtgtctccatacagaacattactggagttggcaatgatgagaacatgtcaaacacctggaaattcctgtctcattcaacagactcactaaataaaatcagcaaggtcaatgagtcaacagaatcacttactgatgagggagggtacagacatgaatgaaggacaactactgggagactttgagattgagtccaaacagctggaagcagagtcttggagtcggataatagacagcaagtttctaaaacagcaaaagaaagatgtggtcaaacggcaagaagtaatatatgagttgatgcagacagagtttcatcatgtccgcactctcaagatcatgagtggtgtgtacagccaggggatgatggcggatctgctttttgagcagcagatggtagaaaagctgttcccctgtttggatgagctgatcagtatccatagccaattcttccagaggattctggagcggaagaaggagtctctggtggataaaagtgaaaagaactttctcatcaagaggataggggatgtgcttgtaaatcagttttcaggtgagaatgcagaacgtttaaagaagacatatggcaagttttgtgggcaacataaccagtctgtaaactacttcaaagacctttatgccaaggataagcgttttcaagcctttgtaaagaagaagatgagcagttcagttgttagaaggcttggaattccagagtgcatattgcttgtaactcagcggattaccaagtacccagttttattccaaagaatattgcagtgtaccaaagacaatgaagtggagcaggaagatctagcacagtccttgagcctggtgaaggatgtgattggagctgtagacagcaaagtggcaagttatgaaaagaaagtgcgtctcaatgagatttatacaaagacagatagcaagtcaatcatgaggatgaagagtggtcagatgtttgccaaggaagatttgaaacggaagaagcttgtacgtgatgggagtgtgtttctgaagaatgcagcaggaaggttgaaagaggttcaagcagttcttctcactgacattttagttttccttcaagaaaaagaccagaagtacatctttgcatcattggaccagaagtcaacagtgatctctttaaagaagctgattgtgagagaagtggcacatgaggagaaaggtttattcctgatcagcatggggatgacagatccagagatggtagaagtccatgccagctccaaagaggaacgaaacagctggattcagatcattcaggacacaatcaacaccctgaacagagatgaagatgaaggaattcctagtgagaatgaggaagaaaagaaaatgttggacaccagagcccgagaattaaaagaacaacttcaccagaaggaccaaaaaatcctactcttgttggaagagaaggagatgattttccgggacatggctgagtgcagcacccctctcccagaggattgctccccaacacatagccctagagttctcttccgctccaacacagaagaggctctcaaaggaggacctttaatgaaaagtgcaataaatgaggtggagatccttcagggtttggtgagtggaaatctgggaggcacacttgggccgactgtcagcagccccattgagcaagatgtggtcggtcccgtttccctgccccggagagcagagacctttggaggatttgacagccatcagatgaatgcttcaaaaggaggcgagaaggaagagggagatgatggccaagatcttaggagaacggaatcagatagtggcctaaaaaagggtggaaatgctaacctggtatttatgcttaaaagaaacagtgagcaggttgtccagagcgttgttcatctctacgagctcctcagcgctctgcagggtgtggtgctgcagcaggacagctacattgaggaccagaaactggtgctgagcgagagggcgctcactcgcagcttgtcccgcccgagctccctcattgagcaggagaagcagcgcagcctggagaagcagcgccaggacctggccaacctgcagaagcagcaggcccagtacctcgaggagaagcgcaggcgcgagcgtgagtgggaagctcgtgagagggagctgcgggagcgggaggccctcctggcccagcgcgaggaggaggtgcagcaggggcagcaggacctggaaaaggagcgggaggagctccagcagaagaagggcacataccagtatgacctggagcgactgcgtgctgcccagaaacagcttgagagggaacaggagcagctgcgccgggaggcagagcggctcagccagcggcagacagaacgggacctgtgtcaggtttcccatccacataccaagctgatgaggatcccatcgttcttccccagtcctgaggagcccccctcgccatctgcaccttccatagccaaatcagggtcattggactcagaactttcagtgtccccaaaaaggaacagcatctctcggacacacaaagataaggggccttttcacatactgagttcaaccagccagacaaacaaaggaccagaagggcagagccaggcccctgcgtccacctctgcctctacccgcctgtttgggttaacaaagccaaaggaaaagaaggagaaaaaaaagaagaacaaaaccagccgctctcagcccggtgatggtcccgcgtcagaagtatcagcagagggtgaagagatcttctgctgaccctcttcctctctgctgaggcagctgcctcctgatcctggccagcccacctctcctgctgtccccgcgtgcacaagtctcttacactggacgcccactgctcctcagcgtccagtcctcctgggcggccccaggtcctggacaataagcaacagatgatattgagtgtcgggtggggaaggaggcccagactctgcttcggccatgatttgtgactgcccaggactctcaggttgggctggccctactcaggattacactgaaagtaatggcctcgtaagtacaggtgatggttttggacacgtcaggaattcctaaaggctgaaagagtgtatccaagtaaggtctgaacctccgactgccttttatttgggggaacacaaaaccaaacagcagatgttttggacttgatctgtgtacgtacatggggacctgtctgcatatacacacggggaatgccagaagaaggcccagtctgcaccaggcgtctggtcaacttagcacaagggcagtgcctggacggacccggagcccccgcatatcagcagttcacccagtactcctcagagactggtttccctctaaacccatcccgggcacataccacccctgttttgcatgtatttctcatttcattttagggatgacaaacatttgtgaaaccagtgagagaaggcttgatgtgtataaaagacgtgatgtgcaccacctcgatctcggtgtttcaggcactaaagcaacaaaacaacccatagtatctcattttgtcatcagatccagaagaaatatcctggttttccagcatgtttacccacatgttttgggcatggataaagtgaagaggcctactcaccattatccctgcagcgtgacaccttttgattgtcactgaccactcagaaggggccacggcctcctggctgtgttcctgagcccccgtcgtgcctctcccagacagcagctgtctggcccttgctgggtgagggcacaccactgccaggggtcagcctcgcacccaggccaggcagaagctgtgctctgaagctaggacagctggctgagaagtgggttcaggcgaagggtgaagccatgtgtagcagttcctgccagtgcagatctggagaggagctggcccggaaggcgtggttgtgaaagcgcccttcttatgttaggaggccttggcaaaattggatttcttcaaaaatacatgtaaaggtctgttgttgaattgtactctgcccctggaagcagatacagatggctgcctgctgctcggctttgcttttgcttttcccaccgtgttttcatctttgttcacttgaggctttccccagctggtgtgtgcaggacagttcatggtaatgttgccctctgaggccccgtacaccagaagggaggccctggaaaattttgtgcttccaacgtggccttcaattcttgcttttttgcccctcggaagcatggggcttttgagcacacttaaaaaaagaaaaatctgtaacttggtgcttattgatgaattgcaagctggccttgcagatggagatatttatctttcagtttatttgaaagaggtctggtttaaaatttgtagcctacatttgttttatttattgtatttgtgtgtttgtgtttgtttttttttaagggtgagccaggtctagcccaacagtctaaactatccagtcaataccgagtgaagtggcagccagcactgttcactctgtgtcttttgaagtgccttgaaggcccagatgaaattttaaagggagggggtccatgtccttccctcccccaccccgcctcattctttaatcaaaggatgtcttctcccttgtttgagaatgaagaaactcgccacctctgacctacctttgcctttttctgtcatggagaatactcacccttcagaaacagaccaaaggccaaaacctgctgatttttctattgaaaatatgtccccttgcaaagaccctaaacaaaaagttaagtttctttctttcacctatttgtacaactccaagttacagctgaatctgtcgtgactttcctgagatctacccggggcttggctgtctgttctgggcactggctccgagttcccctcctgggatttgcaggagggcagtactgaacctgcattcttctccttgtaaatgtaggccgggtgcccctgttctccgggtttggaacaatacgaggttggtgctgatgggatttacttgcgtacgtgctcttcacaaaaacaccgtggatgctgaagttagagcacgtcgccacagagcttgacatcaatgttagagggtctcttactccccgcccagctgtgatgtttcatctgctttggttgttttggtggtcttttttaaaaatagagatttcacatctgcccagaccccactcaaaacgatttggtcaggttctggttggacaagtttaaaatcaaagtagtgcccggaattccctcaaaccacccaacttcatccaggaatacagtctgcagtgcagcaacagaaccgcttaccaagaactgtgcttacatacctttgtcatctctcttccccccttggaagttgtcctcagggggatttgttcctgtcctggggatttacctgggatggtggctgcctgtgcttttgctcatggccttgacagtgctctagttgctggatctaatggcctgtcttggtttctatcacatgagaaggggttgtttttttggggtgactcggactgaattccccatactgtt

SEQ ID NO: 362022 - DNA, 8461 bp, Homo sapiens
agcgggaagcgcctgtgctctgccgagactgccgtgcccattgctcgcctcggtcgccgccgctttagcccgcctccgggggagcggccgcctattgtctttctccgcggcgaaggtgaagagttgtcccagctcggcccgcgggggagccccgggagccgcacgtgtcctgggtcatgaaacttaatccacagcaagctcccttatatggtgattgtgttgttacagtgctgcttgctgaagaggacaaagctgaagatgatgtagtgttttacttggtatttttgggttccaccctccgtcactgtacaagtactcggaaggtcagttctgatacattggagaccattgctcctggtcatgattgttgtgaaacagtgaaggtgcagctctgtgcttccaaagagggccttcccgtgtttgtggtggctgaagaagactttcatttcgtccaggatgaagcgtatgatgcagctcaattcctagcaaccagtgctggaaatcagcaggctttgaactttacccgttttcttgaccagtcaggacccccatctggggatgtgaattcccttgataagaagttggtgctggcattcaggcacctgaagctgcccacggagtggaatgtattggggacagatcagagtttgcatgatgctggcccgcgagagacattgatgcattttgctgtgcggctgggactgctgaggttgacgtggttcctgttgcagaagccaggtggccgcggagctctcagtatccacaaccaggaaggggcgacgcctgtgagcttggccttggagcgaggctatcacaagctgcaccagcttctaaccgaggagaatgctggagaaccagactcctggagcagtttatcctatgaaataccgtatggagactgttctgtgaggcatcatcgagagttggacatctatacattaacctctgagtctgattcacatcatgaacacccatttcctggagacggttgcactggaccaatttttaaacttatgaacatccaacagcaactaatgaaaacaaacctcaagcagatggacagtcttatgcccttaatgatgacagcacaggatccttccagtgccccagagacagatggccagtttcttccctgtgcaccggagcccacggaccctcagcgactttcttcttctgaagagactgagagcactcagtgctgcccagggagccctgttgcacagactgaaagtccctgtgatttgtcaagcatagttgaggaggagaatacagaccgttcctgtaggaagaaaaataaaggcgtggaaagaaaaggggaagaggtggagccagcacctattgtggactctggaactgtatctgatcaagacagctgccttcagagcttgcctgattgtggagtaaagggcacggaaggcctttcgtcctgtggaaacagaaatgaagaaactggaacaaaatcttctggaatgcccacagaccaggagtccctgagcagtggagatgctgtgcttcagagagacttggtcatggagccaggcacagcccagtattcctctggaggtgaactgggaggcatttcaacaacaaatgtcagtaccccagacactgcaggggaaatggaacatgggctcatgaacccagatgccactgtttggaagaatgtgcttcagggaggggaaagtacaaaggaaagatttgagaactctaatattggcacagctggagcctctgacgtgcacgtcacaagtaagcctgtggataaaatcagtgttccaaactgtgcccctgccgccagttccctggatggtaacaaacctgctgagtcttcacttgcatttagtaatgaagaaacctccactgaaaaaacagcagaaacggaaacttcacgaagtcgtgaggagagtgctgatgctccagtagatcagaattctgtggtgattccagctgctgcaaaagacaagatttcagatggattagaaccttatactctcttagcagcaggcataggtgaggcaatgtcaccctcagatttagcccttcttgggctggaagaagatgtaatgccacaccagaactcagaaacaaattcatctcatgctcaaagccaaaagggcaaatcctcacccatttgttctacaactggagacgataaactttgtgcagactctgcatgtcaacagaacacagtgacttctagtggcgatttggttgcaaaactgtgtgataacatagttagcgagtccgaaagcaccacagcaaggcaacccagctcacaagatccacccgatgcctcccactgtgaagacccacaggctcatacagtcacctctgaccctgtaagggatacccaggaacgtgcggatttttgtcctttcaaagtggtggataacaaaggccaacgaaaagatgtgaaactagataaacctttaacaaatatgcttgaggtggtttcacatccacatccagttgtccctaaaatggagaaagaactggtgccagaccaggcagtaatatcagacagtactttctctctggcaaacagtccaggcagtgaatcagtaaccaaggatgacgcactttcttttgtcccctcccagaaagaaaagggaacagcaactcctgaactacatacagctacagattatagagatggcccagatggaaattcgaatgagcctgatacgcggccactagaagacagggcagcaggcctgtccacatcctccactgctgcagagcttcagcacgggatggggaataccagtctcacaggacttggtggagagcatgagggtcctgcccctccagcaatcccagaagctctgaatatcaaggggaacactgactcttccctgcaaagtatgggtaaggccactttggctttagattcagttttgactgaagaaggaaaacttctggtggtttcagaaagctctgcagctcaggaacaagataaggataaagcggtgacctgttcctctattaaggaaaatgctctctcttcaggaactttgcaggaagagcagagaacaccacctcctggacaagatactcaacaatttcatgaaaaatcaatctcagctgactgtgccaaggacaaagcacttcagctaagtaattcaccgggtgcatcctctgcctttcttaaggcagaaactgaacataacaaggaagtggccccacaagtctcactgctgactcaaggtggggctgcccagagcctggtgccaccaggagcaagtctggccacagagtcaaggcaggaagccttgggggcagagcacaacagctctgctctgttgccatgtctgttgccagatgggtctgatgggtccgatgctcttaactgcagtcaggcttctcctctggatgttggagtgaagaacactcaatcccagggaaaaactagtgcctgtgaggtgagtggaaatgtgacggtggatgttacaggggttaatgctctacaaggtatggctgagcccagaagagagaatatatcacacaacacccaagacatcctgattccaaacgtcttgttgagccaagagaagaatgccgttctaggtttgccagtggctctacaggacaaagctgtgactgacccacagggagttggaaccccagagatgatacctcttgattgggagaaagggaagctggagggagcagaccacagctgtaccatgggtgacgctgaggaagcccaaatagacgatgaagcacatcctgtcctactgcagcctgttgccaaggagctccccacagacatggagctctcagcccatgatgatggggccccagctggtgtgagggaagtcacgcgagccccgccttcaggcagagaaaggagcactccctctctaccttgcatggtctctgcccaggacgcacctctgcctaagggagcagacttgatagaggaggctgccagccgtatagtggatgctgtcatcgaacaagtcaaggccgctggagcactgcttactgagggggaggcctgtcacatgtcactgtccagccctgagttgggtcctctcactaaaggactagagagtgcttttacagaaaaagtgagtactttcccacctggggagagcctaccaatgggcagtactcctgaggaagccacggggagccttgcaggatgttttgctggaagggaggagccagagaagatcattttacctgtccaggggcctgagccagcagcagaaatgccagacgtgaaagctgaagatgaagtggattttagagcaagttcaatttctgaagaagtggctgtagggagcatagctgctacactgaagatgaagcaaggcccaatgacccaggcgataaaccgagaaaactggtgtacaatagagccatgccctgatgcagcatctcttctggcttccaagcagagcccagaatgtgagaacttcctggatgttggactgggcagagagtgtacctcaaaacaaggtgtacttaaaagagaatctgggagtgattctgacctctttcactcacccagtgatgacatggacagcatcatcttcccaaagccagaggaagagcatttggcctgtgatatcaccggatccagttcatccaccgatgacacggcttcactggaccgacattcttctcatggcagtgatgtgtctctctcccagattttaaagccaaacaggtcaagagatcggcaaagccttgatggattctacagccatgggatgggagctgagggtcgagaaagtgagagtgagcctgctgacccaggcgacgtggaggaggaggagatggacagtatcactgaagtgcctgcaaactgctctgtcctaaggagctccatgcgctctctttctcccttccggaggcacagctgggggcctgggaaaaatgcagccagcgatgcagaaatgaaccaccggagttcaatgcgagttcttggggatgttgtcaggagacctcccattcataggagaagtttcagtctagaaggcttgacaggaggagctggtgtcggaaacaagccatcctcatctctagaagtaagctctgcaaatgccgaagagctcagacacccattcagtggtgaggaacgggttgactctttggtgtcactttcagaagaggatctggagtcagaccagagagaacataggatgtttgatcagcagatatgtcacagatctaagcagcagggatttaattactgtacatcagccatttcctctccattgacaaaatccatctcattaatgacaatcagccatcctggattggacaattcacggcccttccacagtaccttccacaataccagtgctaatctgactgagagtataacagaagagaactataatttcctgccacatagcccctccaagaaagattctgaatggaagagtggaacaaaagtcagtcgtacattcagctacatcaagaataaaatgtctagcagcaagaagagcaaagaaaaggaaaaagaaaaagataagattaaggagaaggagaaagattctaaagacaaggagaaagataagaagactgtcaacgggcacactttcagttccattcctgttgtgggtcccatcagctgtagccagtgtatgaagcccttcaccaacaaagatgcctatacttgtgcaaattgcagtgcttttgtccacaaaggctgccgagaaagtctagcctcctgtgcaaaggtcaaaatgaagcagcccaaagggagccttcaggcacatgacacatcatcactgcccacggtcattatgagaaacaagccctcacagcccaaggagcgtcctcggtccgcagtcctcctggtggatgaaaccgctaccaccccaatatttgccaatagacgatcccagcagagtgtctcgctctccaaaagtgtctccatacagaacattactggagttggcaatgatgagaacatgtcaaacacctggaaattcctgtctcattcaacagactcactaaataaaatcagcaaggtcaatgagtcaacagaatcacttactgatgagggagggtacagacatgaatgaaggacaactactgggagactttgagattgagtccaaacagctggaagcagagtcttggagtcggataatagacagcaagtttctaaaacagcaaaagaaagatgtggtcaaacggcaagaagtaatatatgagttgatgcagacagagtttcatcatgtccgcactctcaagatcatgagtggtgtgtacagccaggggatgatggcggatctgctttttgagcagcagatggtagaaaagctgttcccctgtttggatgagctgatcagtatccatagccaattcttccagaggattctggagcggaagaaggagtctctggtggataaaagtgaaaagaactttctcatcaagaggataggggatgtgcttgtaaatcagttttcaggtgagaatgcagaacgtttaaagaagacatatggcaagttttgtgggcaacataaccagtctgtaaactacttcaaagacctttatgccaaggataagcgttttcaagcctttgtaaagaagaagatgagcagttcagttgttagaaggcttggaattccagagtgcatattgcttgtaactcagcggattaccaagtacccagttttattccaaagaatattgcagtgtaccaaagacaatgaagtggagcaggaagatctagcacagtccttgagcctggtgaaggatgtgattggagctgtagacagcaaagtggcaagttatgaaaagaaagtgcgtctcaatgagatttatacaaagacagatagcaagtcaatcatgaggatgaagagtggtcagatgtttgccaaggaagatttgaaacggaagaagcttgtacgtgatgggagtgtgtttctgaagaatgcagcaggaaggttgaaagaggttcaagcagttcttctcactgacattttagttttccttcaagaaaaagaccagaagtacatctttgcatcattggaccagaagtcaacagtgatctctttaaagaagctgattgtgagagaagtggcacatgaggagaaaggtttattcctgatcagcatggggatgacagatccagagatggtagaagtccatgccagctccaaagaggaacgaaacagctggattcagatcattcaggacacaatcaacaccctgaacagagatgaagatgaaggaattcctagtgagaatgaggaagaaaagaaaatgttggacaccagagcccgagaattaaaagaacaacttcaccagaaggaccaaaaaatcctactcttgttggaagagaaggagatgattttccgggacatggctgagtgcagcacccctctcccagaggattgctccccaacacatagccctagagttctcttccgctccaacacagaagaggctctcaaaggaggacctttaatgaaaagtgcaataaatgaggtggagatccttcagggtttggtgagtggaaatctgggaggcacacttgggccgactgtcagcagccccattgagcaagatgtggtcggtcccgtttccctgccccggagagcagagacctttggaggatttgacagccatcagatgaatgcttcaaaaggaggcgagaaggaagagggagatgatggccaagatcttaggagaacggaatcagatagtggcctaaaaaagggtggaaatgctaacctggtatttatgcttaaaagaaacagtgagcaggttgtccagagcgttgttcatctctacgagctcctcagcgctctgcagggtgtggtgctgcagcaggacagctacattgaggaccagaaactggtgctgagcgagagggcgctcactcgcagcttgtcccgcccgagctccctcattgagcaggagaagcagcgcagcctggagaagcagcgccaggacctggccaacctgcagaagcagcaggcccagtacctcgaggagaagcgcaggcgcgagcgtgagtgggaagctcgtgagagggagctgcgggagcgggaggccctcctggcccagcgcgaggaggaggtgcagcaggggcagcaggacctggaaaaggagcgggaggagctccagcagaagaagggcacataccagtatgacctggagcgactgcgtgctgcccagaaacagcttgagagggaacaggagcagctgcgccgggaggcagagcggctcagccagcggcagacagaacgggacctgtgtcaggtaatgggactccctgccgagagcaacctaatgatgatattaattaagaccccctgtgtattaagcaaggtaagaaagtgagcagaaatatagagcctgtttttggccagatgctcatgcctgtgatcccagcactttaggaggctgaggtgagagggtagcttgaccagcctgggcaacagagggagactctgtctctcctaaaaaaaaaaaaaaaaaacaaacaaac

SEQ ID NO: 362023 - DNA, 8495 bp, Homo sapiens
agcgggaagcgcctgtgctctgccgagactgccgtgcccattgctcgcctcggtcgccgccgctttagcccgcctccgggggagcggccgcctattgtctttctccgcggcgaaggtgaagagttgtcccagctcggcccgcgggggagccccgggagccgcacgtgtcctgggtcatgaaacttaatccacagcaagctcccttatatggtgattgtgttgttacagtgctgcttgctgaagaggacaaagctgaagatgatgtagtgttttacttggtatttttgggttccaccctccgtcactgtacaagtactcggaaggtcagttctgatacattggagaccattgctcctggtcatgattgttgtgaaacagtgaaggtgcagctctgtgcttccaaagagggccttcccgtgtttgtggtggctgaagaagactttcatttcgtccaggatgaagcgtatgatgcagctcaattcctagcaaccagtgctggaaatcagcaggctttgaactttacccgttttcttgaccagtcaggacccccatctggggatgtgaattcccttgataagaagttggtgctggcattcaggcacctgaagctgcccacggagtggaatgtattggggacagatcagagtttgcatgatgctggcccgcgagagacattgatgcattttgctgtgcggctgggactgctgaggttgacgtggttcctgttgcagaagccaggtggccgcggagctctcagtatccacaaccaggaaggggcgacgcctgtgagcttggccttggagcgaggctatcacaagctgcaccagcttctaaccgaggagaatgctggagaaccagactcctggagcagtttatcctatgaaataccgtatggagactgttctgtgaggcatcatcgagagttggacatctatacattaacctctgagtctgattcacatcatgaacacccatttcctggagacggttgcactggaccaatttttaaacttatgaacatccaacagcaactaatgaaaacaaacctcaagcagatggacagtcttatgcccttaatgatgacagcacaggatccttccagtgccccagagacagatggccagtttcttccctgtgcaccggagcccacggaccctcagcgactttcttcttctgaagagactgagagcactcagtgctgcccagggagccctgttgcacagactgaaagtccctgtgatttgtcaagcatagttgaggaggagaatacagaccgttcctgtaggaagaaaaataaaggcgtggaaagaaaaggggaagaggtggagccagcacctattgtggactctggaactgtatctgatcaagacagctgccttcagagcttgcctgattgtggagtaaagggcacggaaggcctttcgtcctgtggaaacagaaatgaagaaactggaacaaaatcttctggaatgcccacagaccaggagtccctgagcagtggagatgctgtgcttcagagagacttggtcatggagccaggcacagcccagtattcctctggaggtgaactgggaggcatttcaacaacaaatgtcagtaccccagacactgcaggggaaatggaacatgggctcatgaacccagatgccactgtttggaagaatgtgcttcagggaggggaaagtacaaaggaaagatttgagaactctaatattggcacagctggagcctctgacgtgcacgtcacaagtaagcctgtggataaaatcagtgttccaaactgtgcccctgccgccagttccctggatggtaacaaacctgctgagtcttcacttgcatttagtaatgaagaaacctccactgaaaaaacagcagaaacggaaacttcacgaagtcgtgaggagagtgctgatgctccagtagatcagaattctgtggtgattccagctgctgcaaaagacaagatttcagatggattagaaccttatactctcttagcagcaggcataggtgaggcaatgtcaccctcagatttagcccttcttgggctggaagaagatgtaatgccacaccagaactcagaaacaaattcatctcatgctcaaagccaaaagggcaaatcctcacccatttgttctacaactggagacgataaactttgtgcagactctgcatgtcaacagaacacagtgacttctagtggcgatttggttgcaaaactgtgtgataacatagttagcgagtccgaaagcaccacagcaaggcaacccagctcacaagatccacccgatgcctcccactgtgaagacccacaggctcatacagtcacctctgaccctgtaagggatacccaggaacgtgcggatttttgtcctttcaaagtggtggataacaaaggccaacgaaaagatgtgaaactagataaacctttaacaaatatgcttgaggtggtttcacatccacatccagttgtccctaaaatggagaaagaactggtgccagaccaggcagtaatatcagacagtactttctctctggcaaacagtccaggcagtgaatcagtaaccaaggatgacgcactttcttttgtcccctcccagaaagaaaagggaacagcaactcctgaactacatacagctacagattatagagatggcccagatggaaattcgaatgagcctgatacgcggccactagaagacagggcagcaggcctgtccacatcctccactgctgcagagcttcagcacgggatggggaataccagtctcacaggacttggtggagagcatgagggtcctgcccctccagcaatcccagaagctctgaatatcaaggggaacactgactcttccctgcaaagtatgggtaaggccactttggctttagattcagttttgactgaagaaggaaaacttctggtggtttcagaaagctctgcagctcaggaacaagataaggataaagcggtgacctgttcctctattaaggaaaatgctctctcttcaggaactttgcaggaagagcagagaacaccacctcctggacaagatactcaacaatttcatgaaaaatcaatctcagctgactgtgccaaggacaaagcacttcagctaagtaattcaccgggtgcatcctctgcctttcttaaggcagaaactgaacataacaaggaagtggccccacaagtctcactgctgactcaaggtggggctgcccagagcctggtgccaccaggagcaagtctggccacagagtcaaggcaggaagccttgggggcagagcacaacagctctgctctgttgccatgtctgttgccagatgggtctgatgggtccgatgctcttaactgcagtcaggcttctcctctggatgttggagtgaagaacactcaatcccagggaaaaactagtgcctgtgaggtgagtggaaatgtgacggtggatgttacaggggttaatgctctacaaggtatggctgagcccagaagagagaatatatcacacaacacccaagacatcctgattccaaacgtcttgttgagccaagagaagaatgccgttctaggtttgccagtggctctacaggacaaagctgtgactgacccacagggagttggaaccccagagatgatacctcttgattgggagaaagggaagctggagggagcagaccacagctgtaccatgggtgacgctgaggaagcccaaatagacgatgaagcacatcctgtcctactgcagcctgttgccaaggagctccccacagacatggagctctcagcccatgatgatggggccccagctggtgtgagggaagtcacgcgagccccgccttcaggcagagaaaggagcactccctctctaccttgcatggtctctgcccaggacgcacctctgcctaagggagcagacttgatagaggaggctgccagccgtatagtggatgctgtcatcgaacaagtcaaggccgctggagcactgcttactgagggggaggcctgtcacatgtcactgtccagccctgagttgggtcctctcactaaaggactagagagtgcttttacagaaaaagtgagtactttcccacctggggagagcctaccaatgggcagtactcctgaggaagccacggggagccttgcaggatgttttgctggaagggaggagccagagaagatcattttacctgtccaggggcctgagccagcagcagaaatgccagacgtgaaagctgaagatgaagtggattttagagcaagttcaatttctgaagaagtggctgtagggagcatagctgctacactgaagatgaagcaaggcccaatgacccaggcgataaaccgagaaaactggtgtacaatagagccatgccctgatgcagcatctcttctggcttccaagcagagcccagaatgtgagaacttcctggatgttggactgggcagagagtgtacctcaaaacaaggtgtacttaaaagagaatctgggagtgattctgacctctttcactcacccagtgatgacatggacagcatcatcttcccaaagccagaggaagagcatttggcctgtgatatcaccggatccagttcatccaccgatgacacggcttcactggaccgacattcttctcatggcagtgatgtgtctctctcccagattttaaagccaaacaggtcaagagatcggcaaagccttgatggattctacagccatgggatgggagctgagggtcgagaaagtgagagtgagcctgctgacccaggcgacgtggaggaggaggagatggacagtatcactgaagtgcctgcaaactgctctgtcctaaggagctccatgcgctctctttctcccttccggaggcacagctgggggcctgggaaaaatgcagccagcgatgcagaaatgaaccaccggagttcaatgcgagttcttggggatgttgtcaggagacctcccattcataggagaagtttcagtctagaaggcttgacaggaggagctggtgtcggaaacaagccatcctcatctctagaagtaagctctgcaaatgccgaagagctcagacacccattcagtggtgaggaacgggttgactctttggtgtcactttcagaagaggatctggagtcagaccagagagaacataggatgtttgatcagcagatatgtcacagatctaagcagcagggatttaattactgtacatcagccatttcctctccattgacaaaatccatctcattaatgacaatcagccatcctggattggacaattcacggcccttccacagtaccttccacaataccagtgctaatctgactgagagtataacagaagagaactataatttcctgccacatagcccctccaagaaagattctgaatggaagagtggaacaaaagtcagtcgtacattcagctacatcaagaataaaatgtctagcagcaagaagagcaaagaaaaggaaaaagaaaaagataagattaaggagaaggagaaagattctaaagacaaggagaaagataagaagactgtcaacgggcacactttcagttccattcctgttgtgggtcccatcagctgtagccagtgtatgaagcccttcaccaacaaagatgcctatacttgtgcaaattgcagtgcttttgtccacaaaggctgccgagaaagtctagcctcctgtgcaaaggtcaaaatgaagcagcccaaagggagccttcaggcacatgacacatcatcactgcccacggtcattatgagaaacaagccctcacagcccaaggagcgtcctcggtccgcagtcctcctggtggatgaaaccgctaccaccccaatatttgccaatagacgatcccagcagagtgtctcgctctccaaaagtgtctccatacagaacattactggagttggcaatgatgagaacatgtcaaacacctggaaattcctgtctcattcaacagactcactaaataaaatcagcaaggtcaatgagtcaacagaatcacttactgatgagggagggtacagacatgaatgaaggacaactactgggagactttgagattgagtccaaacagctggaagcagagtcttggagtcggataatagacagcaagtttctaaaacagcaaaagaaagatgtggtcaaacggcaagaagtaatatatgagttgatgcagacagagtttcatcatgtccgcactctcaagatcatgagtggtgtgtacagccaggggatgatggcggatctgctttttgagcagcagatggtagaaaagctgttcccctgtttggatgagctgatcagtatccatagccaattcttccagaggattctggagcggaagaaggagtctctggtggataaaagtgaaaagaactttctcatcaagaggataggggatgtgcttgtaaatcagttttcaggtgagaatgcagaacgtttaaagaagacatatggcaagttttgtgggcaacataaccagtctgtaaactacttcaaagacctttatgccaaggataagcgttttcaagcctttgtaaagaagaagatgagcagttcagttgttagaaggcttggaattccagagtgcatattgcttgtaactcagcggattaccaagtacccagttttattccaaagaatattgcagtgtaccaaagacaatgaagtggagcaggaagatctagcacagtccttgagcctggtgaaggatgtgattggagctgtagacagcaaagtggcaagttatgaaaagaaagtgcgtctcaatgagatttatacaaagacagatagcaagtcaatcatgaggatgaagagtggtcagatgtttgccaaggaagatttgaaacggaagaagcttgtacgtgatgggagtgtgtttctgaagaatgcagcaggaaggttgaaagaggttcaagcagttcttctcactgacattttagttttccttcaagaaaaagaccagaagtacatctttgcatcattggaccagaagtcaacagtgatctctttaaagaagctgattgtgagagaagtggcacatgaggagaaaggtttattcctgatcagcatggggatgacagatccagagatggtagaagtccatgccagctccaaagaggaacgaaacagctggattcagatcattcaggacacaatcaacaccctgaacagagatgaagatgaaggaattcctagtgagaatgaggaagaaaagaaaatgttggacaccagagcccgagaattaaaagaacaacttcaccagaaggaccaaaaaatcctactcttgttggaagagaaggagatgattttccgggacatggctgagtgcagcacccctctcccagaggattgctccccaacacatagccctagagttctcttccgctccaacacagaagaggctctcaaaggaggacctttaatgaaaagtgcaataaatgaggtggagatccttcagggtttggtgagtggaaatctgggaggcacacttgggccgactgtcagcagccccattgagcaagatgtggtcggtcccgtttccctgccccggagagcagagacctttggaggatttgacagccatcagatgaatgcttcaaaaggaggcgagaaggaagagggagatgatggccaagatcttaggagaacggaatcagatagtggcctaaaaaagggtggaaatgctaacctggtatttatgcttaaaagaaacagtgagcaggttgtccagagcgttgttcatctctacgagctcctcagcgctctgcagggtgtggtgctgcagcaggacagctacattgaggaccagaaactggtgctgagcgagagggcgctcactcgcagcttgtcccgcccgagctccctcattgagcaggagaagcagcgcagcctggagaagcagcgccaggacctggccaacctgcagaagcagcaggcccagtacctcgaggagaagcgcaggcgcgagcgtgagtgggaagctcgtgagagggagctgcgggagcgggaggccctcctggcccagcgcgaggaggaggtgcagcaggggcagcaggacctggaaaaaaaaactaaaacaaggggggcaaaaggcccccccggagcgggaggagctccagcagaagaagggcacataccagtatgacctggagcgactgcgtgctgcccagaaacagcttgagagggaacaggagcagctgcgccgggaggcagagcggctcagccagcggcagacagaacgggacctgtgtcaggtaatgggactccctgccgagagcaacctaatgatgatattaattaagaccccctgtgtattaagcaaggtaagaaagtgagcagaaatatagagcctgtttttggccagatgctcatgcctgtgatcccagcactttaggaggctgaggtgagagggtagcttgaccagcctgggcaacagagggagactctgtctctcctaaaaaaaaaaaaaaaaaacaaacaaac

SEQ ID NO: 362024 - DNA, 6056 bp, Homo sapiens
caaagctgctgagctctgccctgacggcatgcgcccccgcttctgtgagagcacgcttcctggcatgggggtcgaatcatgtcgataaaatgggctcggtttcatgaagtaccccacataacagtgagattcataggaccaaagcatggggaggaaaaggaaaaagaaaaagataagattaaggagaaggagaaagattctaaagacaaggagaaagataagaagactgtcaacgggcacactttcagttccattcctgttgtgggtcccatcagctgtagccagtgtatgaagcccttcaccaacaaagatgcctatacttgtgcaaattgcagtgcttttgtccacaaaggctgccgagaaagtctagcctcctgtgcaaaggtcaaaatgaagcagcccaaagggagccttcaggcacatgacacatcatcactgcccacggtcattatgagaaacaagccctcacagcccaaggagcgtcctcggtccgcagtcctcctggtggatgaaaccgctaccaccccaatatttgccaatagacgatcccagcagagtgtctcgctctccaaaagtgtctccatacagaacattactggagttggcaatgatgagaacatgtcaaacacctggaaattcctgtctcattcaacagactcactaaataaaatcagcaaggtcaatgagtcaacagaatcacttactgatgagggagggtacagacatgaatgaaggacaactactgggagactttgagattgagtccaaacagctggaagcagagtcttggagtcggataatagacagcaagtttctaaaacagcaaaagaaagatgtggtcaaacggcaagaagtaatatatgagttgatgcagacagagtttcatcatgtccgcactctcaagatcatgagtggtgtgtacagccaggggatgatggcggatctgctttttgagcagcagatggtagaaaagctgttcccctgtttggatgagctgatcagtatccatagccaattcttccagaggattctggagcggaagaaggagtctctggtggataaaagtgaaaagaactttctcatcaagaggataggggatgtgcttgtaaatcagttttcaggtgagaatgcagaacgtttaaagaagacatatggcaagttttgtgggcaacataaccagtctgtaaactacttcaaagacctttatgccaaggataagcgttttcaagcctttgtaaagaagaagatgagcagttcagttgttagaaggcttggaattccagagtgcatattgcttgtaactcagcggattaccaagtacccagttttattccaaagaatattgcagtgtaccaaagacaatgaagtggagcaggaagatctagcacagtccttgagcctggtgaaggatgtgattggagctgtagacagcaaagtggcaagttatgaaaagaaagtgcgtctcaatgagatttatacaaagacagatagcaagtcaatcatgaggatgaagagtggtcagatgtttgccaaggaagatttgaaacggaagaagcttgtacgtgatgggagtgtgtttctgaagaatgcagcaggaaggttgaaagaggttcaagcagttcttctcactgacattttagttttccttcaagaaaaagaccagaagtacatctttgcatcattggaccagaagtcaacagtgatctctttaaagaagctgattgtgagagaagtggcacatgaggagaaaggtttattcctgatcagcatggggatgacagatccagagatggtagaagtccatgccagctccaaagaggaacgaaacagctggattcagatcattcaggacacaatcaacaccctgaacagagatgaagatgaaggaattcctagtgagaatgaggaagaaaagaaaatgttggacaccagagcccgagaattaaaagaacaacttcaccagaaggaccaaaaaatcctactcttgttggaagagaaggagatgattttccgggacatggctgagtgcagcacccctctcccagaggattgctccccaacacatagccctagagttctcttccgctccaacacagaagaggctctcaaaggaggacctttaatgaaaagtgcaataaatgaggtggagatccttcagggtttggtgagtggaaatctgggaggcacacttgggccgactgtcagcagccccattgagcaagatgtggtcggtcccgtttccctgccccggagagcagagacctttggaggatttgacagccatcagatgaatgcttcaaaaggaggcgagaaggaagagggagatgatggccaagatcttaggagaacggaatcagatagtggcctaaaaaagggtggaaatgctaacctggtatttatgcttaaaagaaacagtgagcaggttgtccagagcgttgttcatctctacgagctcctcagcgctctgcagggtgtggtgctgcagcaggacagctacattgaggaccagaaactggtgctgagcgagagggcgctcactcgcagcttgtcccgcccgagctccctcattgagcaggagaagcagcgcagcctggagaagcagcgccaggacctggccaacctgcagaagcagcaggcccagtacctcgaggagaagcgcaggcgcgagcgtgagtgggaagctcgtgagagggagctgcgggagcgggaggccctcctggcccagcgcgaggaggaggtgcagcaggggcagcaggacctggaaaaggagcgggaggagctccagcagaagaagggcacataccagtatgacctggagcgactgcgtgctgcccagaaacagcttgagagggaacaggagcagctgcgccgggaggcagagcggctcagccagcggcagacagaacgggacctgtgtcaggtttcccatccacataccaagctgatgaggatcccatcgttcttccccagtcctgaggagcccccctcgccatctgcaccttccatagccaaatcagggtcattggactcagaactttcagtgtccccaaaaaggaacagcatctctcggacacacaaagataaggggccttttcacatactgagttcaaccagccagacaaacaaaggaccagaagggcagagccaggcccctgcgtccacctctgcctctacccgcctgtttgggttaacaaagccaaaggaaaagaaggagaaaaaaaagaagaacaaaaccagccgctctcagcccggtgatggtcccgcgtcagaagtatcagcagagggtgaagagatcttctgctgaccctcttcctctctgctgaggcagctgcctcctgatcctggccagcccacctctcctgctgtccccgcgtgcacaagtctcttacactggacgcccactgctcctcagcgtccagtcctcctgggcggccccaggtcctggacaataagcaacagatgatattgagtgtcgggtggggaaggaggcccagactctgcttcggccatgatttgtgactgcccaggactctcaggttgggctggccctactcaggattacactgaaagtaatggcctcgtaagtacaggtgatggttttggacacgtcaggaattcctaaaggctgaaagagtgtatccaagtaaggtctgaacctccgactgccttttatttgggggaacacaaaaccaaacagcagatgttttggacttgatctgtgtacgtacatggggacctgtctgcatatacacacggggaatgccagaagaaggcccagtctgcaccaggcgtctggtcaacttagcacaagggcagtgcctggacggacccggagcccccgcatatcagcagttcacccagtactcctcagagactggtttccctctaaacccatcccgggcacataccacccctgttttgcatgtatttctcatttcattttagggatgacaaacatttgtgaaaccagtgagagaaggcttgatgtgtataaaagacgtgatgtgcaccacctcgatctcggtgtttcaggcactaaagcaacaaaacaacccatagtatctcattttgtcatcagatccagaagaaatatcctggttttccagcatgtttacccacatgttttgggcatggataaagtgaagaggcctactcaccattatccctgcagcgtgacaccttttgattgtcactgaccactcagaaggggccacggcctcctggctgtgttcctgagcccccgtcgtgcctctcccagacagcagctgtctggcccttgctgggtgagggcacaccactgccaggggtcagcctcgcacccaggccaggcagaagctgtgctctgaagctaggacagctggctgagaagtgggttcaggcgaagggtgaagccatgtgtagcagttcctgccagtgcagatctggagaggagctggcccggaaggcgtggttgtgaaagcgcccttcttatgttaggaggccttggcaaaattggatttcttcaaaaatacatgtaaaggtctgttgttgaattgtactctgcccctggaagcagatacagatggctgcctgctgctcggctttgcttttgcttttcccaccgtgttttcatctttgttcacttgaggctttccccagctggtgtgtgcaggacagttcatggtaatgttgccctctgaggccccgtacaccagaagggaggccctggaaaattttgtgcttccaacgtggccttcaattcttgcttttttgcccctcggaagcatggggcttttgagcacacttaaaaaaagaaaaatctgtaacttggtgcttattgatgaattgcaagctggccttgcagatggagatatttatctttcagtttatttgaaagaggtctggtttaaaatttgtagcctacatttgttttatttattgtatttgtgtgtttgtgtttgtttttttttaagggtgagccaggtctagcccaacagtctaaactatccagtcaataccgagtgaagtggcagccagcactgttcactctgtgtcttttgaagtgccttgaaggcccagatgaaattttaaagggagggggtccatgtccttccctcccccaccccgcctcattctttaatcaaaggatgtcttctcccttgtttgagaatgaagaaactcgccacctctgacctacctttgcctttttctgtcatggagaatactcacccttcagaaacagaccaaaggccaaaacctgctgatttttctattgaaaatatgtccccttgcaaagaccctaaacaaaaagttaagtttctttctttcacctatttgtacaactccaagttacagctgaatctgtcgtgactttcctgagatctacccggggcttggctgtctgttctgggcactggctccgagttcccctcctgggatttgcaggagggcagtactgaacctgcattcttctccttgtaaatgtaggccgggtgcccctgttctccgggtttggaacaatacgaggttggtgctgatgggatttacttgcgtacgtgctcttcacaaaaacaccgtggatgctgaagttagagcacgtcgccacagagcttgacatcaatgttagagggtctcttactccccgcccagctgtgatgtttcatctgctttggttgttttggtggtcttttttaaaaatagagatttcacatctgcccagaccccactcaaaacgatttggtcaggttctggttggacaagtttaaaatcaaagtagtgcccggaattccctcaaaccacccaacttcatccaggaatacagtctgcagtgcagcaacagaaccgcttaccaagaactgtgcttacatacctttgtcatctctcttccccccttggaagttgtcctcagggggatttgttcctgtcctggggatttacctgggatggtggctgcctgtgcttttgctcatggccttgacagtgctctagttgctggatctaatggcctgtcttggtttctatcacatgagaaggggttgtttttttggggtgactcggactgaattccccatactgtt

SEQ ID NO: 362025 - DNA, 5797 bp, Homo sapiens
ggctgggacacagggtgcttagggcagtgcaaaaagcagagtgggaaaggaagctgaactgcttgctcccttcctactcggcttctcagggcttgtcagaggtgaattgtcaatggacttactttctttctctttagcagcccaaagggagccttcaggcacatgacacatcatcactgcccacggtcattatgagaaacaagccctcacagcccaaggagcgtcctcggtccgcagtcctcctggtggatgaaaccgctaccaccccaatatttgccaatagacgatcccagcagagtgtctcgctctccaaaagtgtctccatacagaacattactggagttggcaatgatgagaacatgtcaaacacctggaaattcctgtctcattcaacagactcactaaataaaatcagcaaggtcaatgagtcaacagaatcacttactgatgagggagggtacagacatgaatgaaggacaactactgggagactttgagattgagtccaaacagctggaagcagagtcttggagtcggataatagacagcaagtttctaaaacagcaaaagaaagatgtggtcaaacggcaagaagtaatatatgagttgatgcagacagagtttcatcatgtccgcactctcaagatcatgagtggtgtgtacagccaggggatgatggcggatctgctttttgagcagcagatggtagaaaagctgttcccctgtttggatgagctgatcagtatccatagccaattcttccagaggattctggagcggaagaaggagtctctggtggataaaagtgaaaagaactttctcatcaagaggataggggatgtgcttgtaaatcagttttcaggtgagaatgcagaacgtttaaagaagacatatggcaagttttgtgggcaacataaccagtctgtaaactacttcaaagacctttatgccaaggataagcgttttcaagcctttgtaaagaagaagatgagcagttcagttgttagaaggcttggaattccagagtgcatattgcttgtaactcagcggattaccaagtacccagttttattccaaagaatattgcagtgtaccaaagacaatgaagtggagcaggaagatctagcacagtccttgagcctggtgaaggatgtgattggagctgtagacagcaaagtggcaagttatgaaaagaaagtgcgtctcaatgagatttatacaaagacagatagcaagtcaatcatgaggatgaagagtggtcagatgtttgccaaggaagatttgaaacggaagaagcttgtacgtgatgggagtgtgtttctgaagaatgcagcaggaaggttgaaagaggttcaagcagttcttctcactgacattttagttttccttcaagaaaaagaccagaagtacatctttgcatcattggaccagaagtcaacagtgatctctttaaagaagctgattgtgagagaagtggcacatgaggagaaaggtttattcctgatcagcatggggatgacagatccagagatggtagaagtccatgccagctccaaagaggaacgaaacagctggattcagatcattcaggacacaatcaacaccctgaacagagatgaagatgaaggaattcctagtgagaatgaggaagaaaagaaaatgttggacaccagagcccgagaattaaaagaacaacttcaccagaaggaccaaaaaatcctactcttgttggaagagaaggagatgattttccgggacatggctgagtgcagcacccctctcccagaggattgctccccaacacatagccctagagttctcttccgctccaacacagaagaggctctcaaaggaggacctttaatgaaaagtgcaataaatgaggtggagatccttcagggtttggtgagtggaaatctgggaggcacacttgggccgactgtcagcagccccattgagcaagatgtggtcggtcccgtttccctgccccggagagcagagacctttggaggatttgacagccatcagatgaatgcttcaaaaggaggcgagaaggaagagggagatgatggccaagatcttaggagaacggaatcagatagtggcctaaaaaagggtggaaatgctaacctggtatttatgcttaaaagaaacagtgagcaggttgtccagagcgttgttcatctctacgagctcctcagcgctctgcagggtgtggtgctgcagcaggacagctacattgaggaccagaaactggtgctgagcgagagggcgctcactcgcagcttgtcccgcccgagctccctcattgagcaggagaagcagcgcagcctggagaagcagcgccaggacctggccaacctgcagaagcagcaggcccagtacctcgaggagaagcgcaggcgcgagcgtgagtgggaagctcgtgagagggagctgcgggagcgggaggccctcctggcccagcgcgaggaggaggtgcagcaggggcagcaggacctggaaaaggagcgggaggagctccagcagaagaagggcacataccagtatgacctggagcgactgcgtgctgcccagaaacagcttgagagggaacaggagcagctgcgccgggaggcagagcggctcagccagcggcagacagaacgggacctgtgtcaggtttcccatccacataccaagctgatgaggatcccatcgttcttccccagtcctgaggagcccccctcgccatctgcaccttccatagccaaatcagggtcattggactcagaactttcagtgtccccaaaaaggaacagcatctctcggacacacaaagataaggggccttttcacatactgagttcaaccagccagacaaacaaaggaccagaagggcagagccaggcccctgcgtccacctctgcctctacccgcctgtttgggttaacaaagccaaaggaaaagaaggagaaaaaaaagaagaacaaaaccagccgctctcagcccggtgatggtcccgcgtcagaagtatcagcagagggtgaagagatcttctgctgaccctcttcctctctgctgaggcagctgcctcctgatcctggccagcccacctctcctgctgtccccgcgtgcacaagtctcttacactggacgcccactgctcctcagcgtccagtcctcctgggcggccccaggtcctggacaataagcaacagatgatattgagtgtcgggtggggaaggaggcccagactctgcttcggccatgatttgtgactgcccaggactctcaggttgggctggccctactcaggattacactgaaagtaatggcctcgtaagtacaggtgatggttttggacacgtcaggaattcctaaaggctgaaagagtgtatccaagtaaggtctgaacctccgactgccttttatttgggggaacacaaaaccaaacagcagatgttttggacttgatctgtgtacgtacatggggacctgtctgcatatacacacggggaatgccagaagaaggcccagtctgcaccaggcgtctggtcaacttagcacaagggcagtgcctggacggacccggagcccccgcatatcagcagttcacccagtactcctcagagactggtttccctctaaacccatcccgggcacataccacccctgttttgcatgtatttctcatttcattttagggatgacaaacatttgtgaaaccagtgagagaaggcttgatgtgtataaaagacgtgatgtgcaccacctcgatctcggtgtttcaggcactaaagcaacaaaacaacccatagtatctcattttgtcatcagatccagaagaaatatcctggttttccagcatgtttacccacatgttttgggcatggataaagtgaagaggcctactcaccattatccctgcagcgtgacaccttttgattgtcactgaccactcagaaggggccacggcctcctggctgtgttcctgagcccccgtcgtgcctctcccagacagcagctgtctggcccttgctgggtgagggcacaccactgccaggggtcagcctcgcacccaggccaggcagaagctgtgctctgaagctaggacagctggctgagaagtgggttcaggcgaagggtgaagccatgtgtagcagttcctgccagtgcagatctggagaggagctggcccggaaggcgtggttgtgaaagcgcccttcttatgttaggaggccttggcaaaattggatttcttcaaaaatacatgtaaaggtctgttgttgaattgtactctgcccctggaagcagatacagatggctgcctgctgctcggctttgcttttgcttttcccaccgtgttttcatctttgttcacttgaggctttccccagctggtgtgtgcaggacagttcatggtaatgttgccctctgaggccccgtacaccagaagggaggccctggaaaattttgtgcttccaacgtggccttcaattcttgcttttttgcccctcggaagcatggggcttttgagcacacttaaaaaaagaaaaatctgtaacttggtgcttattgatgaattgcaagctggccttgcagatggagatatttatctttcagtttatttgaaagaggtctggtttaaaatttgtagcctacatttgttttatttattgtatttgtgtgtttgtgtttgtttttttttaagggtgagccaggtctagcccaacagtctaaactatccagtcaataccgagtgaagtggcagccagcactgttcactctgtgtcttttgaagtgccttgaaggcccagatgaaattttaaagggagggggtccatgtccttccctcccccaccccgcctcattctttaatcaaaggatgtcttctcccttgtttgagaatgaagaaactcgccacctctgacctacctttgcctttttctgtcatggagaatactcacccttcagaaacagaccaaaggccaaaacctgctgatttttctattgaaaatatgtccccttgcaaagaccctaaacaaaaagttaagtttctttctttcacctatttgtacaactccaagttacagctgaatctgtcgtgactttcctgagatctacccggggcttggctgtctgttctgggcactggctccgagttcccctcctgggatttgcaggagggcagtactgaacctgcattcttctccttgtaaatgtaggccgggtgcccctgttctccgggtttggaacaatacgaggttggtgctgatgggatttacttgcgtacgtgctcttcacaaaaacaccgtggatgctgaagttagagcacgtcgccacagagcttgacatcaatgttagagggtctcttactccccgcccagctgtgatgtttcatctgctttggttgttttggtggtcttttttaaaaatagagatttcacatctgcccagaccccactcaaaacgatttggtcaggttctggttggacaagtttaaaatcaaagtagtgcccggaattccctcaaaccacccaacttcatccaggaatacagtctgcagtgcagcaacagaaccgcttaccaagaactgtgcttacatacctttgtcatctctcttccccccttggaagttgtcctcagggggatttgttcctgtcctggggatttacctgggatggtggctgcctgtgcttttgctcatggccttgacagtgctctagttgctggatctaatggcctgtcttggtttctatcacatgagaaggggttgtttttttggggtgactcggactgaattccccatactgtt

SEQ ID NO: 362026 - DNA, 5411 bp, Homo sapiens
agcgggaagcgcctgtgctctgccgagactgccgtgcccattgctcgcctcggtcgccgccgctttagcccgcctccgggggagcggccgcctattgtctttctccgcggcgaaggtgaagagttgtcccagctcggcccgcgggggagccccgggagccgcacgtgtcctgggtcatgaaacttaatccacagcaagctcccttatatggtgattgtgttgttacagtgctgcttgctgaagaggacaaagctgaagatgatgtagtgttttacttggtatttttgggttccaccctccgtcactgtacaagtactcggaaggtcagttctgatacattggagaccattgctcctggtcatgattgttgtgaaacagtgaaggtgcagctctgtgcttccaaagagggccttcccgtgtttgtggtggctgaagaagactttcatttcgtccaggatgaagcgtatgatgcagctcaattcctagcaaccagtgctggaaatcagcaggctttgaactttacccgttttcttgaccagtcaggacccccatctggggatgtgaattcccttgataagaagttggtgctggcattcaggcacctgaagctgcccacggagtggaatgtattggggacagatcagagtttgcatgatgctggcccgcgagagacattgatgcattttgctgtgcggctgggactgctgaggttgacgtggttcctgttgcagaagccaggtggccgcggagctctcagtatccacaaccaggaaggggcgacgcctgtgagcttggccttggagcgaggctatcacaagctgcaccagcttctaaccgaggagaatgctggagaaccagactcctggagcagtttatcctatgaaataccgtatggagactgttctgtgaggcatcatcgagagttggacatctatacattaacctctgagtctgattcacatcatgaacacccatttcctggagacggttgcactggaccaatttttaaacttatgaacatccaacagcaactaatgaaaacaaacctcaagcagatggacagtcttatgcccttaatgatgacagcacaggatccttccagtgccccagagacagatggccagtttcttccctgtgcaccggagcccacggaccctcagcgactttcttcttctgaagagactgagagcactcagtgctgcccagggagccctgttgcacagactgaaagtccctgtgatttgtcaagcatagttgaggaggagaatacagaccgttcctgtaggaagaaaaataaaggcgtggaaagaaaaggggaagaggtggagccagcacctattgtggactctggaactgtatctgatcaagacagctgccttcagagcttgcctgattgtggagtaaagggcacggaaggcctttcgtcctgtggaaacagaaatgaagaaactggaacaaaatcttctggaatgcccacagaccaggagtccctgagcagtggagatgctgtgcttcagagagacttggtcatggagccaggcacagcccagtattcctctggaggtgaactgggaggcatttcaacaacaaatgtcagtaccccagacactgcaggggaaatggaacatgggctcatgaacccagatgccactgtttggaagaatgtgcttcagggaggggaaagtacaaaggaaagatttgagaactctaatattggcacagctggagcctctgacgtgcacgtcacaagtaagcctgtggataaaatcagtgttccaaactgtgcccctgccgccagttccctggatggtaacaaacctgctgagtcttcacttgcatttagtaatgaagaaacctccactgaaaaaacagcagaaacggaaacttcacgaagtcgtgaggagagtgctgatgctccagtagatcagaattctgtggtgattccagctgctgcaaaagacaagatttcagatggattagaaccttatactctcttagcagcaggcataggtgaggcaatgtcaccctcagatttagcccttcttgggctggaagaagatgtaatgccacaccagaactcagaaacaaattcatctcatgctcaaagccaaaagggcaaatcctcacccatttgttctacaactggagacgataaactttgtgcagactctgcatgtcaacagaacacagtgacttctagtggcgatttggttgcaaaactgtgtgataacatagttagcgagtccgaaagcaccacagcaaggcaacccagctcacaagatccacccgatgcctcccactgtgaagacccacaggctcatacagtcacctctgaccctgtaagggatacccaggaacgtgcggatttttgtcctttcaaagtggtggataacaaaggccaacgaaaagatgtgaaactagataaacctttaacaaatatgcttgaggtggtttcacatccacatccagttgtccctaaaatggagaaagaactggtgccagaccaggcagtaatatcagacagtactttctctctggcaaacagtccaggcagtgaatcagtaaccaaggatgacgcactttcttttgtcccctcccagaaagaaaagggaacagcaactcctgaactacatacagctacagattatagagatggcccagatggaaattcgaatgagcctgatacgcggccactagaagacagggcagcaggcctgtccacatcctccactgctgcagagcttcagcacgggatggggaataccagtctcacaggacttggtggagagcatgagggtcctgcccctccagcaatcccagaagctctgaatatcaaggggaacactgactcttccctgcaaagtatgggtaaggccactttggctttagattcagttttgactgaagaaggaaaacttctggtggtttcagaaagctctgcagctcaggaacaagataaggataaagcggtgacctgttcctctattaaggaaaatgctctctcttcaggaactttgcaggaagagcagagaacaccacctcctggacaagatactcaacaatttcatgaaaaatcaatctcagctgactgtgccaaggacaaagcacttcagctaagtaattcaccgggtgcatcctctgcctttcttaaggcagaaactgaacataacaaggaagtggccccacaagtctcactgctgactcaaggtggggctgcccagagcctggtgccaccaggagcaagtctggccacagagtcaaggcaggaagccttgggggcagagcacaacagctctgctctgttgccatgtctgttgccagatgggtctgatgggtccgatgctcttaactgcagtcaggcttctcctctggatgttggagtgaagaacactcaatcccagggaaaaactagtgcctgtgaggtgagtggaaatgtgacggtggatgttacaggggttaatgctctacaaggtatggctgagcccagaagagagaatatatcacacaacacccaagacatcctgattccaaacgtcttgttgagccaagagaagaatgccgttctaggtttgccagtggctctacaggacaaagctgtgactgacccacagggagttggaaccccagagatgatacctcttgattgggagaaagggaagctggagggagcagaccacagctgtaccatgggtgacgctgaggaagcccaaatagacgatgaagcacatcctgtcctactgcagcctgttgccaaggagctccccacagacatggagctctcagcccatgatgatggggccccagctggtgtgagggaagtcacgcgagccccgccttcaggcagagaaaggagcactccctctctaccttgcatggtctctgcccaggacgcacctctgcctaagggagcagacttgatagaggaggctgccagccgtatagtggatgctgtcatcgaacaagtcaaggccgctggagcactgcttactgagggggaggcctgtcacatgtcactgtccagccctgagttgggtcctctcactaaaggactagagagtgcttttacagaaaaagtgagtactttcccacctggggagagcctaccaatgggcagtactcctgaggaagccacggggagccttgcaggatgttttgctggaagggaggagccagagaagatcattttacctgtccaggggcctgagccagcagcagaaatgccagacgtgaaagctgaagatgaagtggattttagagcaagttcaatttctgaagaagtggctgtagggagcatagctgctacactgaagatgaagcaaggcccaatgacccaggcgataaaccgagaaaactggtgtacaatagagccatgccctgatgcagcatctcttctggcttccaagcagagcccagaatgtgagaacttcctggatgttggactgggcagagagtgtacctcaaaacaaggtgtacttaaaagagaatctgggagtgattctgacctctttcactcacccagtgatgacatggacagcatcatcttcccaaagccagaggaagagcatttggcctgtgatatcaccggatccagttcatccaccgatgacacggcttcactggaccgacattcttctcatggcagtgatgtgtctctctcccagattttaaagccaaacaggtcaagagatcggcaaagccttgatggattctacagccatgggatgggagctgagggtcgagaaagtgagagtgagcctgctgacccaggcgacgtggaggaggaggagatggacagtatcactgaagtgcctgcaaactgctctgtcctaaggagctccatgcgctctctttctcccttccggaggcacagctgggggcctgggaaaaatgcagccagcgatgcagaaatgaaccaccggagtttcagtctagaaggcttgacaggaggagctggtgtcggaaacaagccatcctcatctctagaagtaagctctgcaaatgccgaagagctcagacacccattcagtggtgaggaacgggttgactctttggtgtcactttcagaagaggatctggagtcagaccagagagaacataggatgtttgatcagcagatatgtcacagatctaagcagcagggatttaattactgtacatcagccatttcctctccattgacaaaatccatctcattaatgacaatcagccatcctggattggacaattcacggcccttccacagtaccttccacaataccagtgctaatctgactgagagtataacagaagagaactataatttcctgccacatagcccctccaagaaagattctgaatggaagagtggaacaaaagtcagtcgtacattcagctacatcaagaataaaatgtctagcagcaagaagagcaaa

SEQ ID NO: 362027 - DNA, 4739 bp, Homo sapiens
atctgatacgggcgagcgctgaccctatgcgtgtaccaaagacaatgaagtggagcaggaagatctagcacagtccttgagcctggtgaaggatgtgattggagctgtagacagcaaagtggcaagttatgaaaagaaagtgcgtctcaatgagatttatacaaagacagatagcaagtcaatcatgaggatgaagagtggtcagatgtttgccaaggaagatttgaaacggaagaagcttgtacgtgatgggagtgtgtttctgaagaatgcagcaggaaggttgaaagaggttcaagcagttcttctcactgacattttagttttccttcaagaaaaagaccagaagtacatctttgcatcattggaccagaagtcaacagtgatctctttaaagaagctgattgtgagagaagtggcacatgaggagaaaggtttattcctgatcagcatggggatgacagatccagagatggtagaagtccatgccagctccaaagaggaacgaaacagctggattcagatcattcaggacacaatcaacaccctgaacagagatgaagatgaaggaattcctagtgagaatgaggaagaaaagaaaatgttggacaccagagcccgagaattaaaagaacaacttcaccagaaggaccaaaaaatcctactcttgttggaagagaaggagatgattttccgggacatggctgagtgcagcacccctctcccagaggattgctccccaacacatagccctagagttctcttccgctccaacacagaagaggctctcaaaggaggacctttaatgaaaagtgcaataaatgaggtggagatccttcagggtttggtgagtggaaatctgggaggcacacttgggccgactgtcagcagccccattgagcaagatgtggtcggtcccgtttccctgccccggagagcagagacctttggaggatttgacagccatcagatgaatgcttcaaaaggaggcgagaaggaagagggagatgatggccaagatcttaggagaacggaatcagatagtggcctaaaaaagggtggaaatgctaacctggtatttatgcttaaaagaaacagtgagcaggttgtccagagcgttgttcatctctacgagctcctcagcgctctgcagggtgtggtgctgcagcaggacagctacattgaggaccagaaactggtgctgagcgagagggcgctcactcgcagcttgtcccgcccgagctccctcattgagcaggagaagcagcgcagcctggagaagcagcgccaggacctggccaacctgcagaagcagcaggcccagtacctcgaggagaagcgcaggcgcgagcgtgagtgggaagctcgtgagagggagctgcgggagcgggaggccctcctggcccagcgcgaggaggaggtgcagcaggggcagcaggacctggaaaaggagcgggaggagctccagcagaagaagggcacataccagtatgacctggagcgactgcgtgctgcccagaaacagcttgagagggaacaggagcagctgcgccgggaggcagagcggctcagccagcggcagacagaacgggacctgtgtcaggtttcccatccacataccaagctgatgaggatcccatcgttcttccccagtcctgaggagcccccctcgccatctgcaccttccatagccaaatcagggtcattggactcagaactttcagtgtccccaaaaaggaacagcatctctcggacacacaaagataaggggccttttcacatactgagttcaaccagccagacaaacaaaggaccagaagggcagagccaggcccctgcgtccacctctgcctctacccgcctgtttgggttaacaaagccaaaggaaaagaaggagaaaaaaaagaagaacaaaaccagccgctctcagcccggtgatggtcccgcgtcagaagtatcagcagagggtgaagagatcttctgctgaccctcttcctctctgctgaggcagctgcctcctgatcctggccagcccacctctcctgctgtccccgcgtgcacaagtctcttacactggacgcccactgctcctcagcgtccagtcctcctgggcggccccaggtcctggacaataagcaacagatgatattgagtgtcgggtggggaaggaggcccagactctgcttcggccatgatttgtgactgcccaggactctcaggttgggctggccctactcaggattacactgaaagtaatggcctcgtaagtacaggtgatggttttggacacgtcaggaattcctaaaggctgaaagagtgtatccaagtaaggtctgaacctccgactgccttttatttgggggaacacaaaaccaaacagcagatgttttggacttgatctgtgtacgtacatggggacctgtctgcatatacacacggggaatgccagaagaaggcccagtctgcaccaggcgtctggtcaacttagcacaagggcagtgcctggacggacccggagcccccgcatatcagcagttcacccagtactcctcagagactggtttccctctaaacccatcccgggcacataccacccctgttttgcatgtatttctcatttcattttagggatgacaaacatttgtgaaaccagtgagagaaggcttgatgtgtataaaagacgtgatgtgcaccacctcgatctcggtgtttcaggcactaaagcaacaaaacaacccatagtatctcattttgtcatcagatccagaagaaatatcctggttttccagcatgtttacccacatgttttgggcatggataaagtgaagaggcctactcaccattatccctgcagcgtgacaccttttgattgtcactgaccactcagaaggggccacggcctcctggctgtgttcctgagcccccgtcgtgcctctcccagacagcagctgtctggcccttgctgggtgagggcacaccactgccaggggtcagcctcgcacccaggccaggcagaagctgtgctctgaagctaggacagctggctgagaagtgggttcaggcgaagggtgaagccatgtgtagcagttcctgccagtgcagatctggagaggagctggcccggaaggcgtggttgtgaaagcgcccttcttatgttaggaggccttggcaaaattggatttcttcaaaaatacatgtaaaggtctgttgttgaattgtactctgcccctggaagcagatacagatggctgcctgctgctcggctttgcttttgcttttcccaccgtgttttcatctttgttcacttgaggctttccccagctggtgtgtgcaggacagttcatggtaatgttgccctctgaggccccgtacaccagaagggaggccctggaaaattttgtgcttccaacgtggccttcaattcttgcttttttgcccctcggaagcatggggcttttgagcacacttaaaaaaagaaaaatctgtaacttggtgcttattgatgaattgcaagctggccttgcagatggagatatttatctttcagtttatttgaaagaggtctggtttaaaatttgtagcctacatttgttttatttattgtatttgtgtgtttgtgtttgtttttttttaagggtgagccaggtctagcccaacagtctaaactatccagtcaataccgagtgaagtggcagccagcactgttcactctgtgtcttttgaagtgccttgaaggcccagatgaaattttaaagggagggggtccatgtccttccctcccccaccccgcctcattctttaatcaaaggatgtcttctcccttgtttgagaatgaagaaactcgccacctctgacctacctttgcctttttctgtcatggagaatactcacccttcagaaacagaccaaaggccaaaacctgctgatttttctattgaaaatatgtccccttgcaaagaccctaaacaaaaagttaagtttctttctttcacctatttgtacaactccaagttacagctgaatctgtcgtgactttcctgagatctacccggggcttggctgtctgttctgggcactggctccgagttcccctcctgggatttgcaggagggcagtactgaacctgcattcttctccttgtaaatgtaggccgggtgcccctgttctccgggtttggaacaatacgaggttggtgctgatgggatttacttgcgtacgtgctcttcacaaaaacaccgtggatgctgaagttagagcacgtcgccacagagcttgacatcaatgttagagggtctcttactccccgcccagctgtgatgtttcatctgctttggttgttttggtggtcttttttaaaaatagagatttcacatctgcccagaccccactcaaaacgatttggtcaggttctggttggacaagtttaaaatcaaagtagtgcccggaattccctcaaaccacccaacttcatccaggaatacagtctgcagtgcagcaacagaaccgcttaccaagaactgtgcttacatacctttgtcatctctcttccccccttggaagttgtcctcagggggatttgttcctgtcctggggatttacctgggatggtggctgcctgtgcttttgctcatggccttgacagtgctctagttgctggatctaatggcctgtcttggtttctatcacatgagaaggggttgtttttttggggtgactcggactgaattccccatactgtt

SEQ ID NO: 362028 - DNA, 7187 bp, Homo sapiens
agcgggaagcgcctgtgctctgccgagactgccgtgcccattgctcgcctcggtcgccgccgctttagcccgcctccgggggagcggccgcctattgtctttctccgcggcgaaggtgaagagttgtcccagctcggcccgcgggggagccccgggagccgcacgtgtcctgggtcatgaaacttaatccacagcaagctcccttatatggtgattgtgttgttacagtgctgcttgctgaagaggacaaagctgaagatgatgtagtgttttacttggtatttttgggttccaccctccgtcactgtacaagtactcggaaggtcagttctgatacattggagaccattgctcctggtcatgattgttgtgaaacagtgaaggtgcagctctgtgcttccaaagagggccttcccgtgtttgtggtggctgaagaagactttcatttcgtccaggatgaagcgtatgatgcagctcaattcctagcaaccagtgctggaaatcagcaggctttgaactttacccgttttcttgaccagtcaggacccccatctggggatgtgaattcccttgataagaagttggtgctggcattcaggcacctgaagctgcccacggagtggaatgtattggggacagatcagagtttgcatgatgctggcccgcgagagacattgatgcattttgctgtgcggctgggactgctgaggttgacgtggttcctgttgcagaagccaggtggccgcggagctctcagtatccacaaccaggaaggggcgacgcctgtgagcttggccttggagcgaggctatcacaagctgcaccagcttctaaccgaggagaatgctggagaaccagactcctggagcagtttatcctatgaaataccgtatggagactgttctgtgaggcatcatcgagagttggacatctatacattaacctctgagtctgattcacatcatgaacacccatttcctggagacggttgcactggaccaatttttaaacttatgaacatccaacagcaactaatgaaaacaaacctcaagcagatggacagtcttatgcccttaatgatgacagcacaggatccttccagtgccccagagacagatggccagtttcttccctgtgcaccggagcccacggaccctcagcgactttcttcttctgaagagactgagagcactcagtgctgcccagggagccctgttgcacagactgaaagtccctgtgatttgtcaagcatagttgaggaggagaatacagaccgttcctgtaggaagaaaaataaaggcgtggaaagaaaaggggaagaggtggagccagcacctattgtggactctggaactgtatctgatcaagacagctgccttcagagcttgcctgattgtggagtaaagggcacggaaggcctttcgtcctgtggaaacagaaatgaagaaactggaacaaaatcttctggaatgcccacagaccaggagtccctgagcagtggagatgctgtgcttcagagagacttggtcatggagccaggcacagcccagtattcctctggaggtgaactgggaggcatttcaacaacaaatgtcagtaccccagacactgcaggggaaatggaacatgggctcatgaacccagatgccactgtttggaagaatgtgcttcagggaggggaaagtacaaaggaaagatttgagaactctaatattggcacagctggagcctctgacgtgcacgtcacaagtaagcctgtggataaaatcagtgttccaaactgtgcccctgccgccagttccctggatggtaacaaacctgctgagtcttcacttgcatttagtaatgaagaaacctccactgaaaaaacagcagaaacggaaacttcacgaagtcgtgaggagagtgctgatgctccagtagatcagaattctgtggtgattccagctgctgcaaaagacaagatttcagatggattagaaccttatactctcttagcagcaggcataggtgaggcaatgtcaccctcagatttagcccttcttgggctggaagaagatgtaatgccacaccagaactcagaaacaaattcatctcatgctcaaagccaaaagggcaaatcctcacccatttgttctacaactggagacgataaactttgtgcagactctgcatgtcaacagaacacagtgacttctagtggcgatttggttgcaaaactgtgtgataacatagttagcgagtccgaaagcaccacagcaaggcaacccagctcacaagatccacccgatgcctcccactgtgaagacccacaggctcatacagtcacctctgaccctgtaagggatacccaggaacgtgcggatttttgtcctttcaaagtggtggataacaaaggccaacgaaaagatgtgaaactagataaacctttaacaaatatgcttgaggtggtttcacatccacatccagttgtccctaaaatggagaaagaactggtgccagaccaggcagtaatatcagacagtactttctctctggcaaacagtccaggcagtgaatcagtaaccaaggatgacgcactttcttttgtcccctcccagaaagaaaagggaacagcaactcctgaactacatacagctacagattatagagatggcccagatggaaattcgaatgagcctgatacgcggccactagaagacagggcagcaggcctgtccacatcctccactgctgcagagcttcagcacgggatggggaataccagtctcacaggacttggtggagagcatgagggtcctgcccctccagcaatcccagaagctctgaatatcaaggggaacactgactcttccctgcaaagtatgggtaaggccactttggctttagattcagttttgactgaagaaggaaaacttctggtggtttcagaaagctctgcagctcaggaacaagataaggataaagcggtgacctgttcctctattaaggaaaatgctctctcttcaggaactttgcaggaagagcagagaacaccacctcctggacaagatactcaacaatttcatgaaaaatcaatctcagctgactgtgccaaggacaaagcacttcagctaagtaattcaccgggtgcatcctctgcctttcttaaggcagaaactgaacataacaaggaagtggccccacaagtctcactgctgactcaaggtggggctgcccagagcctggtgccaccaggagcaagtctggccacagagtcaaggcaggaagccttgggggcagagcacaacagctctgctctgttgccatgtctgttgccagatgggtctgatgggtccgatgctcttaactgcagtcaggcttctcctctggatgttggagtgaagaacactcaatcccagggaaaaactagtgcctgtgaggtgagtggaaatgtgacggtggatgttacaggggttaatgctctacaaggtatggctgagcccagaagagagaatatatcacacaacacccaagacatcctgattccaaacgtcttgttgagccaagagaagaatgccgttctaggtttgccagtggctctacaggacaaagctgtgactgacccacagggagttggaaccccagagatgatacctcttgattgggagaaagggaagctggagggagcagaccacagctgtaccatgggtgacgctgaggaagcccaaatagacgatgaagcacatcctgtcctactgcagcctgttgccaaggagctccccacagacatggagctctcagcccatgatgatggggccccagctggtgtgagggaagtcacgcgagccccgccttcaggcagagaaaggagcactccctctctaccttgcatggtctctgcccaggacgcacctctgcctaagggagcagacttgatagaggaggctgccagccgtatagtggatgctgtcatcgaacaagtcaaggccgctggagcactgcttactgagggggaggcctgtcacatgtcactgtccagccctgagttgggtcctctcactaaaggactagagagtgcttttacagaaaaagtgagtactttcccacctggggagagcctaccaatgggcagtactcctgaggaagccacggggagccttgcaggatgttttgctggaagggaggagccagagaagatcattttacctgtccaggggcctgagccagcagcagaaatgccagacgtgaaagctgaagatgaagtggattttagagcaagttcaatttctgaagaagtggctgtagggagcatagctgctacactgaagatgaagcaaggcccaatgacccaggcgataaaccgagaaaactggtgtacaatagagccatgccctgatgcagcatctcttctggcttccaagcagagcccagaatgtgagaacttcctggatgttggactgggcagagagtgtacctcaaaacaaggtgtacttaaaagagaatctgggagtgattctgacctctttcactcacccagtgatgacatggacagcatcatcttcccaaagccagaggaagagcatttggcctgtgatatcaccggatccagttcatccaccgatgacacggcttcactggaccgacattcttctcatggcagtgatgtgtctctctcccagattttaaagccaaacaggtcaagagatcggcaaagccttgatggattctacagccatgggatgggagctgagggtcgagaaagtgagagtgagcctgctgacccaggcgacgtggaggaggaggagatggacagtatcactgaagtgcctgcaaactgctctgtcctaaggagctccatgcgctctctttctcccttccggaggcacagctgggggcctgggaaaaatgcagccagcgatgcagaaatgaaccaccggagttcaatgcgagttcttggggatgttgtcaggagacctcccattcataggagaagtttcagtctagaaggcttgacaggaggagctggtgtcggaaacaagccatcctcatctctagaagtaagctctgcaaatgccgaagagctcagacacccattcagtggtgaggaacgggttgactctttggtgtcactttcagaagaggatctggagtcagaccagagagaacataggatgtttgatcagcagatatgtcacagatctaagcagcagggatttaattactgtacatcagccatttcctctccattgacaaaatccatctcattaatgacaatcagccatcctggattggacaattcacggcccttccacagtaccttccacaataccagtgctaatctgactgagagtataacagaagagaactataatttcctgccacatagcccctccaagaaagattctgaatggaagagtggaacaaaagtcagtcgtacattcagctacatcaagaataaaatgtctagcagcaagaagagcaaagaaaaggaaaaagaaaaagataagattaaggagaaggagaaagattctaaagacaaggagaaagataagaagactgtcaacgggcacactttcagttccattcctgttgtgggtcccatcagctgtagccagtgtatgaagcccttcaccaacaaagatgcctatacttgtgcaaattgcagtgcttttgtccacaaaggctgccgagaaagtctagcctcctgtgcaaaggtcaaaatgaagcagcccaaagggagccttcaggcacatgacacatcatcactgcccacggtcattatgagaaacaagccctcacagcccaaggagcgtcctcggtccgcagtcctcctggtggatgaaaccgctaccaccccaatatttgccaatagacgatcccagcagagtgtctcgctctccaaaagtgtctccatacagaacattactggagttggcaatgatgagaacatgtcaaacacctggaaattcctgtctcattcaacagactcactaaataaaatcagcaaggtcaatgagtcaacagaatcacttactgatgagggagggtacagacatgaatgaaggacaactactgggagactttgagattgagtccaaacagctggaagcagagtcttggagtcggataatagacagcaagtttctaaaacagcaaaagaaagatgtggtcaaacggcaagaagtaatatatgagttgatgcagacagagtttcatcatgtccgcactctcaagatcatgagtggtgtgtacagccaggggatgatggcggatctgctttttgagcagcagatggtagaaaagctgttcccctgtttggatgagctgatcagtatccatagccaattcttccagaggattctggagcggaagaaggagtctctggtggataaaagtgaaaagaactttctcatcaagaggataggggatgtgcttgtaaatcagttttcaggtgagaatgcagaacgtttaaagaagacatatggcaagttttgtgggcaacataaccagtctgtaaactacttcaaagacctttatgccaaggataagcgttttcaagcctttgtaaagaagaagatgagcagttcagttgttagaaggcttggaattccagagtgcatattgcttgtaactcagcggattaccaagtacccagttttattccaaagaatattgcagtgtaccaaagacaatgaagtggagcaggaagatctagcacagtccttgagcctggtgaaggatgtgattggagctgtagacagcaaagtggcaagttatgaaaagaaagtgcgtctcaatgagatttatacaaagacagatagcaagtcaatcatgaggatgaagagtggtcagatgtttgccaaggaagatttgaaacggaagaagcttgtacgtgatgggagtgtgtttctgaagaatgcagcaggaaggttgaaaggtaaggcttggctcttttgtcttaagtatgtgcccaggtaaaacaggcaaaaatccaagtgcttttgttggaaattcactaccagatttttttcccagagagcccatctctaaacactacccaggagcaacaagcatttagttcttcgtaatcttatatcaaaaatggtttgtgatggcctgcaaaatcatacaaaatagaggaagaagacaaagaaatgatgcagtcagggaaaatggaaaataaggttttaaaaaaacaaagcaaa

SEQ ID NO: 362029 - DNA, 6074 bp, Homo sapiens
agcgggaagcgcctgtgctctgccgagactgccgtgcccattgctcgcctcggtcgccgccgctttagcccgcctccgggggagcggccgcctattgtctttctccgcggcgaaggtgaagagttgtcccagctcggcccgcgggggagccccgggagccgcacgtgtcctgggtcatgaaacttaatccacagcaagctcccttatatggtgattgtgttgttacagtgctgcttgctgaagaggacaaagctgaagatgatgtagtgttttacttggtatttttgggttccaccctccgtcactgtacaagtactcggaaggtcagttctgatacattggagaccattgctcctggtcatgattgttgtgaaacagtgaaggtgcagctctgtgcttccaaagagggccttcccgtgtttgtggtggctgaagaagactttcatttcgtccaggatgaagcgtatgatgcagctcaattcctagcaaccagtgctggaaatcagcaggctttgaactttacccgttttcttgaccagtcaggacccccatctggggatgtgaattcccttgataagaagttggtgctggcattcaggcacctgaagctgcccacggagtggaatgtattggggacagatcagagtttgcatgatgctggcccgcgagagacattgatgcattttgctgtgcggctgggactgctgaggttgacgtggttcctgttgcagaagccaggtggccgcggagctctcagtatccacaaccaggaaggggcgacgcctgtgagcttggccttggagcgaggctatcacaagctgcaccagcttctaaccgaggagaatgctggagaaccagactcctggagcagtttatcctatgaaataccgtatggagactgttctgtgaggcatcatcgagagttggacatctatacattaacctctgagtctgattcacatcatgaacacccatttcctggagacggttgcactggaccaatttttaaacttatgaacatccaacagcaactaatgaaaacaaacctcaagcagatggacagtcttatgcccttaatgatgacagcacaggatccttccagtgccccagagacagatggccagtttcttccctgtgcaccggagcccacggaccctcagcgactttcttcttctgaagagactgagagcactcagtgctgcccagggagccctgttgcacagactgaaagtccctgtgatttgtcaagcatagttgaggaggagaatacagaccgttcctgtaggaagaaaaataaaggcgtggaaagaaaaggggaagaggtggagccagcacctattgtggactctggaactgtatctgatcaagacagctgccttcagagcttgcctgattgtggagtaaagggcacggaaggcctttcgtcctgtggaaacagaaatgaagaaactggaacaaaatcttctggaatgcccacagaccaggagtccctgagcagtggagatgctgtgcttcagagagacttggtcatggagccaggcacagcccagtattcctctggaggtgaactgggaggcatttcaacaacaaatgtcagtaccccagacactgcaggggaaatggaacatgggctcatgaacccagatgccactgtttggaagaatgtgcttcagggaggggaaagtacaaaggaaagatttgagaactctaatattggcacagctggagcctctgacgtgcacgtcacaagtaagcctgtggataaaatcagtgttccaaactgtgcccctgccgccagttccctggatggtaacaaacctgctgagtcttcacttgcatttagtaatgaagaaacctccactgaaaaaacagcagaaacggaaacttcacgaagtcgtgaggagagtgctgatgctccagtagatcagaattctgtggtgattccagctgctgcaaaagacaagatttcagatggattagaaccttatactctcttagcagcaggcataggtgaggcaatgtcaccctcagatttagcccttcttgggctggaagaagatgtaatgccacaccagaactcagaaacaaattcatctcatgctcaaagccaaaagggcaaatcctcacccatttgttctacaactggagacgataaactttgtgcagactctgcatgtcaacagaacacagtgacttctagtggcgatttggttgcaaaactgtgtgataacatagttagcgagtccgaaagcaccacagcaaggcaacccagctcacaagatccacccgatgcctcccactgtgaagacccacaggctcatacagtcacctctgaccctgtaagggatacccaggaacgtgcggatttttgtcctttcaaagtggtggataacaaaggccaacgaaaagatgtgaaactagataaacctttaacaaatatgcttgaggtggtttcacatccacatccagttgtccctaaaatggagaaagaactggtgccagaccaggcagtaatatcagacagtactttctctctggcaaacagtccaggcagtgaatcagtaaccaaggatgacgcactttcttttgtcccctcccagaaagaaaagggaacagcaactcctgaactacatacagctacagattatagagatggcccagatggaaattcgaatgagcctgatacgcggccactagaagacagggcagcaggcctgtccacatcctccactgctgcagagcttcagcacgggatggggaataccagtctcacaggacttggtggagagcatgagggtcctgcccctccagcaatcccagaagctctgaatatcaaggggaacactgactcttccctgcaaagtatgggtaaggccactttggctttagattcagttttgactgaagaaggaaaacttctggtggtttcagaaagctctgcagctcaggaacaagataaggataaagcggtgacctgttcctctattaaggaaaatgctctctcttcaggaactttgcaggaagagcagagaacaccacctcctggacaagatactcaacaatttcatgaaaaatcaatctcagctgactgtgccaaggacaaagcacttcagctaagtaattcaccgggtgcatcctctgcctttcttaaggcagaaactgaacataacaaggaagtggccccacaagtctcactgctgactcaaggtggggctgcccagagcctggtgccaccaggagcaagtctggccacagagtcaaggcaggaagccttgggggcagagcacaacagctctgctctgttgccatgtctgttgccagatgggtctgatgggtccgatgctcttaactgcagtcaggcttctcctctggatgttggagtgaagaacactcaatcccagggaaaaactagtgcctgtgaggtgagtggaaatgtgacggtggatgttacaggggttaatgctctacaaggtatggctgagcccagaagagagaatatatcacacaacacccaagacatcctgattccaaacgtcttgttgagccaagagaagaatgccgttctaggtttgccagtggctctacaggacaaagctgtgactgacccacagggagttggaaccccagagatgatacctcttgattgggagaaagggaagctggagggagcagaccacagctgtaccatgggtgacgctgaggaagcccaaatagacgatgaagcacatcctgtcctactgcagcctgttgccaaggagctccccacagacatggagctctcagcccatgatgatggggccccagctggtgtgagggaagtcacgcgagccccgccttcaggcagagaaaggagcactccctctctaccttgcatggtctctgcccaggacgcacctctgcctaagggagcagacttgatagaggaggctgccagccgtatagtggatgctgtcatcgaacaagtcaaggccgctggagcactgcttactgagggggaggcctgtcacatgtcactgtccagccctgagttgggtcctctcactaaaggactagagagtgcttttacagaaaaagtgagtactttcccacctggggagagcctaccaatgggcagtactcctgaggaagccacggggagccttgcaggatgttttgctggaagggaggagccagagaagatcattttacctgtccaggggcctgagccagcagcagaaatgccagacgtgaaagctgaagatgaagtggattttagagcaagttcaatttctgaagaagtggctgtagggagcatagctgctacactgaagatgaagcaaggcccaatgacccaggcgataaaccgagaaaactggtgtacaatagagccatgccctgatgcagcatctcttctggcttccaagcagagcccagaatgtgagaacttcctggatgttggactgggcagagagtgtacctcaaaacaaggtgtacttaaaagagaatctgggagtgattctgacctctttcactcacccagtgatgacatggacagcatcatcttcccaaagccagaggaagagcatttggcctgtgatatcaccggatccagttcatccaccgatgacacggcttcactggaccgacattcttctcatggcagtgatgtgtctctctcccagattttaaagccaaacaggtcaagagatcggcaaagccttgatggattctacagccatgggatgggagctgagggtcgagaaagtgagagtgagcctgctgacccaggcgacgtggaggaggaggagatggacagtatcactgaagtgcctgcaaactgctctgtcctaaggagctccatgcgctctctttctcccttccggaggcacagctgggggcctgggaaaaatgcagccagcgatgcagaaatgaaccaccggagttcaatgcgagttcttggggatgttgtcaggagacctcccattcataggagaagtttcagtctagaaggcttgacaggaggagctggtgtcggaaacaagccatcctcatctctagaagtaagctctgcaaatgccgaagagctcagacacccattcagtggtgaggaacgggttgactctttggtgtcactttcagaagaggatctggagtcagaccagagagaacataggatgtttgatcagcagatatgtcacagatctaagcagcagggatttaattactgtacatcagccatttcctctccattgacaaaatccatctcattaatgacaatcagccatcctggattggacaattcacggcccttccacagtaccttccacaataccagtgctaatctgactgagagtataacagaagagaactataatttcctgccacatagcccctccaagaaagattctgaatggaagagtggaacaaaagtcagtcgtacattcagctacatcaagaataaaatgtctagcagcaagaagagcaaagaaaaggaaaaagaaaaagataagattaaggagaaggagaaagattctaaagacaaggagaaagataagaagactgtcaacgggcacactttcagttccattcctgttgtgggtcccatcagctgtagccagtgtatgaagcccttcaccaacaaagatgcctatacttgtgcaaattgcagtgcttttgtccacaaaggctgccgagaaagtctagcctcctgtgcaaaggtcaaaatgaagcagcccaaagggagccttcaggcacatgacacatcatcactgcccacggtcattatgagaaacaagccctcacagcccaaggagcgtcctcggtccgcagtcctcctggtggatgaaaccgctaccaccccaatatttgccaatagacgatcccagcagagtgtctcgctctccaaaagtgtctccatacagaacattactggagttggcaatgatgagaacatgtcaaacacctggaaattcctgtctcattcaacagactcactaaataaaatcagcaaggtcaatgagtcaacagaatcacttactgatgaggaggtagtcacgactgtaattgaggcactccggggaattgggatgggccca

SEQ ID NO: 362030 - DNA, 7678 bp, Homo sapiens
  misc_feature (6133)..(6133): n is a, c, g, or t
agcgggaagcgcctgtgctctgccgagactgccgtgcccattgctcgcctcggtcgccgccgctttagcccgcctccgggggagcggccgcctattgtctttctccgcggcgaaggtgaagagttgtcccagctcggcccgcgggggagccccgggagccgcacgtgtcctgggtcatgaaacttaatccacagcaagctcccttatatggtgattgtgttgttacagtgctgcttgctgaagaggacaaagctgaagatgatgtagtgttttacttggtatttttgggttccaccctccgtcactgtacaagtactcggaaggtcagttctgatacattggagaccattgctcctggtcatgattgttgtgaaacagtgaaggtgcagctctgtgcttccaaagagggccttcccgtgtttgtggtggctgaagaagactttcatttcgtccaggatgaagcgtatgatgcagctcaattcctagcaaccagtgctggaaatcagcaggctttgaactttacccgttttcttgaccagtcaggacccccatctggggatgtgaattcccttgataagaagttggtgctggcattcaggcacctgaagctgcccacggagtggaatgtattggggacagatcagagtttgcatgatgctggcccgcgagagacattgatgcattttgctgtgcggctgggactgctgaggttgacgtggttcctgttgcagaagccaggtggccgcggagctctcagtatccacaaccaggaaggggcgacgcctgtgagcttggccttggagcgaggctatcacaagctgcaccagcttctaaccgaggagaatgctggagaaccagactcctggagcagtttatcctatgaaataccgtatggagactgttctgtgaggcatcatcgagagttggacatctatacattaacctctgagtctgattcacatcatgaacacccatttcctggagacggttgcactggaccaatttttaaacttatgaacatccaacagcaactaatgaaaacaaacctcaagcagatggacagtcttatgcccttaatgatgacagcacaggatccttccagtgccccagagacagatggccagtttcttccctgtgcaccggagcccacggaccctcagcgactttcttcttctgaagagactgagagcactcagtgctgcccagggagccctgttgcacagactgaaagtccctgtgatttgtcaagcatagttgaggaggagaatacagaccgttcctgtaggaagaaaaataaaggcgtggaaagaaaaggggaagaggtggagccagcacctattgtggactctggaactgtatctgatcaagacagctgccttcagagcttgcctgattgtggagtaaagggcacggaaggcctttcgtcctgtggaaacagaaatgaagaaactggaacaaaatcttctggaatgcccacagaccaggagtccctgagcagtggagatgctgtgcttcagagagacttggtcatggagccaggcacagcccagtattcctctggaggtgaactgggaggcatttcaacaacaaatgtcagtaccccagacactgcaggggaaatggaacatgggctcatgaacccagatgccactgtttggaagaatgtgcttcagggaggggaaagtacaaaggaaagatttgagaactctaatattggcacagctggagcctctgacgtgcacgtcacaagtaagcctgtggataaaatcagtgttccaaactgtgcccctgccgccagttccctggatggtaacaaacctgctgagtcttcacttgcatttagtaatgaagaaacctccactgaaaaaacagcagaaacggaaacttcacgaagtcgtgaggagagtgctgatgctccagtagatcagaattctgtggtgattccagctgctgcaaaagacaagatttcagatggattagaaccttatactctcttagcagcaggcataggtgaggcaatgtcaccctcagatttagcccttcttgggctggaagaagatgtaatgccacaccagaactcagaaacaaattcatctcatgctcaaagccaaaagggcaaatcctcacccatttgttctacaactggagacgataaactttgtgcagactctgcatgtcaacagaacacagtgacttctagtggcgatttggttgcaaaactgtgtgataacatagttagcgagtccgaaagcaccacagcaaggcaacccagctcacaagatccacccgatgcctcccactgtgaagacccacaggctcatacagtcacctctgaccctgtaagggatacccaggaacgtgcggatttttgtcctttcaaagtggtggataacaaaggccaacgaaaagatgtgaaactagataaacctttaacaaatatgcttgaggtggtttcacatccacatccagttgtccctaaaatggagaaagaactggtgccagaccaggcagtaatatcagacagtactttctctctggcaaacagtccaggcagtgaatcagtaaccaaggatgacgcactttcttttgtcccctcccagaaagaaaagggaacagcaactcctgaactacatacagctacagattatagagatggcccagatggaaattcgaatgagcctgatacgcggccactagaagacagggcagcaggcctgtccacatcctccactgctgcagagcttcagcacgggatggggaataccagtctcacaggacttggtggagagcatgagggtcctgcccctccagcaatcccagaagctctgaatatcaaggggaacactgactcttccctgcaaagtatgggtaaggccactttggctttagattcagttttgactgaagaaggaaaacttctggtggtttcagaaagctctgcagctcaggaacaagataaggataaagcggtgacctgttcctctattaaggaaaatgctctctcttcaggaactttgcaggaagagcagagaacaccacctcctggacaagatactcaacaatttcatgaaaaatcaatctcagctgactgtgccaaggacaaagcacttcagctaagtaattcaccgggtgcatcctctgcctttcttaaggcagaaactgaacataacaaggaagtggccccacaagtctcactgctgactcaaggtggggctgcccagagcctggtgccaccaggagcaagtctggccacagagtcaaggcaggaagccttgggggcagagcacaacagctctgctctgttgccatgtctgttgccagatgggtctgatgggtccgatgctcttaactgcagtcaggcttctcctctggatgttggagtgaagaacactcaatcccagggaaaaactagtgcctgtgaggtgagtggaaatgtgacggtggatgttacaggggttaatgctctacaaggtatggctgagcccagaagagagaatatatcacacaacacccaagacatcctgattccaaacgtcttgttgagccaagagaagaatgccgttctaggtttgccagtggctctacaggacaaagctgtgactgacccacagggagttggaaccccagagatgatacctcttgattgggagaaagggaagctggagggagcagaccacagctgtaccatgggtgacgctgaggaagcccaaatagacgatgaagcacatcctgtcctactgcagcctgttgccaaggagctccccacagacatggagctctcagcccatgatgatggggccccagctggtgtgagggaagtcacgcgagccccgccttcaggcagagaaaggagcactccctctctaccttgcatggtctctgcccaggacgcacctctgcctaagggagcagacttgatagaggaggctgccagccgtatagtggatgctgtcatcgaacaagtcaaggccgctggagcactgcttactgagggggaggcctgtcacatgtcactgtccagccctgagttgggtcctctcactaaaggactagagagtgcttttacagaaaaagtgagtactttcccacctggggagagcctaccaatgggcagtactcctgaggaagccacggggagccttgcaggatgttttgctggaagggaggagccagagaagatcattttacctgtccaggggcctgagccagcagcagaaatgccagacgtgaaagctgaagatgaagtggattttagagcaagttcaatttctgaagaagtggctgtagggagcatagctgctacactgaagatgaagcaaggcccaatgacccaggcgataaaccgagaaaactggtgtacaatagagccatgccctgatgcagcatctcttctggcttccaagcagagcccagaatgtgagaacttcctggatgttggactgggcagagagtgtacctcaaaacaaggtgtacttaaaagagaatctgggagtgattctgacctctttcactcacccagtgatgacatggacagcatcatcttcccaaagccagaggaagagcatttggcctgtgatatcaccggatccagttcatccaccgatgacacggcttcactggaccgacattcttctcatggcagtgatgtgtctctctcccagattttaaagccaaacaggtcaagagatcggcaaagccttgatggattctacagccatgggatgggagctgagggtcgagaaagtgagagtgagcctgctgacccaggcgacgtggaggaggaggagatggacagtatcactgaagtgcctgcaaactgctctgtcctaaggagctccatgcgctctctttctcccttccggaggcacagctgggggcctgggaaaaatgcagccagcgatgcagaaatgaaccaccggagtttcagtctagaaggcttgacaggaggagctggtgtcggaaacaagccatcctcatctctagaagtaagctctgcaaatgccgaagagctcagacacccattcagtggtgaggaacgggttgactctttggtgtcactttcagaagaggatctggagtcagaccagagagaacataggatgtttgatcagcagatatgtcacagatctaagcagcagggatttaattactgtacatcagccatttcctctccattgacaaaatccatctcattaatgacaatcagccatcctggattggacaattcacggcccttccacagtaccttccacaataccagtgctaatctgactgagagtataacagaagagaactataatttcctgccacatagcccctccaagaaagattctgaatggaagagtggaacaaaagtcagtcgtacattcagctacatcaagaataaaatgtctagcagcaagaagagcaaagtgagtatcactgtgggcattgcttgtgatcacctcagtaggatcctgtcacagcctgcattcacaccaaaactggttaaatcatggggacataaatggaaataaattcaggattactctccgaaatcgcctaatatttaaaggaaaataataagaagaaaaatagcaagaagtggaactaccagttactgagttttcactatatgctaagtgctttccatatattatttaaccctttcaacaaccctgtcaggtaggtgttatctctcttttctaaaagtgatgtaccttaccgaggatactcctctaatgtgaagaagtagttcaaaccagatctctttggtttcaaatcccatactcttaaaccacagtgcttaaatctgtaatatcagtttaaatgcaacagaaggattttatgcaaagatcaaaggattgaaaatatttatatttgggtttagagggaaggattatcccacagaagattacaagaacttttaagactaatatgatttcttagatctatttctaattaggagcatttggaatatattctcttagtgattaagagattaaataaatgtttaaaccgtgtgtgtgtgtgtgtgtgtgtgtgtctgtgtgtgtgtgtgtgtaaggctccactgtatcacccaggctggagcacagtggcgtgaccatagctcactgcagtcttgaactgccaggcttaagcagtttcctgnctcgcaccgtagcctcccgagtagccaggactacagtcatgttgtgccatcgtgctgagctatgtttaaatttgtttgtaaagatgaagtcttgctgttgtgtctaggccggtctaatgccttacctcaaacactcttctcgctgcaggcttccgaagccctgggtgtgatccaccgtgcccagcctaaagtaacattttttatctaattatttttcacatgctcattatggaaatcttcaaaatctaaaagtaaaagaatgaaaatctcctggaataaccccgcttagagataactacacttaatgttttggtttatatatttctaatcttttttaaaaatgtattttcaaaagaaagggagaaaagaagttcactttcttatactgattcccagtgctaaaccaaaactgattccatttcaagtccgtggggaaaaacttttcgcctctcacaccctgttcatctacccacaacaccctctaacaaaataaagacataagtaaataaaaatttgaaatcagttaaggaactcttgcaaggaatcactgtgtgtgtgtgtgtgtgtatgtgtgtgtgtgcacgtgcatgcatgtgtgtgtgtgtgtgtgtgtggtatatacatgtacatacagatatatacacacgtagatacatgcatatttagaagtaagggaataaacaaacattgaattcaagaatattgtcataaaagggcattgcctcctccctcacaaaacaaggtgcactaagcttctcaagccctcacttcagtgggctgatggaaatatagccaaagtattttaccatgttttgtaagatctcttggtttagcaaatacattcaaagaaatttttccaccaaacgtgccacaagaattgtgttttcatttctcctgtgcaagtacagaatggagagaaagtaggaatcagggagagatgcaaagagtctagcaaattatttctagcataatcacacatttaacttcagactcagccttgtattataattccaaaaaaaaaaaaaaatgagggtcaaagaatacggtttacccagtatcctacgtattaacatttgggcagccaggttaaaaatagagcctaacctatttaactaaccactgccggctgggatactagtgggtatcaacaaaagaaaatcccccttggacagagcaatataaattagccaagtattattaaatgccttgtatagtcttagcatcccactaggtgttaacaggcacctaagagaactaaagctcatagtcctgaccttgaaaaactttatgatctagttgggatgaattccaaaatgtttccatggttttttatttggctttaaaactactgaatcttgtcttcaaacaagcttttcgtggaagaccaataaataagtggagattccccctttctagccatctccccaatgtcatggagttttaggacagagcagtgaatgtaccacttatctcatggataaggtaaaacatacacatgataggaaaaaaacaacgtaagttggaatttagaaactggaccctgac

SEQ ID NO: 362031 - DNA, 5531 bp, Homo sapiens
agcgggaagcgcctgtgctctgccgagactgccgtgcccattgctcgcctcggtcgccgccgctttagcccgcctccgggggagcggccgcctattgtctttctccgcggcgaaggtgaagagttgtcccagctcggcccgcgggggagccccgggagccgcacgtgtcctgggtcatgaaacttaatccacagcaagctcccttatatggtgattgtgttgttacagtgctgcttgctgaagaggacaaagctgaagatgatgtagtgttttacttggtatttttgggttccaccctccgtcactgtacaagtactcggaaggtcagttctgatacattggagaccattgctcctggtcatgattgttgtgaaacagtgaaggtgcagctctgtgcttccaaagagggccttcccgtgtttgtggtggctgaagaagactttcatttcgtccaggatgaagcgtatgatgcagctcaattcctagcaaccagtgctggaaatcagcaggctttgaactttacccgttttcttgaccagtcaggacccccatctggggatgtgaattcccttgataagaagttggtgctggcattcaggcacctgaagctgcccacggagtggaatgtattggggacagatcagagtttgcatgatgctggcccgcgagagacattgatgcattttgctgtgcggctgggactgctgaggttgacgtggttcctgttgcagaagccaggtggccgcggagctctcagtatccacaaccaggaaggggcgacgcctgtgagcttggccttggagcgaggctatcacaagctgcaccagcttctaaccgaggagaatgctggagaaccagactcctggagcagtttatcctatgaaataccgtatggagactgttctgtgaggcatcatcgagagttggacatctatacattaacctctgagtctgattcacatcatgaacacccatttcctggagacggttgcactggaccaatttttaaacttatgaacatccaacagcaactaatgaaaacaaacctcaagcagatggacagtcttatgcccttaatgatgacagcacaggatccttccagtgccccagagacagatggccagtttcttccctgtgcaccggagcccacggaccctcagcgactttcttcttctgaagagactgagagcactcagtgctgcccagggagccctgttgcacagactgaaagtccctgtgatttgtcaagcatagttgaggaggagaatacagaccgttcctgtaggaagaaaaataaaggcgtggaaagaaaaggggaagaggtggagccagcacctattgtggactctggaactgtatctgatcaagacagctgccttcagagcttgcctgattgtggagtaaagggcacggaaggcctttcgtcctgtggaaacagaaatgaagaaactggaacaaaatcttctggaatgcccacagaccaggagtccctgagcagtggagatgctgtgcttcagagagacttggtcatggagccaggcacagcccagtattcctctggaggtgaactgggaggcatttcaacaacaaatgtcagtaccccagacactgcaggggaaatggaacatgggctcatgaacccagatgccactgtttggaagaatgtgcttcagggaggggaaagtacaaaggaaagatttgagaactctaatattggcacagctggagcctctgacgtgcacgtcacaagtaagcctgtggataaaatcagtgttccaaactgtgcccctgccgccagttccctggatggtaacaaacctgctgagtcttcacttgcatttagtaatgaagaaacctccactgaaaaaacagcagaaacggaaacttcacgaagtcgtgaggagagtgctgatgctccagtagatcagaattctgtggtgattccagctgctgcaaaagacaagatttcagatggattagaaccttatactctcttagcagcaggcataggtgaggcaatgtcaccctcagatttagcccttcttgggctggaagaagatgtaatgccacaccagaactcagaaacaaattcatctcatgctcaaagccaaaagggcaaatcctcacccatttgttctacaactggagacgataaactttgtgcagactctgcatgtcaacagaacacagtgacttctagtggcgatttggttgcaaaactgtgtgataacatagttagcgagtccgaaagcaccacagcaaggcaacccagctcacaagatccacccgatgcctcccactgtgaagacccacaggctcatacagtcacctctgaccctgtaagggatacccaggaacgtgcggatttttgtcctttcaaagtggtggataacaaaggccaacgaaaagatgtgaaactagataaacctttaacaaatatgcttgaggtggtttcacatccacatccagttgtccctaaaatggagaaagaactggtgccagaccaggcagtaatatcagacagtactttctctctggcaaacagtccaggcagtgaatcagtaaccaaggatgacgcactttcttttgtcccctcccagaaagaaaagggaacagcaactcctgaactacatacagctacagattatagagatggcccagatggaaattcgaatgagcctgatacgcggccactagaagacagggcagcaggcctgtccacatcctccactgctgcagagcttcagcacgggatggggaataccagtctcacaggacttggtggagagcatgagggtcctgcccctccagcaatcccagaagctctgaatatcaaggggaacactgactcttccctgcaaagtatgggtaaggccactttggctttagattcagttttgactgaagaaggaaaacttctggtggtttcagaaagctctgcagctcaggaacaagataaggataaagcggtgacctgttcctctattaaggaaaatgctctctcttcaggaactttgcaggaagagcagagaacaccacctcctggacaagatactcaacaatttcatgaaaaatcaatctcagctgactgtgccaaggacaaagcacttcagctaagtaattcaccgggtgcatcctctgcctttcttaaggcagaaactgaacataacaaggaagtggccccacaagtctcactgctgactcaaggtggggctgcccagagcctggtgccaccaggagcaagtctggccacagagtcaaggcaggaagccttgggggcagagcacaacagctctgctctgttgccatgtctgttgccagatgggtctgatgggtccgatgctcttaactgcagtcaggcttctcctctggatgttggagtgaagaacactcaatcccagggaaaaactagtgcctgtgaggtgagtggaaatgtgacggtggatgttacaggggttaatgctctacaaggtatggctgagcccagaagagagaatatatcacacaacacccaagacatcctgattccaaacgtcttgttgagccaagagaagaatgccgttctaggtttgccagtggctctacaggacaaagctgtgactgacccacagggagttggaaccccagagatgatacctcttgattgggagaaagggaagctggagggagcagaccacagctgtaccatgggtgacgctgaggaagcccaaatagacgatgaagcacatcctgtcctactgcagcctgttgccaaggagctccccacagacatggagctctcagcccatgatgatggggccccagctggtgtgagggaagtcacgcgagccccgccttcaggcagagaaaggagcactccctctctaccttgcatggtctctgcccaggacgcacctctgcctaagggagcagacttgatagaggaggctgccagccgtatagtggatgctgtcatcgaacaagtcaaggccgctggagcactgcttactgagggggaggcctgtcacatgtcactgtccagccctgagttgggtcctctcactaaaggactagagagtgcttttacagaaaaagtgagtactttcccacctggggagagcctaccaatgggcagtactcctgaggaagccacggggagccttgcaggatgttttgctggaagggaggagccagagaagatcattttacctgtccaggggcctgagccagcagcagaaatgccagacgtgaaagctgaagatgaagtggattttagagcaagttcaatttctgaagaagtggctgtagggagcatagctgctacactgaagatgaagcaaggcccaatgacccaggcgataaaccgagaaaactggtgtacaatagagccatgccctgatgcagcatctcttctggcttccaagcagagcccagaatgtgagaacttcctggatgttggactgggcagagagtgtacctcaaaacaaggtgtacttaaaagagaatctgggagtgattctgacctctttcactcacccagtgatgacatggacagcatcatcttcccaaagccagaggaagagcatttggcctgtgatatcaccggatccagttcatccaccgatgacacggcttcactggaccgacattcttctcatggcagtgatgtgtctctctcccagattttaaagccaaacaggtcaagagatcggcaaagccttgatggattctacagccatgggatgggagctgagggtcgagaaagtgagagtgagcctgctgacccaggcgacgtggaggaggaggagatggacagtatcactgaagtgcctgcaaactgctctgtcctaaggagctccatgcgctctctttctcccttccggaggcacagctgggggcctgggaaaaatgcagccagcgatgcagaaatgaaccaccggagttcaatgcgagttcttggggatgttgtcaggagacctcccattcataggagaagtatgagctggtgcccctctggtgtgcagtactctgctggcctgagtgctgactttaattacagaagtttcagtctagaaggcttgacaggaggagctggtgtcggaaacaagccatcctcatctctagaagtaagctctgcaaatgccgaagagctcagacacccattcagtggtgaggaacgggttgactctttggtgtcactttcagaagaggatctggagtcagaccagagagaacataggatgtttgatcagcagatatgtcacagatctaagcagcagggatttaattactgtacatcagccatttcctctccattgacaaaatccatctcattaatgacaatcagccatcctggattggacaattcacggcccttccacagtaccttccacaataccagtgctaatctgactgagagtataacagaagagaactataatttcctgccacatagcccctccaagaaagattctgaatggaagagtggaacaaaagtcagtcgtacattcagctacatcaagaataaaatgtctagcagcaagaagagcaaa

SEQ ID NO: 362032 - DNA, 5092 bp, Homo sapiens
agcgggaagcgcctgtgctctgccgagactgccgtgcccattgctcgcctcggtcgccgccgctttagcccgcctccgggggagcggccgcctattgtctttctccgcggcgaaggtgaagagttgtcccagctcggcccgcgggggagccccgggagccgcacgtgtcctgggtcatgaaacttaatccacagcaagctcccttatatggtgattgtgttgttacagtgctgcttgctgaagaggacaaagctgaagatgatgtagtgttttacttggtatttttgggttccaccctccgtcactgtacaagtactcggaaggtcagttctgatacattggagaccattgctcctggtcatgattgttgtgaaacagtgaaggtgcagctctgtgcttccaaagagggccttcccgtgtttgtggtggctgaagaagactttcatttcgtccaggatgaagcgtatgatgcagctcaattcctagcaaccagtgctggaaatcagcaggctttgaactttacccgttttcttgaccagtcaggacccccatctggggatgtgaattcccttgataagaagttggtgctggcattcaggcacctgaagctgcccacggagtggaatgtattggggacagatcagagtttgcatgatgctggcccgcgagagacattgatgcattttgctgtgcggctgggactgctgaggttgacgtggttcctgttgcagaagccaggtggccgcggagctctcagtatccacaaccaggaaggggcgacgcctgtgagcttggccttggagcgaggctatcacaagctgcaccagcttctaaccgaggagaatgctggagaaccagactcctggagcagtttatcctatgaaataccgtatggagactgttctgtgaggcatcatcgagagttggacatctatacattaacctctgagtctgattcacatcatgaacacccatttcctggagacggttgcactggaccaatttttaaacttatgaacatccaacagcaactaatgaaaacaaacctcaagcagatggacagtcttatgcccttaatgatgacagcacaggatccttccagtgccccagagacagatggccagtttcttccctgtgcaccggagcccacggaccctcagcgactttcttcttctgaagagactgagagcactcagtgctgcccagggagccctgttgcacagactgaaagtccctgtgatttgtcaagcatagttgaggaggagaatacagaccgttcctgtaggaagaaaaataaaggcgtggaaagaaaaggggaagaggtggagccagcacctattgtggactctggaactgtatctgatcaagacagctgccttcagagcttgcctgattgtggagtaaagggcacggaaggcctttcgtcctgtggaaacagaaatgaagaaactggaacaaaatcttctggaatgcccacagaccaggagtccctgagcagtggagatgctgtgcttcagagagacttggtcatggagccaggcacagcccagtattcctctggaggtgaactgggaggcatttcaacaacaaatgtcagtaccccagacactgcaggggaaatggaacatgggctcatgaacccagatgccactgtttggaagaatgtgcttcagggaggggaaagtacaaaggaaagatttgagaactctaatattggcacagctggagcctctgacgtgcacgtcacaagtaagcctgtggataaaatcagtgttccaaactgtgcccctgccgccagttccctggatggtaacaaacctgctgagtcttcacttgcatttagtaatgaagaaacctccactgaaaaaacagcagaaacggaaacttcacgaagtcgtgaggagagtgctgatgctccagtagatcagaattctgtggtgattccagctgctgcaaaagacaagatttcagatggattagaaccttatactctcttagcagcaggcataggtgaggcaatgtcaccctcagatttagcccttcttgggctggaagaagatgtaatgccacaccagaactcagaaacaaattcatctcatgctcaaagccaaaagggcaaatcctcacccatttgttctacaactggagacgataaactttgtgcagactctgcatgtcaacagaacacagtgacttctagtggcgatttggttgcaaaactgtgtgataacatagttagcgagtccgaaagcaccacagcaaggcaacccagctcacaagatccacccgatgcctcccactgtgaagacccacaggctcatacagtcacctctgaccctgtaagggatacccaggaacgtgcggatttttgtcctttcaaagtggtggataacaaaggccaacgaaaagatgtgaaactagataaacctttaacaaatatgcttgaggtggtttcacatccacatccagttgtccctaaaatggagaaagaactggtgccagaccaggcagtaatatcagacagtactttctctctggcaaacagtccaggcagtgaatcagtaaccaaggatgacgcactttcttttgtcccctcccagaaagaaaagggaacagcaactcctgaactacatacagctacagattatagagatggcccagatggaaattcgaatgagcctgatacgcggccactagaagacagggcagcaggcctgtccacatcctccactgctgcagagcttcagcacgggatggggaataccagtctcacaggacttggtggagagcatgagggtcctgcccctccagcaatcccagaagctctgaatatcaaggggaacactgactcttccctgcaaagtatgggtaaggccactttggctttagattcagttttgactgaagaaggaaaacttctggtggtttcagaaagctctgcagctcaggaacaagataaggataaagcggtgacctgttcctctattaaggaaaatgctctctcttcaggaactttgcaggaagagcagagaacaccacctcctggacaagatactcaacaatttcatgaaaaatcaatctcagctgactgtgccaaggacaaagcacttcagctaagtaattcaccgggtgcatcctctgcctttcttaaggcagaaactgaacataacaaggaagtggccccacaagtctcactgctgactcaaggtggggctgcccagagcctggtgccaccaggagcaagtctggccacagagtcaaggcaggaagccttgggggcagagcacaacagctctgctctgttgccatgtctgttgccagatgggtctgatgggtccgatgctcttaactgcagtcaggcttctcctctggatgttggagtgaagaacactcaatcccagggaaaaactagtgcctgtgaggtgagtggaaatgtgacggtggatgttacaggggttaatgctctacaaggtatggctgagcccagaagagagaatatatcacacaacacccaagacatcctgattccaaacgtcttgttgagccaagagaagaatgccgttctaggtttgccagtggctctacaggacaaagctgtgactgacccacagggagttggaaccccagagatgatacctcttgattgggagaaagggaagctggagggagcagaccacagctgtaccatgggtgacgctgaggaagcccaaatagacgatgaagcacatcctgtcctactgcagcctgttgccaaggagctccccacagacatggagctctcagcccatgatgatggggccccagctggtgtgagggaagtcacgcgagccccgccttcaggcagagaaaggagcactccctctctaccttgcatggtctctgcccaggacgcacctctgcctaagggagcagacttgatagaggaggctgccagccgtatagtggatgctgtcatcgaacaagtcaaggccgctggagcactgcttactgagggggaggcctgtcacatgtcactgtccagccctgagttgggtcctctcactaaaggactagagagtgcttttacagaaaaagtgagtactttcccacctggggagagcctaccaatgggcagtactcctgaggaagccacggggagccttgcaggatgttttgctggaagggaggagccagagaagatcattttacctgtccaggggcctgagccagcagcagaaatgccagacgtgaaagctgaagatgaagtggattttagagcaagttcaatttctgaagaagtggctgtagggagcatagctgctacactgaagatgaagcaaggcccaatgacccaggcgataaaccgagaaaactggtgtacaatagagccatgccctgatgcagcatctcttctggcttccaagcagagcccagaatgtgagaacttcctggatgttggactgggcagagagtgtacctcaaaacaaggtgtacttaaaagagaatctgggagtgattctgacctctttcactcacccagtgatgacatggacagcatcatcttcccaaagccagaggaagagcatttggcctgtgatatcaccggatccagttcatccaccgatgacacggcttcactggaccgacattcttctcatggcagtgatgtgtctctctcccagattttaaagccaaacaggtcaagagatcggcaaagccttgatggattctacagccatgggatgggagctgagggtcgagaaagtgagagtgagcctgctgacccaggcgacgtggaggaggaggagatggacagtatcactgaagtgcctgcaaactgctttgtttccaaatgctctatggacatttgtgtgctaaatcctattaaataaaaaagacgggttaaaacccagatgctgtatattcatttgtaattatgtataaagtgaagcagttttaaactgtaaagatttttttcagtgtgttttctcgaattttgccacaacatactggcttcgtattttatttatctttctttctagttaccagcttcagacccttgtaaagtctccctcagccctttcaaaaaataataaatttcctgtgaagttct

SEQ ID NO: 362033 - DNA, 5275 bp, Homo sapiens
agcgggaagcgcctgtgctctgccgagactgccgtgcccattgctcgcctcggtcgccgccgctttagcccgcctccgggggagcggccgcctattgtctttctccgcggcgaaggtgaagagttgtcccagctcggcccgcgggggagccccgggagccgcacgtgtcctgggtcatgaaacttaatccacagcaagctcccttatatggtgattgtgttgttacagtgctgcttgctgaagaggacaaagctgaagatgatgtagtgttttacttggtatttttgggttccaccctccgtcactgtacaagtactcggaaggtcagttctgatacattggagaccattgctcctggtcatgattgttgtgaaacagtgaaggtgcagctctgtgcttccaaagagggccttcccgtgtttgtggtggctgaagaagactttcatttcgtccaggatgaagcgtatgatgcagctcaattcctagcaaccagtgctggaaatcagcaggctttgaactttacccgttttcttgaccagtcaggacccccatctggggatgtgaattcccttgataagaagttggtgctggcattcaggcacctgaagctgcccacggagtggaatgtattggggacagatcagagtttgcatgatgctggcccgcgagagacattgatgcattttgctgtgcggctgggactgctgaggttgacgtggttcctgttgcagaagccaggtggccgcggagctctcagtatccacaaccaggaaggggcgacgcctgtgagcttggccttggagcgaggctatcacaagctgcaccagcttctaaccgaggagaatgctggagaaccagactcctggagcagtttatcctatgaaataccgtatggagactgttctgtgaggcatcatcgagagttggacatctatacattaacctctgagtctgattcacatcatgaacacccatttcctggagacggttgcactggaccaatttttaaacttatgaacatccaacagcaactaatgaaaacaaacctcaagcagatggacagtcttatgcccttaatgatgacagcacaggatccttccagtgccccagagacagatggccagtttcttccctgtgcaccggagcccacggaccctcagcgactttcttcttctgaagagactgagagcactcagtgctgcccagggagccctgttgcacagactgaaagtccctgtgatttgtcaagcatagttgaggaggagaatacagaccgttcctgtaggaagaaaaataaaggcgtggaaagaaaaggggaagaggtggagccagcacctattgtggactctggaactgtatctgatcaagacagctgccttcagagcttgcctgattgtggagtaaagggcacggaaggcctttcgtcctgtggaaacagaaatgaagaaactggaacaaaatcttctggaatgcccacagaccaggagtccctgagcagtggagatgctgtgcttcagagagacttggtcatggagccaggcacagcccagtattcctctggaggtgaactgggaggcatttcaacaacaaatgtcagtaccccagacactgcaggggaaatggaacatgggctcatgaacccagatgccactgtttggaagaatgtgcttcagggaggggaaagtacaaaggaaagatttgagaactctaatattggcacagctggagcctctgacgtgcacgtcacaagtaagcctgtggataaaatcagtgttccaaactgtgcccctgccgccagttccctggatggtaacaaacctgctgagtcttcacttgcatttagtaatgaagaaacctccactgaaaaaacagcagaaacggaaacttcacgaagtcgtgaggagagtgctgatgctccagtagatcagaattctgtggtgattccagctgctgcaaaagacaagatttcagatggattagaaccttatactctcttagcagcaggcataggtgaggcaatgtcaccctcagatttagcccttcttgggctggaagaagatgtaatgccacaccagaactcagaaacaaattcatctcatgctcaaagccaaaagggcaaatcctcacccatttgttctacaactggagacgataaactttgtgcagactctgcatgtcaacagaacacagtgacttctagtggcgatttggttgcaaaactgtgtgataacatagttagcgagtccgaaagcaccacagcaaggcaacccagctcacaagatccacccgatgcctcccactgtgaagacccacaggctcatacagtcacctctgaccctgtaagggatacccaggaacgtgcggatttttgtcctttcaaagtggtggataacaaaggccaacgaaaagatgtgaaactagataaacctttaacaaatatgcttgaggtggtttcacatccacatccagttgtccctaaaatggagaaagaactggtgccagaccaggcagtaatatcagacagtactttctctctggcaaacagtccaggcagtgaatcagtaaccaaggatgacgcactttcttttgtcccctcccagaaagaaaagggaacagcaactcctgaactacatacagctacagattatagagatggcccagatggaaattcgaatgagcctgatacgcggccactagaagacagggcagcaggcctgtccacatcctccactgctgcagagcttcagcacgggatggggaataccagtctcacaggacttggtggagagcatgagggtcctgcccctccagcaatcccagaagctctgaatatcaaggggaacactgactcttccctgcaaagtatgggtaaggccactttggctttagattcagttttgactgaagaaggaaaacttctggtggtttcagaaagctctgcagctcaggaacaagataaggataaagcggtgacctgttcctctattaaggaaaatgctctctcttcaggaactttgcaggaagagcagagaacaccacctcctggacaagatactcaacaatttcatgaaaaatcaatctcagctgactgtgccaaggacaaagcacttcagctaagtaattcaccgggtgcatcctctgcctttcttaaggcagaaactgaacataacaaggaagtggccccacaagtctcactgctgactcaaggtggggctgcccagagcctggtgccaccaggagcaagtctggccacagagtcaaggcaggaagccttgggggcagagcacaacagctctgctctgttgccatgtctgttgccagatgggtctgatgggtccgatgctcttaactgcagtcaggcttctcctctggatgttggagtgaagaacactcaatcccagggaaaaactagtgcctgtgaggtgagtggaaatgtgacggtggatgttacaggggttaatgctctacaaggtatggctgagcccagaagagagaatatatcacacaacacccaagacatcctgattccaaacgtcttgttgagccaagagaagaatgccgttctaggtttgccagtggctctacaggacaaagctgtgactgacccacagggagttggaaccccagagatgatacctcttgattgggagaaagggaagctggagggagcagaccacagctgtaccatgggtgacgctgaggaagcccaaatagacgatgaagcacatcctgtcctactgcagcctgttgccaaggagctccccacagacatggagctctcagcccatgatgatggggccccagctggtgtgagggaagtcacgcgagccccgccttcaggcagagaaaggagcactccctctctaccttgcatggtctctgcccaggacgcacctctgcctaagggagcagacttgatagaggaggctgccagccgtatagtggatgctgtcatcgaacaagtcaaggccgctggagcactgcttactgagggggaggcctgtcacatgtcactgtccagccctgagttgggtcctctcactaaaggactagagagtgcttttacagaaaaagtgagtactttcccacctggggagagcctaccaatgggcagtactcctgaggaagccacggggagccttgcaggatgttttgctggaagggaggagccagagaagatcattttacctgtccaggggcctgagccagcagcagaaatgccagacgtgaaagctgaagatgaagtggattttagagcaagttcaatttctgaagaagtggctgtagggagcatagctgctacactgaagatgaagcaaggcccaatgacccaggcgataaaccgagaaaactggtgtacaatagagccatgccctgatgcagcatctcttctggcttccaagcagagcccagaatgtgagaacttcctggatgttggactgggcagagagtgtacctcaaaacaaggtgtacttaaaagagaatctgggagtgattctgacctctttcactcacccagtgatgacatggacagcatcatcttcccaaagccagaggaagagcatttggcctgtgatatcaccggatccagttcatccaccgatgacacggcttcactggaccgacattcttctcatggcagtgatgtgtctctctcccagattttaaagccaaacaggtcaagagatcggcaaagccttgatggattctacagccatgggatgggagctgagggtcgagaaagtgagagtgagcctgctgacccaggcgacgtggaggaggaggagatggacagtatcactgaagtgcctgcaaactgctctgtcctaaggagctccatgcgctctctttctcccttccggaggcacagctgggggcctgggaaaaatgcagccagcgatgcagaaatgaaccaccggaggtgagatgggaggcggtttgtttagtgtctcagtgtctgcttgcttttgagaagcttctgatttgtattattgttggtaaaagaatttaggagaccccatagtatagaagaaagaatataggctttggaatcaggaaaatctgtgttcagaccccactactcgagaggatgagatgggaggattgcttcagcccagaagttcgaggctgcagtgagccatgatcataccactgcactccagtctgggcaacagtgagaccctgtctcaaaataataataataatagtagtaataataattgatgtaaacagctcagcaatagcaattatttgctcaaatttctcaacctcctga

SEQ ID NO: 362034 - DNA, 4305 bp, Homo sapiens
  misc_feature (4142)..(4142): n is a, c, g, or t
  misc_feature (4246)..(4246): n is a, c, g, or t
  misc_feature (4265)..(4265): n is a, c, g, or t
agcgggaagcgcctgtgctctgccgagactgccgtgcccattgctcgcctcggtcgccgccgctttagcccgcctccgggggagcggccgcctattgtctttctccgcggcgaaggtgaagagttgtcccagctcggcccgcgggggagccccgggagccgcacgtgtcctgggtcatgaaacttaatccacagcaagctcccttatatggtgattgtgttgttacagtgctgcttgctgaagaggacaaagctgaagatgatgtagtgttttacttggtatttttgggttccaccctccgtcactgtacaagtactcggaaggtcagttctgatacattggagaccattgctcctggtcatgattgttgtgaaacagtgaaggtgcagctctgtgcttccaaagagggccttcccgtgtttgtggtggctgaagaagactttcatttcgtccaggatgaagcgtatgatgcagctcaattcctagcaaccagtgctggaaatcagcaggctttgaactttacccgttttcttgaccagtcaggacccccatctggggatgtgaattcccttgataagaagttggtgctggcattcaggcacctgaagctgcccacggagtggaatgtattggggacagatcagagtttgcatgatgctggcccgcgagagacattgatgcattttgctgtgcggctgggactgctgaggttgacgtggttcctgttgcagaagccaggtggccgcggagctctcagtatccacaaccaggaaggggcgacgcctgtgagcttggccttggagcgaggctatcacaagctgcaccagcttctaaccgaggagaatgctggagaaccagactcctggagcagtttatcctatgaaataccgtatggagactgttctgtgaggcatcatcgagagttggacatctatacattaacctctgagtctgattcacatcatgaacacccatttcctggagacggttgcactggaccaatttttaaacttatgaacatccaacagcaactaatgaaaacaaacctcaagcagatggacagtcttatgcccttaatgatgacagcacaggatccttccagtgccccagagacagatggccagtttcttccctgtgcaccggagcccacggaccctcagcgactttcttcttctgaagagactgagagcactcagtgctgcccagggagccctgttgcacagactgaaagtccctgtgatttgtcaagcatagttgaggaggagaatacagaccgttcctgtaggaagaaaaataaaggcgtggaaagaaaaggggaagaggtggagccagcacctattgtggactctggaactgtatctgatcaagacagctgccttcagagcttgcctgattgtggagtaaagggcacggaaggcctttcgtcctgtggaaacagaaatgaagaaactggaacaaaatcttctggaatgcccacagaccaggagtccctgagcagtggagatgctgtgcttcagagagacttggtcatggagccaggcacagcccagtattcctctggaggtgaactgggaggcatttcaacaacaaatgtcagtaccccagacactgcaggggaaatggaacatgggctcatgaacccagatgccactgtttggaagaatgtgcttcagggaggggaaagtacaaaggaaagatttgagaactctaatattggcacagctggagcctctgacgtgcacgtcacaagtaagcctgtggataaaatcagtgttccaaactgtgcccctgccgccagttccctggatggtaacaaacctgctgagtcttcacttgcatttagtaatgaagaaacctccactgaaaaaacagcagaaacggaaacttcacgaagtcgtgaggagagtgctgatgctccagtagatcagaattctgtggtgattccagctgctgcaaaagacaagatttcagatggattagaaccttatactctcttagcagcaggcataggtgaggcaatgtcaccctcagatttagcccttcttgggctggaagaagatgtaatgccacaccagaactcagaaacaaattcatctcatgctcaaagccaaaagggcaaatcctcacccatttgttctacaactggagacgataaactttgtgcagactctgcatgtcaacagaacacagtgacttctagtggcgatttggttgcaaaactgtgtgataacatagttagcgagtccgaaagcaccacagcaaggcaacccagctcacaagatccacccgatgcctcccactgtgaagacccacaggctcatacagtcacctctgaccctgtaagggatacccaggaacgtgcggatttttgtcctttcaaagtggtggataacaaaggccaacgaaaagatgtgaaactagataaacctttaacaaatatgcttgaggtggtttcacatccacatccagttgtccctaaaatggagaaagaactggtgccagaccaggcagtaatatcagacagtactttctctctggcaaacagtccaggcagtgaatcagtaaccaaggatgacgcactttcttttgtcccctcccagaaagaaaagggaacagcaactcctgaactacatacagctacagattatagagatggcccagatggaaattcgaatgagcctgatacgcggccactagaagacagggcagcaggcctgtccacatcctccactgctgcagagcttcagcacgggatggggaataccagtctcacaggacttggtggagagcatgagggtcctgcccctccagcaatcccagaagctctgaatatcaaggggaacactgactcttccctgcaaagtatgggtaaggccactttggctttagattcagttttgactgaagaaggaaaacttctggtggtttcagaaagctctgcagctcaggaacaagataaggataaagcggtgacctgttcctctattaaggaaaatgctctctcttcaggaactttgcaggaagagcagagaacaccacctcctggacaagatactcaacaatttcatgaaaaatcaatctcagctgactgtgccaaggacaaagcacttcagctaagtaattcaccgggtgcatcctctgcctttcttaaggcagaaactgaacataacaaggaagtggccccacaagtctcactgctgactcaaggtggggctgcccagagcctggtgccaccaggagcaagtctggccacagagtcaaggcaggaagccttgggggcagagcacaacagctctgctctgttgccatgtctgttgccagatgggtctgatgggtccgatgctcttaactgcagtcaggcttctcctctggatgttggagtgaagaacactcaatcccagggaaaaactagtgcctgtgaggtgagtggaaatgtgacggtggatgttacaggggttaatgctctacaaggtatggctgagcccagaagagagaatatatcacacaacacccaagacatcctgattccaaacgtcttgttgagccaagagaagaatgccgttctaggtttgccagtggctctacaggacaaagctgtgactgacccacagggagttggaaccccagagatgatacctcttgattgggagaaagggaagctggagggagcagaccacagctgtaccatgggtgacgctgaggaagcccaaatagacgatgaagcacatcctgtcctactgcagcctgttgccaaggagctccccacagacatggagctctcagcccatgatgatggggccccagctggtgtgagggaagtcacgcgagccccgccttcaggcagagaaaggagcactccctctctaccttgcatggtctctgcccaggacgcacctctgcctaagggagcagacttgatagaggaggctgccagccgtatagtggatgctgtcatcgaacaagtcaaggccgctggagcactgcttactgagggggaggcctgtcacatgtcactgtccagccctgagttgggtcctctcactaaaggactagagagtgcttttacagaaaaagtgagtactttcccacctggggagagcctaccaatgggcagtactcctgaggaagccctgctggaagcntgcgtccagcagccgatgctgcagattcggccccatctccaccaggcccagggaaacactcactccttactgcggcaagagcggctccatgaactacccagcancccagtgtttccactgagnttttcagattccaggcgtggggactggcaggagggacaag

SEQ ID NO: 362035 - DNA, 767 bp, Homo sapiens
ccaacctatttccataattagtgtaaataaaattttccccaaaaatcagtgtaaaagaagaaatttctacttatagtgcctcttgtgtaggagatgtcaacattgagtatattgttttatcacaactgggtctagtcagctgaaggcaatcaatgaccaggcaatatgagtaaccaggtagagatctcgatggatctacccgaatgctcttttcttgaccaatgaaaaatcaagcttattaaaagtgtacacatccacattccagaattattccatgctacgcgaaatgctacttttcaatcctaattacaatgagcagaaccaccttttcttaccacttaaaaattcctgactcttcctactcagcaaactgcccaagtgaatgtcttcccttctgtgtttcactgcctggccagtaaataagctcaacttttctcctttcagtagctctggtggcctttacctcaggctttgatgacagacagaggaaccaacaatctaacctgatgcctgcctctccccacgccagtgctgaggagctcctgcagagaaagcctgctcttccagcccttgtattcaggacaggtgccgggtggtccctcaagaccctttttcagcagtaaatcctagctgctttcactgagttctcactaagtttatttggtttaatctaggttgtctgaggttccacaactcataactgattttgtgttctatttctggccagcaacttccttgacattatggaaacttgagttgggtggagt

SEQ ID NO: 362036 - DNA, 800 bp, Homo sapiens
actaggagcacaaatgctccagtgtgaaactgacttctcctggggatggtagggcttcctctgtggtccagtaatggtgacgtccctaactggcagcctgggccccagcgtcaggagttgggctcatggtgacacaaagcatttcactatccaacaaaatgtttattccaggattttggttgatttcattaatcagaaaatgcattttagaagaaaatgagtctctgatctcaggatttgtctgatctctcacgattgggatggcccattcctagaggggtaaggtcccacgttgttaggaaaactcatttttagccagttatgaagtcttatattctacaaagaaaaaataggtgaaggacagagaaaggaagcagaggaaagatgagaaaataacaaatattttttaaaaagggagaacaatcctggaaaactgatataggccatattactccgaagtcaatacatcagtagggagaagacctggaaaacactgctagaccaactcaaaattacaaagttttccagagcttatatgtcttctaagccatatgtctatgtgtaagtatgcattcatctaaagacataagtgattaacttcttttaatctgtaactaagatctgagttctgaagaccttcctctggagcctgagtaaatttacttaatctaaatgggtccaggttccggggtgattacccttatcttgtctcctgctaaatcatggaggattgggaagttccttcagaccccagtaaacttgtttgtggaggcctggggagtttcttcagacccccaata

SEQ ID NO: 362037 - DNA, 382 bp, Homo sapiens
ggagggcagaaaggatcgaggtagagctctggctctggatctgctgcagagagaaaagttagctctggtggcctttacctcaggctttgatgacagacagaggaaccaacaatctaacctgatgcctgcctctccccacgccagtgctgaggagctcctgcagagaaagcctgctcttccagcccttgtattcaggacaggtgccgggtggtccctcaagaccctttttcagcagtaaatcctagctgctttcactgagttctcactaagtttatttggtttaatctaggttgtctgaggttccacaactcataactgattttgtgttctatttctggccagcaacttccttgacattatggaaacttgagttgggtggagt

SEQ ID NO: 362038 - DNA, 832 bp, Homo sapiens
actaggagcacaaatgctccagtgtgaaactgacttctcctggggatggtagggcttcctctgtggtccagtaatggtgacgtccctaactggcagcctgggccccagcgtcaggagttgggctcatggtgacacaaagcatttcactatccaacaaaatgtttattccaggattttggttgatttcattaatcagaaaatgcattttagaagaaaatgagtctctgatctcaggatttgtctgatctctcacgattgggatggcccattcctagagggggagaagacctggaaaacactgctagaccaactcaaaattacaaagttttccagagcttatatgtcttctaagccatatgtctatgtctgcaggaatgtagacaattcagaggctttgttccccataatttggaacttttcttcagatttgaccaagtcgggtagagatgatcaaacctaatgggaaaaagactgaaacaacaaaaacagaaacaggcaaacacaaccagtagctctggtggcctttacctcaggctttgatgacagacagaggaaccaacaatctaacctgatgcctgcctctccccacgccagtgctgaggagctcctgcagagaaagcctgctcttccagcccttgtattcaggacaggtgccgggtggtccctcaagaccctttttcagcagtaaatcctagctgctttcactgagttctcactaagtttatttggtttaatctaggttgtctgaggttccacaactcataactgattttgtgttctatttctggccagcaacttccttgacattatggaaacttgagttgggtggagt

SEQ ID NO: 362039 - DNA, 802 bp, Homo sapiens
gtctttggacccctgaacaacttggggaagaggatgacctattcccatctgtcccttagtactcaatttagaatgccaggaaggaagtagaggggagccctcttgtggcagttgctgaagccttccagttcttttgaggggataggggatgaagaggagactgaacctgggaggtagatacttagcacccagctcttaggacaaacagcaatcccatcttccagaacatgcatagcatcagtcatggactggcggaagacttggacccagggtccacttcaggataatctgggcaagggagcttcccaaatgagcctgtagaaagccagtggaagggcttaggttggctaaggtgggatggagggcaaaaccctccccttcattgcagagtataggggcagtggcagagaatgaatgtatgtgtgggtttctcagccttgaggtataaggtctaaaggctctggggattcactgcatacaccacttccagttcaagcgcctaggttggttacagcaggaagttgacaagtatgtatttagtacattcgatgtttttaggcatctgctaaaagtaggtcaaaccactgaactcagggagggggctggggatccatttctaggatgctgtggaatccttttgggacatctgtagtataccacgttgggtagtgagagttgggggacaccccttccattgctgctgcttagtgtagggagtcatgtctttgggcagcagtaatattattaagaaaagctttttttttttttgagacacagtctctgtcacctagcgcctatatgc

SEQ ID NO: 362040 - DNA, 328 bp, Homo sapiens
atgtctagaggatccctataggcgcctaggttggttacagcaggaagttgacaagtatgtatttagtacattcgatgtttttaggcatctgctaaaagtaggtcaaaccactgaactcagggagggggctggggatccatttctaggatgctgtggaatccttttgggacatctgtagtataccacgttgggtagtgagagttgggggacaccccttccattgctgctgcttagtgtagggagtcatgtctttgggcagcagtaatattattaagaaaagctttttttttttttgagacacagtctctgtcacctagcgcctatatgc

SEQ ID NO: 362041 - DNA, 470 bp, Homo sapiens
tttggcacattctcaatgcttaagaatgttacaagtgtaaaaagcaaagaagagggctgggcgcggtggctcacgcctgtaatcccagcactttgggaggccgaggcgggcggatcacgaggtcgggagatggagaccatcctggctaacatggtaaaaccccgtgtctactaaaaatacaaaaaattagctgggcgtggtggcgggcgcctgtagtcccagctactcgggatgcggaggcaggagaatggcgtgaacccaggaggcggagcttgcagtgacctgggatcgcgccactgccctccagcctggctacaggctgggcgactccatctcaaaaaaaaaaaaagtaaagaagaggttcctcttaaaagactttcctccccatctaattaaaaataagtagtaatttctcttaaaagcaaaatttattcaaagacctgtgctaacattcttaaatatctaccagc

SEQ ID NO: 362042 - DNA, 653 bp, Homo sapiens
tgaactgcacaacatagatcagaaggacattccagccagtggcacagcttcaggaaagatgcagaagcgtgaatatagcccgaagggtgtgtattagcttcccacggctgctataacaaatcaccccaaacatagtgacttaaaacaatacaaatgtattttcttaaaggtctgcggatcagaggtctaaaagtgtcaggaggtctgtgttccttctgggagcttcagagagaatctgtttccttgtctgtttcagcttctggaagctgcctgcatttcttggcacctcctcacgtcactatgacatctgcttccgttgtcacctcctgtgactgaccctgaccctcctgcctccctcttaaaaggaccctcgtgactccattgagcccacccagacaatccaggataaccaccccttctcaagatcctttacttaatctcacctgcaaagtcccttttgccatggaaggtcacctcttcacaggttcaggggattaagatgtggacatcaccgggggtcatgattctgattgctacagggtctgagaagctagagagtaagtgtgtccagtggtggagagaagccttgaatgccgagctaaggagcctggacttggcctttccttcaaaatagatgcatgacctgtcagcct

SEQ ID NO: 362043 - DNA, 330 bp, Homo sapiens
ttgaggtgagacccgtctcaccaatgtttttttcttttcttttttaacttgagaaatttaccttcttacattgcagaaatcactactttaagaacaacctaagaaaaattactatgaaatattttcttcaaagtatatttatcccctctctagagaacttccttttgactgtgttaaaaagattttttctaatttgtggtcatcagtcaattttctaagtacttgaagaggtgttaatgtaatttatatcattagaattttaatattatgcacaattactttatttttagtattgtcaccaatttttaaattaacaatccatccttattg

SEQ ID NO: 362044 - DNA, 400 bp, Homo sapiens
tattctgccacggtccacccacacaaataagcttcctctgtcaaataagtacaccatttgaaaaactaaaaatactaaatgtactggcttggagaaaattatattcatcagaatccctctctttcaagaagggcattgtatttgttcagaagcatttccttgaccaacaccctggaatagacgttgaaaccccatgggccctagcagtgcacagaacaacactgaagaaaaaagggggaggatttccatggctgtaccagagagaatggaaacagaaatggaagtgaagagtggaataaggctgtgcaaactgtgacagaccccttcacatcctcagtgtgattgccagatacactaagtgatgctgttagtgggctagcttgaaaacaaaccaaccaac

SEQ ID NO: 362045 - DNA, 623 bp, Homo sapiens
ataaacatctgtttctgcagatatgatgggtttgaaccagcactaaacattataattgctatcatttactatagctgatggtgtggtgtttacatgaatcattaagaggcttgcagtaaataggtagtgagagctagtgcctatttctttgactttaatggcacataaaattaattgcttgaaaataatctttcaaaatatatatttcttgatatctataaactcctgcagagataatccaaaaaggttttgtgggctgtctcaaggatgtacattttatgaagaattacaatccgtcagctatttgggaacctctggattggcagagttctgaagaacaaatcaacgtgtataacagctgggagggatgtcccgcttcattaaatgagggagctcagttcctaggagcagggttcctggaacttcatccatatatgtttcatggtggaatgaactttgagatttcctttaagttcagaactgaccaattaaatggattgcttcttttcgtttataacaaagatggacctgattttcttgctgtatgtgaattaatttgattaaaattactttaaaatataggacccaactttaaaataaataaaccatgtgttggctttaca

SEQ ID NO: 362046 - DNA, 633 bp, Homo sapiens
cattcccttaaggggtcaccagtggaagtaactacaactaatgatcatggcaaacaatatagtgatggaaaatggcatgaaataattgctattaggcatcaggcttttggccaaatcactctggatgggatatatacaggttcctctgccatcctgaatggtagtactgttattggagataacacaggagtctttctgggagggctcccgcgaagttataccatcctcaggaaggatcctgagataatccaaaaaggttttgtgggctgtctcaaggatgtacattttatgaagaattacaatccgtcagctatttgggaacctctggattggcagagttctgaagaacaaatcaacgtgtataacagctgggagggatgtcccgcttcattaaatgagggagctcagttcctaggagcagggttcctggaacttcatccatatatgtttcatggtggaatgaactttgagatttcctttaagttcagaactgaccaattaaatggattgcttcttttcgtttataacaaagatggacctgattttcttgctgtatgtgaattaatttgattaaaattactttaaaatataggacccaactttaaaataaataaaccatgtgttggctttaca

SEQ ID NO: 362047 - DNA, 499 bp, Homo sapiens
tgcttctccttttctttcacttttttctccccccccattcttctctggattgaaaactgagggatagtgttaactaatgatgatgtgaattataatcaaatcacattcactgttggggtatcactagaatatactgattcttttttcccttagacttttaagcatgcaagatgtggtccatatgttcattcctttgttcctttgttctgcatcttgatcataattcatggtcctgcaatctaaagagtatgttacaggctcaacactgggacactcaaagcaagttctgtttaaaagatgtgtggtgggtcaagcctgaataatccaaaggaactccaaagcataaactaaggtcataaatgtttaaggaaacctagccttgagttttcccataggacagagggaggggaaagagaaatcaaataaattccagctagataagcagtctgagtgagggacaagagtagtgggggaatggggaaaaggagatcataaagcc

SEQ ID NO: 362048 - DNA, 335 bp, Homo sapiens
attgcctggggtcacccaattaatttacaactgtagcaggcggacactgattttggctattgatatgaagcacactgatctcatgcaaagaactgtgcagctggtgccatgggagaagaccgtcagatcctttctaatggaaaaatgaagtcagaccaagcttgcctcctttctttacaaaatgtaattatgtaaatgacaaagctctattatagacaatgtttataattagcactattttccctttaattttaaataaagcatgttagttgtgagtgccatgccaacatattttctacagatgctataaacaatgcacaatcagaaatccattt

SEQ ID NO: 362049 - DNA, 853 bp, Homo sapiens
catgatggaagtcgtagtaggaaatggcgtcgtggcattgaggggcatccctcctagaacctccaggaaaagctcgcggaagacgaggttctgcggagagagaggctccaagcagtctgggaagtgtagtccagttggcttagcagtagtttcgttgggggggagccgaggttccgggaaggggctaggccggcttgaaaagagattatgactgtaccttttaactttgtagctggaacacaagaagtgtttgtttaatgaatgacgtacacatttaagatctgtttggacgcggaggataatcctgtgaattgctaatagttcactgggtttggcccttagtgttgacttcagtatgctgagacggaaaccaacacgcctagagctaaagcttgatgacattgaagagtttgagaacattcgaaaggacctggagacccgtaagaaacagaaggaagatgtggaagttgtaggaggcagtgatggagaaggagccattgggcttagcagtgatcccaagagccgggaacaaatgatcaatgatcggattggttataaaccccaacccaagcccaataatcgttcatctcaatttggaagtcttgaattttagagatggattatcttgcatgccagagcgctggaatggaataaaatgatggcagaagtacaaaccagatttagagaattgagtgcttgcagtcaagcagaatgtacctcctgcagagacaaatcttctgcatgagattactgatgcttcacttgcactctaagctggaatccaaactctggtttgtctcttgaaaatttgactctataaaactgatctgattttctgtttttaaaaataaat

SEQ ID NO: 362050 - DNA, 1529 bp, Homo sapiens
catgatggaagtcgtagtaggaaatggcgtcgtggcattgaggggcatccctcctagaacctccaggaaaagctcgcggaagacgaggttctgcggagagagaggctccaagcagtctgggaagtgtagtccagttggcttagcagtagtttcgttgggggggagccgaggttccgggaaggggctaggccggcttgaaaagagattatgactgtaccttttaactttgtagctggaacacaagaagtgtttgtttaatgaatgacgtacacatttaagatctgtttggacgcggaggataatcctgtgaattgctaatagttcactgggtttggcccttagtgttgacttcagtatgctgagacggaaaccaacacgcctagagctaaagcttgatgacattgaagagtttgagaacattcgaaaggacctggaggtgcacccagtcctgcagttcaaagcctggcaagactcaccatcatcttcctcctcctcatactgctaatgagaatcagcagctgtgtttctacagtgataatctgcgtatgcatgttcgtgatgttccaatcaccaaaaaggctattgattttaggattcctgagtacctacaaaagctacttaaacatccaggataaaatcagctccacccaagaatacaagataagagttcaaatattcccttggccattttttttttttaaagaaaaggctggaaggacatgtcataaacacctagaaagattctgcagtgagactgctttgcaagtgactttaagtattcattccatgttaaaaataccatagataatgtaagccaggggctagcaagctctttctgttaaacatttagatgtttcagtgctgcaatcacagtgaccggtgttggggagagggattagaaagtgccatggtacttaatccagttactcccccaacacctccaagaggtagccaagttcacacactaaacagagctactgcaacagttctagtgctagtccttagattctagttccagttccggttctagtgcttagattccagttgcatcattccaactgtgagccttcgctgctttaacatctttgccaggaggtgcaaagttctctgggagggagctaccaatcatttcatttcaatttcatactgacagattgaaacattcacgtaagggacacctgtagtaccaacctgactgtgaggggaagcccaagaactccagtgagtctgtggacgctacgctgggacactatctccttagccacaccttgtctaagccaggactaccccaggattgtttcgagaatgataccaggttaaccaaagaaatacttatgtaagatacagatagggtggaaactggaggcagaggagtccgccacaattgatgttgatttagggctgtcgcaggaagacccagggaaacccacgccaaagttggggtggggatgtgtctgcctccaaagtatcctcctttccatcacccaccgccagaatatcttagctcttctgcacctcatccgcgtaga

SEQ ID NO: 362051 - DNA, 674 bp, Homo sapiens
  misc_feature (634)..(634): n is a, c, g, or t
cgagctcggtaccccaccactctatagatcagtcactcctatagatcagtgtgtttgtttaatgaatgacgtacacatttaagatctgtttggacgcggaggataatcctgtgaattgctaatagttcactgggtttggcccttagtgttgacttcagtatgctgagacggaaaccaacacgcctagagctaaagcttgatgacattgaagagtttgagaacattcgaaaggacctggagacccgtaagaaacagaaggaagatgtggaagttgtaggaggcagtgatggagaaggagccattgggcttagcagtgatcccaagagccgggaacaaatgatcaatgatcggattggttataaaccccaacccaagcccaataatcgttcatctcaatttggaagtcttgaattttagagatggattatcttgcatgccagagcgctggaatggaataaaatgatggcagaagtacaaaccagatttagagaattgagtgcttgcagtcaagcagaatgtacctcctgcagagacaaatcttctgcatgagattactgatgcttcacttgcactctaagctggaatccaaactctggtttgtctcttgaaaatttgactctataaaaataggagnggtacgagctcgaatcgtatctggtctaggtcggggggga

SEQ ID NO: 362052 - DNA, 965 bp, Homo sapiens
attcgcggccgcgtcgacgcttttgtaggtactcaggaatcctacaaaagctacttaaacatccaggataaaatcagctccacccaagaatacaagataagagttcaaatattcccttggccattttttttttttaaagaaaaggctggaaggacatgtcataaacacctagaaagattctgcagtgagactgctttgcaagtgactttaagtattcattccatgttaaaaataccatagataatgtaagccaggggctagcaagctctttctgttaaacatttagatgtttcagtgctgcaatcacagtgaccggtgttggggagagggattagaaagtgccatggtacttaatccagttactcccccaacacctccaagaggtagccaagttcacacactaaacagagctactgcaacagttctagtgctagtccttagattctagttccagttccggttctagtgcttagattccagttgcatcattccaactgtgagccttcgctgctttaacatctttgccaggaggtgcaaagttctctgggagggagctaccaatcatttcatttcaatttcatactgacagattgaaacattcacgtaagggacacctgtagtaccaacctgactgtgaggggaagcccaagaactccagtgagtctgtggacgctacgctgggacactatctccttagccacaccttgtctaagccaggactaccccaggattgtttcgagaatgataccaggttaaccaaagaaatacttatgtaagatacagatagggtggaaactggaggcagaggagtccgccacaattgatgttgatttagggctgtcgcaggaagacccagggaaacccacgccaaagttggggtggggatgtgtctgcctccaaagtatcctcctttccatcacccaccgccagaatatcttagctcttctgcacctcatccgcgtaga

SEQ ID NO: 362053 - DNA, 751 bp, Homo sapiens
gacctcggtacccgaattcggctctctgggaaggggctaggccggcttgaaaagattatgactgtaccttttaactttgtagctggaacacaagaagtgtttgtttaatgaatgacgtacacatttaagatctgtttggacgcggaggataatcctgtgaattgctaatagttcactgggtttggcccttagtgttgacttcagtatgctgagacggaaaccaacacgcctagagctaaagcttgatgacattgaagagtttgagaacattcgaaaggacctggagacccgtaagaaacagaaggaagatgtggaagttgtaggaggcagtgatggagaaggagccattgggcttagcagtgatcccaagagccgggaacaaatgatcaatgatcggattggttataaaccccaacccaagcccaataatcgttcatctcaatttggaagtcttgaattttagagatggattatcttgcatgccagagcgctggaatggaataaaatgatggcagaagtacaaaccagatttagagaattgagtgcttgcagtcaagcagaatgtacctcctgcagagacaaatcttctgcatgagattactgatgcttcacttgcactctaagctggaatccaaactctggtttgtctcttgaaaatttgactctataaaatctaattgtcttctctttaattaatttgcgtccccttttggcctagcgtctcttaatttcgtaaagttatcattgcgac

SEQ ID NO: 362054 - DNA, 870 bp, Homo sapiens
  misc_feature (830)..(830): n is a, c, g, or t
catgatggaagtcgtagtaggaaatggcgtcgtggcattgaggggcatccctcctagaacctccaggaaaagctcgcggaagacgaggttctgcggagagagaggctccaagcagtctgggaagtgtagtccagttggcttagcagtagtttcgttgggggggagccgaggttccgggaaggggctaggccggcttgaaaagagattatgactgtaccttttaactttgtagctggaacacaagaagtgtttgtttaatgaatgacgtacacatttaagatctgtttggacgcggaggataatcctgtgaattgctaatagttcactgggtttggcccttagtgttgacttcagtatgctgagacggaaaccaacacgcctagagctaaagcttgatgacattgaagagtttgagaacattcgaaaggacctggagacccgtaagaaacagaaggaagatgtggaagttgtaggaggcagtgatggagaaggagccattgggcttagcagtgatcccaagagccgggaacaaatgatcaatgatcggattggttataaaccccaacccaagcccaataatcgttcatctcaatttggaagtcttgaattttagagatggattatcttgcatgccagagcgctggaatggaataaaatgatggcagaagtacaaaccagatttagagaattgagtgcttgcagtcaagcagaatgtacctcctgcagagacaaatcttctgcatgagattactgatgcttcacttgcactctaagctggaatccaaactctggtttgtctcttgaaaatttgactctataaaaataggagnggtacgagctcgaatcgtatctggtctaggtcggggggga

SEQ ID NO: 362055 - DNA, 768 bp, Homo sapiens
catgatggaagtcgtagtaggaaatggcgtcgtggcattgaggggcatccctcctagaacctccaggaaaagctcgcggaagacgaggttctgcggagagagaggctccaagcagtctgattatgactgtaccttttaactttgtagctggaacacaagaagtgtttgtttaatgaatgacgtacacatttaagatctgtttggacgcggaggataatcctgtgaattgctaatagttcactgggtttggcccttagtgttgacttcagtatgctgagacggaaaccaacacgcctagagctaaagcttgatgacattgaagagtttgagaacattcgaaaggacctggagacccgtaagaaacagaaggaagatgtggaagttgtaggaggcagtgatggagaaggagccattgggcttagcagtgatcccaagagccgggaacaaatgatcaatgatcggattggttataaaccccaacccaagcccaataatcgttcatctcaatttggaagtcttgaattttagagatggattatcttgcatgccagagcgctggaatggaataaaatgatggcagaagtacaaaccagatttagagaattgagtgcttgcagtcaagcagaatgtacctcctgcagagacaaatcttctgcatgagattactgatgcttcacttgcactctaagctggaatccaaactctggtttgtctcttgaaaatttgactctataaaactgatctgattttctgtttttaaaaataaat

SEQ ID NO: 362056 - DNA, 703 bp, Homo sapiens
gacctcggtacccgaattcggctctctgggaaggggctaggccggcttgaaaagattatgactgtaccttttaactttgtagctggaacacaagaagtgtttgtttaatgaatgacgtacacatttaagatctgtttggacgcggaggataatcctgtgaattgctaatagttcactgggtttggcccttagtgttgacttcagtatgctgagacggaaaccaacacgcctagagctaaagcttgatgacattgaagagtttgagaacattcgaaaggacctggagacccgtaagaaacagaaggaagatgtggaagttgtaggaggcagtgatggagaaggagccattgggcttagcagtgatcccaagagccgggaacaaatgatcaatgatcggattggttataaaccccaacccaagcccaataatcgttcatctcaatttggaagtcttgaattttagagatggattatcttgcatgccagagcgctggaatggaataaaatgatggcagaagtacaaaccagatttagagaattgagtgcttgcagtcaagcagaatgtacctcctgcagagacaaatcttctgcatgagattactgatgcttcacttgcactctaagctggaatccaaactctggtttgtctcttgaaaatttgactctataaaactgatctgattttctgtttttaaaaataaat

SEQ ID NO: 362057 - DNA, 875 bp, Homo sapiens
tgctacgttaccaaagctgtacttgagcctccttgtgcattcttctctctgcctgaccttcagaagtcaactaagacatcattttctccaggaaggcttgcctgacatccttgtccaccccacactcagcccagactggattaggtgcctgtgtgatgccagtgctagtatcctcatcagggttctcattacatgatatcacagttttctctttgttttccccacaattatgactgtaccttttaactttgtagctggaacacaagaagtgtttgtttaatgaatgacgtacacatttaagatctgtttggacgcggaggataatcctgtgaattgctaatagttcactgggtttggcccttagtgttgacttcagtatgctgagacggaaaccaacacgcctagagctaaagcttgatgacattgaagagtttgagaacattcgaaaggacctggagacccgtaagaaacagaaggaagatgtggaagttgtaggaggcagtgatggagaaggagccattgggcttagcagtgatcccaagagccgggaacaaatgatcaatgatcggattggttataaaccccaacccaagcccaataatcgttcatctcaatttggaagtcttgaattttagagatggattatcttgcatgccagagcgctggaatggaataaaatgatggcagaagtacaaaccagatttagagaattgagtgcttgcagtcaagcagaatgtacctcctgcagagacaaatcttctgcatgagattactgatgcttcacttgcactctaagctggaatccaaactctggtttgtctcttgaaaatttgactctataaaactgatctgattttctgtttttaaaaataaat

SEQ ID NO: 362058 - DNA, 811 bp, Homo sapiens
catgatggaagtcgtagtaggaaatggcgtcgtggcattgaggggcatccctcctagaacctccaggaaaagctcgcggaagacgaggttctgcggagagagaggctccaagcagtctgggaagtgtagtccagttggcttagcagtagtttcgttgggggggagccgaggttccgggaaggggctaggccggcttgaaaagaggtgtttgtttaatgaatgacgtacacatttaagatctgtttggacgcggaggataatcctgtgaattgctaatagttcactgggtttggcccttagtgttgacttcagtatgctgagacggaaaccaacacgcctagagctaaagcttgatgacattgaagagtttgagaacattcgaaaggacctggagacccgtaagaaacagaaggaagatgtggaagttgtaggaggcagtgatggagaaggagccattgggcttagcagtgatcccaagagccgggaacaaatgatcaatgatcggattggttataaaccccaacccaagcccaataatcgttcatctcaatttggaagtcttgaattttagagatggattatcttgcatgccagagcgctggaatggaataaaatgatggcagaagtacaaaccagatttagagaattgagtgcttgcagtcaagcagaatgtacctcctgcagagacaaatcttctgcatgagattactgatgcttcacttgcactctaagctggaatccaaactctggtttgtctcttgaaaatttgactctataaaactgatctgattttctgtttttaaaaataaat

SEQ ID NO: 362059 - DNA, 657 bp, Homo sapiens
cgagctcggtaccccaccactctatagatcagtcactcctatagatcagtgtgtttgtttaatgaatgacgtacacatttaagatctgtttggacgcggaggataatcctgtgaattgctaatagttcactgggtttggcccttagtgttgacttcagtatgctgagacggaaaccaacacgcctagagctaaagcttgatgacattgaagagtttgagaacattcgaaaggacctggagacccgtaagaaacagaaggaagatgtggaagttgtaggaggcagtgatggagaaggagccattgggcttagcagtgatcccaagagccgggaacaaatgatcaatgatcggattggttataaaccccaacccaagcccaataatcgttcatctcaatttggaagtcttgaattttagagatggattatcttgcatgccagagcgctggaatggaataaaatgatggcagaagtacaaaccagatttagagaattgagtgcttgcagtcaagcagaatgtacctcctgcagagacaaatcttctgcatgagattactgatgcttcacttgcactctaagctggaatccaaactctggtttgtctcttgaaaatttgactctataaaactgatctgattttctgtttttaaaaataaat

SEQ ID NO: 362060 - DNA, 984 bp, Homo sapiens
catgatggaagtcgtagtaggaaatggcgtcgtggcattgaggggcatccctcctagaacctccaggaaaagctcgcggaagacgaggttctgcggagagagaggctccaagcagtctgggaagtgtagtccagttggcttagcagtagtttcgttgggggggagccgaggttccgggaaggggctaggccggcttgaaaagagattatgactgtaccttttaactttgtagctggaacacaagaagtgtttgtttaatgaatgacgtacacatttaagatctgtttggacgcggaggataatcctgtgaattgctaatagttcactgggtttggcccttagtgttgacttcagtatgctgagacggaaaccaacacgcctagagctaaagcttgatgacattgaagagtttgagaacattcgaaaggacctggagtgcattctgcatccagtatcaagaatgatcttcagaaattttcaaatcctgtcattcccgtttaaaactcctcagtagttttctgcacttataacaaaatctgaattcttcaccatggcctacaagattttacccgtaagaaacagaaggaagatgtggaagttgtaggaggcagtgatggagaaggagccattgggcttagcagtgatcccaagagccgggaacaaatgatcaatgatcggattggttataaaccccaacccaagcccaataatcgttcatctcaatttggaagtcttgaattttagagatggattatcttgcatgccagagcgctggaatggaataaaatgatggcagaagtacaaaccagatttagagaattgagtgcttgcagtcaagcagaatgtacctcctgcagagacaaatcttctgcatgagattactgatgcttcacttgcactctaagctggaatccaaactctggtttgtctcttgaaaatttgactctataaaactgatctgattttctgtttttaaaaataaat

SEQ ID NO: 362061 - DNA, 772 bp, Homo sapiens
catgatggaagtcgtagtaggaaatggcgtcgtggcattgaggggcatccctcctagaacctccaggaaaagctcgcggaagacgaggttctgcggagagagaggctccaagcagtctgggaagtgtagtccagttggcttagcagtagtttcgttgggggggagccgaggttccgggaaggggctaggccggcttgaaaagagattatgactgtaccttttaactttgtagctggaacacaagaagtgtttgtttaatgaatgacgtacacatttaagatctgtttggacgcggaggataatcctgtgaattgctaatagttcactgggtttggcccttagtgttgacttcagtatgctgagacggaaaccaacacgcctagagctaaagcttgatgacattgaagagtttgagaacattcgaaaggacctggagtgcattctgcatccagtatcaagaatgatcttcagaaattttcaaatcctgtcattcccgtttaaaactcctcagtagttttctgcacttataacaaaatctgaattcttcaccatggcctacaagattttgtatgttctagtgcctctccagattcattttgtgccattctttgccttgctctctataccctagccacattggctctctttcatttccttgaacatgccaatctatttatcacttccatggactttccacatattatttccccctgcctggagtgctccctttcttccagtcttcattcaaatgtcaactcttcaatttaagagg

SEQ ID NO: 362062 - DNA, 606 bp, Homo sapiens
aggggttacaacttttaacaccatatcctcattgtgcccctaagtactccaaacctaggatttcagtttattgttctttacaccctaactctatcatttagcccatgcctagtacatggtaggtgttctaaataaacatttgctaattgaaagaatgttgccttaatcctaaaacttttatactttcagacccgtaagaaacagaaggaagatgtggaagttgtaggaggcagtgatggagaaggagccattgggcttagcagtgatcccaagagccgggaacaaatgatcaatgatcggattggttataaaccccaacccaagcccaataatcgttcatctcaatttggaagtcttgaattttagagatggattatcttgcatgccagagcgctggaatggaataaaatgatggcagaagtacaaaccagatttagagaattgagtgcttgcagtcaagcagaatgtacctcctgcagagacaaatcttctgcatgagattactgatgcttcacttgcactctaagctggaatccaaactctggtttgtctcttgaaaatttgactctataaaactgatctgattttctgtttttaaaaataaat

SEQ ID NO: 362063 - DNA, 889 bp, Homo sapiens
catgatggaagtcgtagtaggaaatggcgtcgtggcattgaggggcatccctcctagaacctccaggaaaagctcgcggaagacgaggttctgcggagagagaggctccaagcagtctgggaagtgtagtccagttggcttagcagtagtttcgttgggggggagccgaggttccgggaaggggctaggccggcttgaaaagagattatgactgtaccttttaactttgtagctggaacacaagaagtgtttgtttaatgaatgacgtacacatttaagatctgtttggacgcggaggataatcctgtgaattgctaatagttcactgggtttggcccttagtgttgacttcagtatgctgagacggaaaccaacacgcctagagctaaagcttgatgacattgaagagtttgagaacattcgaaaggacctggagacccgtaagaaacagaaggaagatgtggaagttgtaggaggcagtgatggagaaggagccattgggcttagcagtgatcccaagagccgggaacaaatgatcaatgatcggattggttataaaccccaacccaagcccaataatcgttcatctcaatttggaagtcttgaattttagagatggattatcttgcatgccagagcgctggaatggaataaaatgatggcagaagtacaaaccagatttagagaattgagtgcttgcagtcaagcagaatgtacctcctgcagagacaaatcttctgcatgagattactgatgcttcacttgcactctaagctggaatccaaactctggtttgtctcttgaaaatttgactctataaaattatcctgtttctgttttacaaatgcggtgtgccggttttgttctgtgggtgtgtggctgtgtggtg

SEQ ID NO: 362064 - DNA, 771 bp, Homo sapiens
catgatggaagtcgtagtaggaaatggcgtcgtggcattgaggggcatccctcctagaacctccaggaaaagctcgcggaagacgaggttctgcggagagagaggctccaagcagtctgggaagtgtagtccagttggcttagcagtagtttcgttgggggggagccgaggttccgggaaggggctaggccggcttgaaaagagattatgactgtaccttttaactttgtagctggaacacaagaagtgtttgtttaatgaatgacgtacacatttaagatctgtttggacgcggaggataatcctgtgaattgctaatagttcactgggtttggcccttagtgttgacttcagtatgctgagacggaaaccaacacgcctagagctaaagcttgatgacattgaagagtttgagaacattcgaaaggacctggaggcataaagaccagaacccctaattcagaaaagagtcgatttcagaagggaccaccaaagaaagaagcctaaaatcttggttctggtgtgactctagatggaatcttgctatgttgcccaggctggaatgcaatggctattcacaggcatgatcccactactgatcagtacaggagttttgacctgctccatttctgatctaggctggttcaccaggcaacctggtggttccctgctcctgggcttgtttcttggtaaatactttgtctatatggaatgcatctaataaatgaatgctctcctaaaaaacaaaacaacaacaacaaacaaaacaaa

SEQ ID NO: 362065 - DNA, 560 bp, Homo sapiens
catgatggaagtcgtagtaggaaatggcgtcgtggcattgaggggcatccctcctagaacctccaggaaaagctcgcggaagacgaggttctgcggagagagaggctccaagcagtctgggaagtgtagtccagttggcttagcagtagtttcgttgggggggagccgaggttccgggaaggggctaggccggcttgaaaagagattatgactgtaccttttaactttgtagctggaacacaagaagtgtttgtttaatgaatgacgtacacatttaagatctgtttggacgcggaggataatcctgtgaattgctaatagttcactgggtttggcccttagtgttgacttcagtatgctgagacggaaaccaacacgcctagagctaaagcttgatgacattgaagagtttgagaacattcgaaaggacctggaggtatgaatacaactttgtgtttttttgagatggagtctcgctctgtcacacaggctggagtgcagtggcatgatcttggcccactgcaacctctgcctcctctgcctcagcattcctcgcaaca

SEQ ID NO: 362066 - DNA, 580 bp, Homo sapiens
catgatggaagtcgtagtaggaaatggcgtcgtggcattgaggggcatccctcctagaacctccaggaaaagctcgcggaagacgaggttctgcggagagagaggctccaagcagtctgggaagtgtagtccagttggcttagcagtagtttcgttgggggggagccgaggttccgggaaggggctaggccggcttgaaaagagattatgactgtaccttttaactttgtagctggaacacaagaagtgtttgtttaatgaatgacgtacacatttaagatctgtttggacgcggaggataatcctgtgaattgctaatagttcactgggtttggcccttagtgttgacttcagtatgctgagacggaaaccaacacgcctagagctaaagcttgatgacattgaagagtttgagaacattcgaaaggacctggaggtatgaatacaactttgtgtttttttgagatggagtctcgctctgtcacacaggctggagtgcagtggcatgatcttggcccactgcaacctttcgaactcctgggctcaagcaatccacttgcctcagtctcccaagtagctg

SEQ ID NO: 362067 - DNA, 5653 bp, Homo sapiens
  misc_feature (1076)..(1076): n is a, c, g, or t
  misc_feature (1139)..(1139): n is a, c, g, or t
  misc_feature (1185)..(1185): n is a, c, g, or t
  misc_feature (2577)..(2577): n is a, c, g, or t
cttgctgttaatgaacttggttaaacatggtcaagtgtatgtatgtatatattatcagtactggccttctctatctaagaggaatagcaagaaatttagagacattatttggacattgatttctactaactccactgaattagattcagccttcactttttgggaaatgcacggacactgggaaagatgaaatgaagaagttttccagcatgatgttcttgtctttggagcttagccttacttaggtcttagaacaaaaacaagtcggtagttattagttactgtatctcattttccaaaacacacgtttctttgttacagtcatttacacatatttttgcatgccacatttttgcttttgagcttttgctgaatcactaaatgaccacctttcatgttcctaatgtattaaaattatcagaggattctttgaggattaaatgtgtcagtaagggtattattttgaacaatgcgtaaaaggtgaaggccagctgaagaggcctttttgttgtgaacagaataatatactggaatctgaggactgcactgttatgaatggattatttggctatggaaagaagttatttttaggcacagcatccctataagccctgaagctatgtgttttacaaactagaaattatgcactaaataaaaattaccagatgtcagtctctgtatgtgccaaatggcaaatgtgtaatggttcagagcctggaagaaatgatgcttatttctttgccattcaaactcaaaagggatagctgaggtagagtgctgttgaaaaaattgcagtgtttccagctacccaaagatgttacgaattgttatctgaaaggctttcattctttcccctcatggctcgttgtgtgtttgtggcattacaaatgtaacccacatatttattctaatttattacattctttcctgaggctcctcttgttcttttaaagggtcagcagataacttattttaagaatcaacctggacacagtattctaacaaaggtccaatacagagctaaataaataataggagtcatagccagacacagtgactcacgcctgtaatcccancattttgggaggccaaggcgggtggattacctggtggtgcatgcctgtagtctcagctactcnggaggctgaggcaggagaatcacttgaacccgggacgcagaggttncagtgaaccgagattgcgccactgcactccagcctgggcaacagagcgagacctctatctcaaaaataaataaataaatacatttaaaatatatatatatatatatatatatatatatatatatatatatatatatatttatatatatttcgtgacttatatcttgcacataccagcatacctcattaattttaatgtaaccatccattggcttctcttctctccttagaaattcgagctcaactggtagaacaacaaaaatgcctggagcagcaaacggagatgcgagttcagcttctccaggatctgcaagatttcttccgaaaaaaagctgaaattgagacggaatattcccggaatctagagaagttagcagaaaggttcatggcaaaaacaagaagcactaaggatcatcaacaatacaagaaagaccagaacctgttgtctccagtgaactgctggtatttgctcctgaaccaagtaaggagagaaagcaaagaccatgcaaccttgagtgacatctatctgaacaatgtgattatgcggttcatgcagataagtgaggattctaccaggatgtttaaaaagagcaaagagattgcattccaacttcatgaggatttaatgaaggttcttaatgagctttatacggtgatgaaaacataccatatgtatcatgcagagagcatcagtgcagagagcaagctgaaagaggccgaaaaacaagaggaaaagcaaattgggagatctggtgatccagtcttccatattcgactagaggagagacatcaacggcgaagctctgtaaagaaaattgaaaaaatgaaagaaaaaagacaagcaaaatattcagaaaataagctaaaatcaattaaggcacggaacgaatatctcctaacacttgaagccaccaatgcctcagttttcaagtactatattcatgatctttctgatttaattgattgctgtgatcttggctaccatgcaagtctgaacagagccctaagaacatatctgtctgcggagtacaaccttgaaacctccagacatgagggcttagacattattgagaatgcagttgataatttagagcccaggagcgataagcagagattcatggagatgtaccctgctgcgttctgtccaccaatgaagtttgagtttcagtctcacatgggtgatgaggtgtgccaggtcagtgcccagcagccagtccaggcagagctcatgctcaggtaccaacagttgcagtcccgccttgccacgctcaaaatcgagaatgaagaggttaagaaaacgactgaagccaccttgcagacgatacaagatatggtcaccatcgaggactatgatgtttctgaatgcttccagcacagtcgttccacagaatcngtgaagtccactgtctctgaaacctacctgagtaaacccagcatcgccaagagaagagccaaccagcaggaaactgaacagttctacttcatgaaactcagagaatatttggaaggcagtaatctcatcacaaaacttcaagccaaacatgacttgctgcagaggaccctgggagaaggtcatagagctgaatatatgactacaagccgaggacgaagaaactcgcacacaagacatcaggactcaggacaggttattcccctcattgtggaaagctgtattcggttcatcaatctctatggtcttcagcatcaggggattttcagagtgtctggttcccaggtggaagtcaatgatattaaaaattcatttgagagaggtgaaaatcctttggctgatgaccagagtaaccatgatattaactcagttgctggcgttctgaagctctatttccgtgggctggaaaaccccctctttcctaaggaaagatttaacgatctgatttcttgtatcagaatagataatctctatgagagggcgcttcacatccgcaaactcctcctgactttgcccaggtcggtccttatagtgatgaggtacctctttgccttcctcaatcatctatcacagtacagcgatgagaatatgatggacccttataacctggccatttgctttggcccaacattgatgcctgtcccagaaatacaggatcaagtgtcttgccaggcacatgtgaatgaaattatcaaaaccatcatcatccaccatgagactattttcccagatgctaaagagctggatggccctgtttatgagaaatgtatggctggagatgactattgcgacagcccatacagtgagcacggtacattggaggaagtggaccaagatgctggtacagagccccacacaagtgaagatgaatgtgagccaatagaagcaatagccaagtttgactatgttgggcggtctgccagagaactatccttcaagaagggtgcctccctgctgctgtatcaccgtgcatctgaggactggtgggaaggcaggcacaacgggattgacgggctggtgcctcaccagtatatagtggtgcaggatatggatgatacgttttcagacactctgagccaaaaagccgacagtgaggccagcagtgggccagtcacggaagacaagtcctcatccaaggacatgaactccccgacagaccgtcatcctgacggctatttagccaggcaacgaaaaagaggagagccaccccctccagtaaggcgtcctggcaggaccagtgatggccattgcccgctccaccctccacatgccctttctaactcctcagttgacctagggtccccaagccttgccagtcacccccggggcctgctgcagaaccgtggcctcaacaatgacagtcctgagcggaggcgcaggcctggccatggcagcctgaccaacatcagccggcacgactccctcaagaagatcgacagccctcccattagaaggtccacgtcatcagggcaatacacgggcttcaatgaccacaagccactggacccagagacaattgctcaggatattgaagaaacgatgaacacagctttgaatgaactccgagaactggagagacagagcacagcaaagcatgcccctgatgtggtgctggataccctggagcaagtgaaaaactctcccacccctgccacttccacggaatctctcagccctttgcacaacgttgccctcaggagctccgagcctcagattcgacgtagcacgagctcctccagtgacacaatgagtactttcaagcctatggtggcacccagaatgggcgtgcagctgaagcctccagcccttaggccaaaacctgctgttcttccaaaaacaaatcctaccataggacctgccccacctccccagggtccaacagacaagtcatgcacaatgtaaaaaccagccaagcaaggccataaagggaggtgacttaaaaaagaaaatggattagtgacaaaagtcactgatccataactttccttagttttgtgcttataactggagatcttttggcttttctatgttgtcgaatgtaatgtctgagactagctaaattaacacgggcatttgtattttgtaatttttttaaataactggacatatgtcattttaaggacaatagaaacacttagacttacttgaaaatccaatgctgcaccacttgtaatgaaggcaacaccgctctccacattgtacagagcttcaggtttaatgtagcccagctgagtcagaaaggttgtgacctgaaggcagaagaacccgaatgccacacctcattggagtatagccagtgttggtctgtggcacttgggctgaaaggtgataatggcattgcgtggtagctgacaatgagcaccttcggttccatgtggagcggggtttagctcatgcaaaagacttgcaattgtctccatgggacgatcccagtgggactgtcagcccacagctcgagtgggttggatgcttgcctctttcctaacagttatttccccgggtccagcttaaagactcgatggaaggaggtagaacctctgctgttactgcttgaacttaacctgggaaaggagaggaagacaccatctccaaagctattaatgtcactccttttgcgagcatgattaggccccggagatttccaagtccccccatctacacttacaaacgattagaagggtttaattttaaagactttctggttacactactccacgaactcctccaaagatccgttattcaataactgcctagaaaatgtttccatctcctctaaatccctgtgttctcctctgtggaaatgaaggcagcaagaagcacctgaggccttggttcatgcagtgttctcttttgactaaatcacctaggttcctttaaacatgctacaaagcccaggcgtggtggtgcacacctgtactcccagctactcgggtggtttacacaggaggatggctttgggcctagtagttcgagtccagcctgggcagcatagtgtgagaccctgtctcttaaaaaaaaa

SEQ ID NO: 362068 - DNA, 468 bp, Homo sapiens
cctcctcctacttctcctctccctcctcccttccctcgggtcggcgctgcctctggattgcctgcgtgtgggagtacaactctgcctctccaaggagaacgggttgtgaccactgaacaaaacttgcccattgaaagcaaacccggaacagctggataatgtccaccccgagccgattcaagaaggacaaagagatcatagccgagtatgaaagtcaagtcaaagaaattcgagctcaactggtagaacaacaaaaatgcctggagcagcaaacggagatgcgagttcagcttctccaggatctgcaagatttcttccgaaaaaaagctgaaattgagacggaatattcccggaatctagagaagttagcagaaaggttcatggcaaaaacaaaccccgcctgtttaccaaaaacatcacctctagcattactagtattagaggcaatgcctgaggaggaggaggagg

SEQ ID NO: 362069 - DNA, 4464 bp, Homo sapiens
  misc_feature (1388)..(1388): n is a, c, g, or t
cctcctcctacttctcctctccctcctcccttccctcgggtcggcgctgcctctggattgcctgcgtgtgggagtacaactctgcctctccaaggagaacgggttgtgaccactgaacaaaacttgcccattgaaagcaaacccggaacagctggataatgtccaccccgagccgattcaagaaggacaaagagatcatagccgagtatgaaagtcaagtcaaagaaattcgagctcaactggtagaacaacaaaaatgcctggagcagcaaacggagatgcgagttcagcttctccaggatctgcaagatttcttccgaaaaaaagctgaaattgagacggaatattcccggaatctagagaagttagcagaaaggttcatggcaaaaacaagaagcactaaggatcatcaacaatacaagaaagaccagaacctgttgtctccagtgaactgctggtatttgctcctgaaccaagtaaggagagaaagcaaagaccatgcaaccttgagtgacatctatctgaacaatgtgattatgcggttcatgcagataagtgaggattctaccaggatgtttaaaaagagcaaagagattgcattccaacttcatgaggatttaatgaaggttcttaatgagctttatacggtgatgaaaacataccatatgtatcatgcagagagcatcagtgcagagagcaagctgaaagaggccgaaaaacaagaggaaaagcaaattgggagatctggtgatccagtcttccatattcgactagaggagagacatcaacggcgaagctctgtaaagaaaattgaaaaaatgaaagaaaaaagacaagcaaaatattcagaaaataagctaaaatcaattaaggcacggaacgaatatctcctaacacttgaagccaccaatgcctcagttttcaagtactatattcatgatctttctgatttaattgattgctgtgatcttggctaccatgcaagtctgaacagagccctaagaacatatctgtctgcggagtacaaccttgaaacctccagacatgagggcttagacattattgagaatgcagttgataatttagagcccaggagcgataagcagagattcatggagatgtaccctgctgcgttctgtccaccaatgaagtttgagtttcagtctcacatgggtgatgaggtgtgccaggtcagtgcccagcagccagtccaggcagagctcatgctcaggtaccaacagttgcagtcccgccttgccacgctcaaaatcgagaatgaagaggttaagaaaacgactgaagccaccttgcagacgatacaagatatggtcaccatcgaggactatgatgtttctgaatgcttccagcacagtcgttccacagaatcngtgaagtccactgtctctgaaacctacctgagtaaacccagcatcgccaagagaagagccaaccagcaggaaactgaacagttctacttcatgaaactcagagaatatttggaaggcagtaatctcatcacaaaacttcaagccaaacatgacttgctgcagaggaccctgggagaaggtcatagagctgaatatatgactacaagccgaggacgaagaaactcgcacacaagacatcaggactcaggacaggttattcccctcattgtggaaagctgtattcggttcatcaatctctatggtcttcagcatcaggggattttcagagtgtctggttcccaggtggaagtcaatgatattaaaaattcatttgagagaggtgaaaatcctttggctgatgaccagagtaaccatgatattaactcagttgctggcgttctgaagctctatttccgtgggctggaaaaccccctctttcctaaggaaagatttaacgatctgatttcttgtatcagaatagataatctctatgagagggcgcttcacatccgcaaactcctcctgactttgcccaggtcggtccttatagtgatgaggtacctctttgccttcctcaatcatctatcacagtacagcgatgagaatatgatggacccttataacctggccatttgctttggcccaacattgatgcctgtcccagaaatacaggatcaagtgtcttgccaggcacatgtgaatgaaattatcaaaaccatcatcatccaccatgagactattttcccagatgctaaagagctggatggccctgtttatgagaaatgtatggctggagatgactattgcgacagcccatacagtgagcacggtacattggaggaagtggaccaagatgctggtacagagccccacacaagtgaagatgaatgtgagccaatagaagcaatagccaagtttgactatgttgggcggtctgccagagaactatccttcaagaagggtgcctccctgctgctgtatcaccgtgcatctgaggactggtgggaaggcaggcacaacgggattgacgggctggtgcctcaccagtatatagtggtgcaggatatggatgatacgttttcagacactctgagccaaaaagccgacagtgaggccagcagtgggccagtcacggaagacaagtcctcatccaaggacatgaactccccgacagaccgtcatcctgacggctatttagccaggcaacgaaaaagaggagagccaccccctccagtaaggcgtcctggcaggaccagtgatggccattgcccgctccaccctccacatgccctttctaactcctcagttgacctagggtccccaagccttgccagtcacccccggggcctgctgcagaaccgtggcctcaacaatgacagtcctgagcggaggcgcaggcctggccatggcagcctgaccaacatcagccggcacgactccctcaagaagatcgacagccctcccattagaaggtccacgtcatcagggcaatacacgggcttcaatgaccacaagccactggacccagagacaattgctcaggatattgaagaaacgatgaacacagctttgaatgaactccgagaactggagagacagagcacagcaaagcatgcccctgatgtggtgctggataccctggagcaagtgaaaaactctcccacccctgccacttccacggaatctctcagccctttgcacaacgttgccctcaggagctccgagcctcagattcgacgtagcacgagctcctccagtgacacaatgagtactttcaagcctatggtggcacccagaatgggcgtgcagctgaagcctccagcccttaggccaaaacctgctgttcttccaaaaacaaatcctaccataggacctgccccacctccccagggtccaacagacaagtcatgcacaatgtaaaaaccagccaagcaaggccataaagggaggtgacttaaaaaagaaaatggattagtgacaaaagtcactgatccataactttccttagttttgtgcttataactggagatcttttggcttttctatgttgtcgaatgtaatgtctgagactagctaaattaacacgggcatttgtattttgtaatttttttaaataactggacatatgtcattttaaggacaatagaaacacttagacttacttgaaaatccaatgctgcaccacttgtaatgaaggcaacaccgctctccacattgtacagagcttcaggtttaatgtagcccagctgagtcagaaaggttgtgacctgaaggcagaagaacccgaatgccacacctcattggagtatagccagtgttggtctgtggcacttgggctgaaaggtgataatggcattgcgtggtagctgacaatgagcaccttcggttccatgtggagcggggtttagctcatgcaaaagacttgcaattgtctccatgggacgatcccagtgggactgtcagcccacagctcgagtgggttggatgcttgcctctttcctaacagttatttccccgggtccagcttaaagactcgatggaaggaggtagaacctctgctgttactgcttgaacttaacctgggaaaggagaggaagacaccatctccaaagctattaatgtcactccttttgcgagcatgattaggccccggagatttccaagtccccccatctacacttacaaacgattagaagggtttaattttaaagactttctggttacactactccacgaactcctccaaagatccgttattcaataactgcctagaaaatgtttccatctcctctaaatccctgtgttctcctctgtggaaatgaaggcagcaagaagcacctgaggccttggttcatgcagtgttctcttttgactaaatcacctaggttcctttaaacatgctacaaagcccaggcgtggtggtgcacacctgtactcccagctactcgggtggtttacacaggaggatggctttgggcctagtagttcgagtccagcctgggcagcatagtgtgagaccctgtctcttaaaaaaaaa

SEQ ID NO: 362070 - DNA, 2355 bp, Homo sapiens
cctcctcctacttctcctctccctcctcccttccctcgggtcggcgctgcctctggattgcctgcgtgtgggagtacaactctgcctctccaaggagaacgggttgtgaccactgaacaaaacttgcccattgaaagcaaacccggaacagctggataatgtccaccccgagccgattcaagaaggacaaagagatcatagccgagtatgaaagtcaagtcaaagaaattcgagctcaactggtagaacaacaaaaatgcctggagcagcaaacggagatgcgagttcagcttctccaggatctgcaagatttcttccgaaaaaaagctgaaattgagacggaatattcccggaatctagagaagttagcagaaaggttcatggcaaaaacaagaagcactaaggatcatcaacaatacaagaaagaccagaacctgttgtctccagtgaactgctggtatttgctcctgaaccaagtaaggagagaaagcaaagaccatgcaaccttgagtgacatctatctgaacaatgtgattatgcggttcatgcagataagtgaggattctaccaggatgtttaaaaagagcaaagagattgcattccaacttcatgaggatttaatgaaggttcttaatgagctttatacggtgatgaaaacataccatatgtatcatgcagagagcatcagtgcagagagcaagctgaaagaggccgaaaaacaagaggaaaagcaaattgggagatctggtgatccagtcttccatattcgactagaggagagacatcaacggcgaagctctgtaaagaaaattgaaaaaatgaaagaaaaaagacaagcaaaatattcagaaaataagctaaaatcaattaaggcacggaacgaatatctcctaacacttgaagccaccaatgcctcagttttcaagtactatattcatgatctttctgatttaattgattgctgtgatcttggctaccatgcaagtctgaacagagccctaagaacatatctgtctgcggagtacaaccttgaaacctccagacatgagggcttagacattattgagaatgcagttgataatttagagcccaggagcgataagcagagattcatggagatgtaccctgctgcgttctgtccaccaatgaagtttgagtttcagtctcacatgggtgatgaggtgtgccaggtcagtgcccagcagccagtccaggcagagctcatgctcaggtaccaacagttgcagtcccgccttgccacgctcaaaatcgagaatgaagaggtgagcatgcgttcgtcctgccacaccagtaatctgaattcaaatataactggaagacattctcacatgacttgggcatatttaatattcaagattcaacctcttcatcacgtatttcctgctctcagggttcctgtagtactctttgtaggggataaatgcaaagattctgtattctgccatagattaatattttactagacactcaactgcatatacatgtaaacacaattttttttaccttaaattgtaatttatactgaaaatagttcccgtgggttatcaaattcaacatatatatccaaaaatatacaatcttttgtacagtggaacttttgactaacatgttaacttattttaaaaaatattttgtagagatggggccttgctatgttgcccagactggactcaaactgccggcttcaagcagtcctcctgccttggcctcccaaagtgctgggattacaggcatgagccattatggtgcctggcccacagtgtgccatgttaatttaatcctaacttttaaaattcacttctttttttccttatgctttcctatattctctaaattttgtggtactggaacatggcattactgatataattagaacaaaatcatattttcaaatggtacttgaatgaggatagaaaatgtttatttgccagcattactgtatttaaatgaatagaatataaaatatgatttatcaatatatgttgagctaggaagcaattatacaattcagctgcctatttctgaaattaacttacttgaattcacgttctcctaaaataaagatacaaaccacaaatgttcttgcattagtcaaggctcccaattgtaatttacaggaacacaagttaaaaagttaactattggtcagtgtttgcagtatcctcagacatcactggatttgtgttcaaagtggtggccatcacgagtctttcattcactcacagttgagagttattgaggaatgtgcgcaggtaagagtgccgcgatagatcgacatgtcatctggtgcctttgaacgctgatcatctacagatcctcgtacaatcttgatct

SEQ ID NO: 362071 - DNA, 1011 bp, Homo sapiens
cctcctcctacttctcctctccctcctcccttccctcgggtcggcgctgcctctggattgcctgcgtgtgggagtacaactctgcctctccaaggagaacgggttgtgaccactgaacaaaacttgcccattgaaagcaaacccggaacagctggataatgtccaccccgagccgattcaagaaggacaaagagatcatagccgagtatgaaagtcaagtcaaagaaattcgagctcaactggtagaacaacaaaaatgcctggagcagcaaacggagatgcgagttcagcttctccaggatctgcaagatttcttccgaaaaaaagctgaaattgagacggaatattcccggaatctagagaagttagcagaaaggttcatggcaaaaacaagaagcactaaggatcatcaacaatacaagaaagaccagaacctgttgtctccagtgaactgctggtatttgctcctgaaccaagtaaggagagaaagcaaagaccatgcaaccttgagtgacatctatctgaacaatgtgattatgcggttcatgcagataagtgaggattctaccaggatgtttaaaaagagcaaagagattgcattccaacttcatgaggatttaatgaaggttcttaatgagctttatacggtgatgaaaacataccatatgtatcatgcagagagcatcagtgcagagagcaagctgaaagaggccgaaaaacaagaggaaaagcaaattgggagatctggtgatccagtcttccatattcgactagaggagagacatcaacggcgaagctctgtaaagaaaattgaaaaaatgaaagaaaaaagacaagcaaaatattcagaaaataagctaaaatcaattaaggcacggaacgaatatctcctaacacttgaagccaccaatgcctcagttttcaagtactatattcatgatctttctgatttaattgatgtgagtacttgaagtttttgtcttttccatattaaaatgaaattaacaataa

SEQ ID NO: 362072 - DNA, 3161 bp, Homo sapiens
attttcccccatcttaagaaaatttgctttgatttccattctcctactagcagcagctgatatcacctgtagacctatgagcattttatctattctatcattgaagttactgataaagatttttgttgttgttgttgttgttgggagaaatggatttcccacaactaatccctctggcccaccattaggagaaggtcatagagctgaatatatgactacaaggcctccaaatgttccccctaagccccagaaacacaggaagtccaggccccgctcacagtataatactaagttgtttaatggggatttggaaacattcgtcaaggactcaggacaggttattcccctcattgtggaaagctgtattcggttcatcaatctctatggtcttcagcatcaggggattttcagagtgtctggttcccaggtggaagtcaatgatattaaaaattcatttgagagaggtgaaaatcctttggctgatgaccagagtaaccatgatattaactcagttgctggcgttctgaagctctatttccgtgggctggaaaaccccctctttcctaaggaaagatttaacgatctgatttcttgtatcagaatagataatctctatgagagggcgcttcacatccgcaaactcctcctgactttgcccaggtcggtccttatagtgatgaggtacctctttgccttcctcaatcatctatcacagtacagcgatgagaatatgatggacccttataacctggccatttgctttggcccaacattgatgcctgtcccagaaatacaggatcaagtgtcttgccaggcacatgtgaatgaaattatcaaaaccatcatcatccaccatgagactattttcccagatgctaaagagctggatggccctgtttatgagaaatgtatggctggagatgactattgcgacagcccatacagtgagcacggtacattggaggaagtggaccaagatgctggtacagagccccacacaagtgaagatgaatgtgagccaatagaagcaatagccaagtttgactatgttgggcggtctgccagagaactatccttcaagaagggtgcctccctgctgctgtatcaccgtgcatctgaggactggtgggaaggcaggcacaacgggattgacgggctggtgcctcaccagtatatagtggtgcaggatatggatgatacgttttcagacactctgagccaaaaagccgacagtgaggccagcagtgggccagtcacggaagacaagtcctcatccaaggacatgaactccccgacagaccgtcatcctgacggctatttagccaggcaacgaaaaagaggagagccaccccctccagtaaggcgtcctggcaggaccagtgatggccattgcccgctccaccctccacatgccctttctaactcctcagttgacctagggtccccaagccttgccagtcacccccggggcctgctgcagaaccgtggcctcaacaatgacagtcctgagcggaggcgcaggcctggccatggcagcctgaccaacatcagccggcacgactccctcaagaagatcgacagccctcccattagaaggtccacgtcatcagggcaatacacgggcttcaatgaccacaagccactggacccagagacaattgctcaggatattgaagaaacgatgaacacagctttgaatgaactccgagaactggagagacagagcacagcaaagcatgcccctgatgtggtgctggataccctggagcaagtgaaaaactctcccacccctgccacttccacggaatctctcagccctttgcacaacgttgccctcaggagctccgagcctcagattcgacgtagcacgagctcctccagtgacacaatgagtactttcaagcctatggtggcacccagaatgggcgtgcagctgaagcctccagcccttaggccaaaacctgctgttcttccaaaaacaaatcctaccataggacctgccccacctccccagggtccaacagacaagtcatgcacaatgtaaaaaccagccaagcaaggccataaagggaggtgacttaaaaaagaaaatggattagtgacaaaagtcactgatccataactttccttagttttgtgcttataactggagatcttttggcttttctatgttgtcgaatgtaatgtctgagactagctaaattaacacgggcatttgtattttgtaatttttttaaataactggacatatgtcattttaaggacaatagaaacacttagacttacttgaaaatccaatgctgcaccacttgtaatgaaggcaacaccgctctccacattgtacagagcttcaggtttaatgtagcccagctgagtcagaaaggttgtgacctgaaggcagaagaacccgaatgccacacctcattggagtatagccagtgttggtctgtggcacttgggctgaaaggtgataatggcattgcgtggtagctgacaatgagcaccttcggttccatgtggagcggggtttagctcatgcaaaagacttgcaattgtctccatgggacgatcccagtgggactgtcagcccacagctcgagtgggttggatgcttgcctctttcctaacagttatttccccgggtccagcttaaagactcgatggaaggaggtagaacctctgctgttactgcttgaacttaacctgggaaaggagaggaagacaccatctccaaagctattaatgtcactccttttgcgagcatgattaggccccggagatttccaagtccccccatctacacttacaaacgattagaagggtttaattttaaagactttctggttacactactccacgaactcctccaaagatccgttattcaataactgcctagaaaatgtttccatctcctctaaatccctgtgttctcctctgtggaaatgaaggcagcaagaagcacctgaggccttggttcatgcagtgttctcttttgactaaatcacctaggttcctttaaacatgctacaaagcccaggcgtggtggtgcacacctgtactcccagctactcgggtggtttacacaggaggatggctttgggcctagtagttcgagtccagcctgggcagcatagtgtgagaccctgtctcttaaaaaaaaa

SEQ ID NO: 362073 - DNA, 2434 bp, Homo sapiens
cctcctcctacttctcctctccctcctcccttccctcgggtcggcgctgcctctggattgcctgcgtgtgggagtacaactctgcctctccaaggagaacgggttgtgaccactgaacaaaacttgcccattgaaagcaaacccggaacagctggataatgtccaccccgagccgattcaagaaggacaaagagatcatagccgagtatgaaagtcaagtcaaagaaattcgagctcaactggtagaacaacaaaaatgcctggagcagcaaacggagatgcgagttcagcttctccaggatctgcaagatttcttccgaaaaaaagctgaaattgagacggaatattcccggaatctagagaagttagcagaaaggttcatggcaaaaacaagaagcactaaggatcatcaacaatacaagaaagaccagaacctgttgtctccagtgaactgctggtatttgctcctgaaccaagtaaggagagaaagcaaagaccatgcaaccttgagtgacatctatctgaacaatgtgattatgcggttcatgcagataagtgaggattctaccaggatgtttaaaaagagcaaagagattgcattccaacttcatgaggatttaatgaaggttcttaatgagctttatacggtgatgaaaacataccatatgtatcatgcagagagcatcagtgcagagagcaagctgaaagaggccgaaaaacaagaggaaaagcaaattgggagatctggtgatccagtcttccatattcgactagaggagagacatcaacggcgaagctctgtaaagaaaattgaaaaaatgaaagaaaaaagacaagcaaaatattcagaaaataagctaaaatcaattaaggcacggaacgaatatctcctaacacttgaagccaccaatgcctcagttttcaagtactatattcatgatctttctgatttaattgattgctgtgatcttggctaccatgcaagtctgaacagagccctaagaacatatctgtctgcggagtacaaccttgaaacctccagacatgagggcttagacattattgagaatgcagttgataatttagagcccaggagcgataagcagagattcatggagatgtaccctgctgcgttctgtccaccaatgaagtttgagtttcagtctcacatgggtgatgaggtgtgccaggtcagtgcccagcagccagtccaggcagagctcatgctcaggtaccaacagttgcagtcccgccttgccacgctcaaaatcgagaatgaagaggtgagcatgcgttcgtcctgccacaccagtaatctgaattcaaatataactggaagacattctcacatgacttgggcatatttaatattcaagattcaacctcttcatcacgtatttcctgctctcagggttcctgtagtactctttgtaggggataaatgcaaagattctgtattctgccatagattaatattttactagacactcaactgcatatacatgtaaacacaattttttttaccttaaattgtaatttatactgaaaatagttcccgtgggttatcaaattcaacatatatatccaaaaatatacaatcttttgtacagtggaacttttgactaacatgttaacttattttaaaaaatattttgtagagatggggccttgctatgttgcccagactggactcaaactgccggcttcaagcagtcctcctgccttggcctcccaaagtgctgggattacaggcatgagccattatggtgcctggcccacagtgtgccatgttaatttaatcctaacttttaaaattcacttctttttttccttatgctttcctatattctctaaattttgtggtactggaacatggcattactgatataattagaacaaaatcatattttcaaatggtacttgaatgaggatagaaaatgtttatttgccagcattactgtatttaaatgaatagaatataaaatatgatttatcaatatatgttgagctaggaagcaattatacaattcagctgcctatttctgaaattaacttacttgaattcacgttctcctaaaataaagatacaaaccacaaatgttcttgcattagtcaaggctcccaattgtaatttacaggaacacaagttaaaaagttaactattggtcagtgtttgcagtatcctcagacatcactggatttgtgttcaaatgatgttatcaggactctctctttatcactttgaagtgatttcttcatgtgtgttggtagtgttttcaggatagacgcagaactatgtggtcccttttaaagctttccatcccactccatcctagcattcttgtctctgaagtaggactgactcttcactgacctggctgaagtcatgcatacttctggacaaaccattacatctaggaaatgagattctgtc

SEQ ID NO: 362074 - DNA, 2880 bp, Homo sapiens
  misc_feature (1388)..(1388): n is a, c, g, or t
cctcctcctacttctcctctccctcctcccttccctcgggtcggcgctgcctctggattgcctgcgtgtgggagtacaactctgcctctccaaggagaacgggttgtgaccactgaacaaaacttgcccattgaaagcaaacccggaacagctggataatgtccaccccgagccgattcaagaaggacaaagagatcatagccgagtatgaaagtcaagtcaaagaaattcgagctcaactggtagaacaacaaaaatgcctggagcagcaaacggagatgcgagttcagcttctccaggatctgcaagatttcttccgaaaaaaagctgaaattgagacggaatattcccggaatctagagaagttagcagaaaggttcatggcaaaaacaagaagcactaaggatcatcaacaatacaagaaagaccagaacctgttgtctccagtgaactgctggtatttgctcctgaaccaagtaaggagagaaagcaaagaccatgcaaccttgagtgacatctatctgaacaatgtgattatgcggttcatgcagataagtgaggattctaccaggatgtttaaaaagagcaaagagattgcattccaacttcatgaggatttaatgaaggttcttaatgagctttatacggtgatgaaaacataccatatgtatcatgcagagagcatcagtgcagagagcaagctgaaagaggccgaaaaacaagaggaaaagcaaattgggagatctggtgatccagtcttccatattcgactagaggagagacatcaacggcgaagctctgtaaagaaaattgaaaaaatgaaagaaaaaagacaagcaaaatattcagaaaataagctaaaatcaattaaggcacggaacgaatatctcctaacacttgaagccaccaatgcctcagttttcaagtactatattcatgatctttctgatttaattgattgctgtgatcttggctaccatgcaagtctgaacagagccctaagaacatatctgtctgcggagtacaaccttgaaacctccagacatgagggcttagacattattgagaatgcagttgataatttagagcccaggagcgataagcagagattcatggagatgtaccctgctgcgttctgtccaccaatgaagtttgagtttcagtctcacatgggtgatgaggtgtgccaggtcagtgcccagcagccagtccaggcagagctcatgctcaggtaccaacagttgcagtcccgccttgccacgctcaaaatcgagaatgaagaggttaagaaaacgactgaagccaccttgcagacgatacaagatatggtcaccatcgaggactatgatgtttctgaatgcttccagcacagtcgttccacagaatcngtgaagtccactgtctctgaaacctacctgagtaaacccagcatcgccaagagaagagccaaccagcaggaaactgaacagttctacttcatgaaactcagagaatatttggaaggcagtaatctcatcacaaaacttcaagccaaacatgacttgctgcagaggaccctgggagaaggtcatagagctgaatatatgactacaagccgaggacgaagaaactcgcacacaagacatcaggactcaggacaggttattcccctcattgtggaaagctgtattcggttcatcaatctctatggtcttcagcatcaggggattttcagagtgtctggttcccaggtggaagtcaatgatattaaaaattcatttgagagaggtgaaaatcctttggctgatgaccagagtaaccatgatattaactcagttgctggcgttctgaagctctatttccgtgggctggaaaaccccctctttcctaaggaaagatttaacgatctgatttcttgtatcagaatagataatctctatgagagggcgcttcacatccgcaaactcctcctgactttgcccaggtcggtccttatagtgatgaggtacctctttgccttcctcaatcatctatcacagtacagcgatgagaatatgatggacccttataacctggccatttgctttggcccaacattgatgcctgtcccagaaatacaggatcaagtgtcttgccaggcacatgtgaatgaaattatcaaaaccatcatcatccaccatgagactattttcccagatgctaaagagctggatggccctgtttatgagaaatgtatggctggagatgactattgcgacagcccatacagtgagcacggtacattggaggaagtggaccaagatgctggtacagagccccacacaagtgaagatgaatgtgagccaatagaagcaatagccaagtttgactatgttgggcggtctgccagagaactatccttcaagaagggtgcctccctgctgctgtatcaccgtgcatctgaggactggtgggaaggcaggcacaacgggattgacgggctggtgcctcaccagtatatagtggtgcaggatatggatgatacgttttcagacactctgagccaaaaagccgacagtgaggccagcagtgggccagtcacggaagacaagtcctcatccaaggacatgaactccccgacagaccgtcatcctgacggctatttagccaggcaacgaaaaagaggagagccaccccctccagtaaggcgtcctggcaggaccagtgatggccattgcccgctccaccctccacatgccctttctaactcctcagttgacctagggtccccaagccttgccagtcacccccggggcctgctgcagaaccgtggcctcaacaatgacagtcctgagcggaggcgcaggcctggccatggcagcttacacatagcgacgctcgtagagatgcagcttcattgag

SEQ ID NO: 362075 - DNA, 2425 bp, Homo sapiens
  misc_feature (1388)..(1388): n is a, c, g, or t
cctcctcctacttctcctctccctcctcccttccctcgggtcggcgctgcctctggattgcctgcgtgtgggagtacaactctgcctctccaaggagaacgggttgtgaccactgaacaaaacttgcccattgaaagcaaacccggaacagctggataatgtccaccccgagccgattcaagaaggacaaagagatcatagccgagtatgaaagtcaagtcaaagaaattcgagctcaactggtagaacaacaaaaatgcctggagcagcaaacggagatgcgagttcagcttctccaggatctgcaagatttcttccgaaaaaaagctgaaattgagacggaatattcccggaatctagagaagttagcagaaaggttcatggcaaaaacaagaagcactaaggatcatcaacaatacaagaaagaccagaacctgttgtctccagtgaactgctggtatttgctcctgaaccaagtaaggagagaaagcaaagaccatgcaaccttgagtgacatctatctgaacaatgtgattatgcggttcatgcagataagtgaggattctaccaggatgtttaaaaagagcaaagagattgcattccaacttcatgaggatttaatgaaggttcttaatgagctttatacggtgatgaaaacataccatatgtatcatgcagagagcatcagtgcagagagcaagctgaaagaggccgaaaaacaagaggaaaagcaaattgggagatctggtgatccagtcttccatattcgactagaggagagacatcaacggcgaagctctgtaaagaaaattgaaaaaatgaaagaaaaaagacaagcaaaatattcagaaaataagctaaaatcaattaaggcacggaacgaatatctcctaacacttgaagccaccaatgcctcagttttcaagtactatattcatgatctttctgatttaattgattgctgtgatcttggctaccatgcaagtctgaacagagccctaagaacatatctgtctgcggagtacaaccttgaaacctccagacatgagggcttagacattattgagaatgcagttgataatttagagcccaggagcgataagcagagattcatggagatgtaccctgctgcgttctgtccaccaatgaagtttgagtttcagtctcacatgggtgatgaggtgtgccaggtcagtgcccagcagccagtccaggcagagctcatgctcaggtaccaacagttgcagtcccgccttgccacgctcaaaatcgagaatgaagaggttaagaaaacgactgaagccaccttgcagacgatacaagatatggtcaccatcgaggactatgatgtttctgaatgcttccagcacagtcgttccacagaatcngtgaagtccactgtctctgaaacctacctgagtaaacccagcatcgccaagagaagagccaaccagcaggaaactgaacagttctacttcatgaaactcagagaatatttggaaggcagtaatctcatcacaaaacttcaagccaaacatgacttgctgcagaggaccctgggagaaggtcatagagctgaatatatgactacaagccgaggacgaagaaactcgcacacaagacatcaggactcaggacaggttattcccctcattgtggaaagctgtattcggttcatcaatctctatggtcttcagcatcaggggattttcagagtgtctggttcccaggtggaagtcaatgatattaaaaattcatttgagagaggtgaaaatcctttggctgatgaccagagtaaccatgatattaactcagttgctggcgttctgaagctctatttccgtgggctggaaaaccccctctttcctaaggaaagatttaacgatctgatttcttgtatcagaatagataatctctatgagagggcgcttcacatccgcaaactcctcctgactttgcccaggtcggtccttatagtgatgaggtacctctttgccttcctcaatcatctatcacagtacagcgatgagaatatgatggacccttataacctggccatttgctttggcccaacattgatgcctgtcccagaaatacaggatcaagtgtcttgccaggcacatgtgaatgaaattatcaaaaccatcatcatccaccatgagactattttcccagatgctaaagagctggatggccctgtttatgagaaatgtatggctggagatgactattgcgacagcccatacagtgagcacggtacattggaggaagtggaccaagatgctggtacagagccccacacaagtgaagatggtatgctctccccttatgctattataaagccagtctttatatccctattgtaaacaattgcttgtattaacattttagaggcaaagcacagtggctcctacctataatccca

SEQ ID NO: 362076 - DNA, 10338 bp, Homo sapiens
ctgagcctcggcccaacaaaatggcggcggcagcggtgtcgctttgtttccgcggctcctgcggcggtggcagtggtagcggcctttgagctgtggggaggttccagcagcagctacagtgacgactaagactccagtgcatttctatcgtaaccgggcgcgggggagcgcagatcggcgcccagcaatcacagaagccgacaaggcgttcaagcgaaaacatgaccgctgagcccatgagtgaaagcaagttgaatacattggtgcagaagcttcatgacttccttgcacactcatcagaagaatctgaagaaacaagttctcctccacgacttgcaatgaatcaaaacacagataaaatcagtggttctggaagtaactctgatatgatggaaaacagcaaggaagagggaactagctcttcagaaaaatccaagtcttcaggatcgtcacgatcaaagaggaaaccttcaattgtaacaaagtatgtagaatcagatgatgaaaaacctttggatgatgaaactgtaaatgaagatgcgtctaatgaaaattcagaaaatgatattactatgcagagcttgccaaaaggtacagtgattgtacagccagagccagtgctgaatgaagacaaagatgattttaaagggcctgaatttagaagcagaagtaaaatgaaaactgaaaatctcaaaaaacgcggagaagatgggcttcatgggattgtgagctgcactgcttgtggacaacaggtcaatcattttcaaaaagattccatttatagacacccttcattgcaagttcttatttgtaagaattgctttaagtattacatgagtgatgatattagccgtgactcagatggaatggatgaacaatgtaggtggtgtgcggaaggtggaaacttgatttgttgtgacttttgccataatgctttctgcaagaaatgcattctacgcaaccttggtcgaaaggagttgtccacaataatggatgaaaacaaccaatggtattgctacatttgtcacccagagcctttgttggacttggtcactgcatgtaacagcgtatttgagaatttagaacagttgttgcagcaaaataagaagaagataaaagttgacagtgaaaagagtaataaagtatatgaacatacatccagattttctccaaagaagactagttcaaattgtaatggagaagaaaagaaattagatgattcctgttctggctctgtaacctactcttattccgcactaattgtgcccaaagagatgattaagaaggcaaaaaaactgattgagaccacagccaacatgaactccagttatgttaaatttttaaagcaggcaacagataattcagaaatcagttctgctacaaaattacgtcagcttaaggcttttaagtctgtgttggctgatattaagaaggctcatcttgcattggaagaagacttaaattccgagtttcgagcgatggatgctgtaaacaaagagaaaaataccaaagagcataaagtcatagatgctaagtttgaaacaaaagcacgaaaaggagaaaaaccttgtgctttggaaaagaaggatatttcaaagtcagaagctaaactttcaagaaaacaggtagatagtgagcacatgcatcagaatgttccaacagaggaacaaagaacaaataaaagtaccggtggtgaacataagaaatctgatagaaaagaagaacctcaatatgaacctgccaacacttctgaagatttagacatggatattgtgtctgttccttcctcagttccagaagacatttttgagaatcttgagactgctatggaagttcagagttcagttgatcatcaaggggatggcagcagtggaactgaacaagaagtggagagttcatctgtaaaattaaatatttcttcaaaagacaacagaggaggtattaaatcaaaaactacagctaaagtaacaaaagaattatatgttaaactcactcctgtttccctttctaattccccaattaaaggtgctgattgtcaggaagttccacaagataaagatggctataaaagttgtggtctgaaccccaagttagagaaatgtggacttggacaggaaaacagtgataatgagcatttggttgaaaatgaagtttcattacttttagaggaatctgatcttcgaagatccccacgtgtaaagactacacccttgaggcgaccgacagaaactaaccctgtaacatctaattcagatgaagaatgtaatgaaacagttaaggagaaacaaaaactatcagttccagtgagaaaaaaggataagcgtaattcttctgacagtgctatagataatcctaagcctaataaattgccaaaatctaagcaatcagagactgtggatcaaaattcagattctgatgaaatgctagcaatcctcaaagaggtgagcaggatgagtcacagttcttcttcagatactgatattaatgaaattcatacaaaccataagactttgtatgatttaaagactcaggcggggaaagatgataaaggaaaaaggaaacgaaaaagttctacatctggctcagattttgatactaaaaagggcaaatcagctaagagctctataatttctaaaaagaaacgacaaacccagtctgagtcttctaattatgactcagaattagaaaaagagataaagagcatgagtaaaattggtgctgccagaaccaccaaaaaaagaattccaaatacaaaagattttgactcttctgaagatgagaaacacagcaaaaaaggaatggataatcaagggcacaaaaatttgaagacctcacaagaaggatcatctgatgatgctgaaagaaaacaagagagagagactttctcttcagcagaaggcacagttgataaagacacgaccatcatggaattaagagatcgacttcctaagaagcagcaagcaagtgcttccactgatggtgtcgataagctttctgggaaagagcagagttttacttctttggaagttagaaaagttgctgaaactaaagaaaagagcaagcatctcaaaaccaaaacatgtaaaaaagtacaggatggcttatctgatattgcagagaaattcctaaagaaagaccagagcgatgaaacttctgaagatgataaaaagcagagcaaaaagggaactgaagaaaaaaagaaaccttcagactttaagaaaaaagtaattaaaatggaacaacagtatgaatcttcatctgatggcactgaaaagttacctgagcgagaagaaatttgtcattttcctaagggcataaaacaaattaagaatggaacaactgatggagaaaagaaaagtaaaaaaataagagataaaacttctaaaaagaaggatgaattatctgattatgctgagaagtcaacagggaaaggagatagttgtgactcttcagaggataaaaagagtaagaatggagcatatggtagagagaagaaaaggtgcaagttgcttggaaagagttcaaggaagagacaagattgttcatcatctgatactgagaaatattccatgaaagaagatggttgtaactcttctgataagagactgaaaagaatagaattgagggaaagaagaaatttaagttcaaagagaaatactaaggaaatacaaagtggctcatcatcatctgatgctgaggaaagttctgaagataataaaaagaagaagcaaagaacttcatctaaaaagaaggcagtcattgtcaaggagaaaaagagaaactccctaagaacaagcactaaaaggaagcaagctgacattacatcctcatcttcttctgatatagaagatgatgatcagaattctataggtgagggaagcagcgatgaacagaaaattaagcctgtgactgaaaatttagtgctgtcttcacatactggattttgccaatcttcaggagatgaagccttatctaaatcagtgcctgtcacagtggatgatgatgatgacgacaatgatcctgagaatagaattgccaagaagatgcttttagaagaaattaaagccaatctttcctctgatgaggatggatcttcagatgatgagccagaagaagggaaaaaaagaactggaaaacaaaatgaagaaaacccaggagatgaggaagcaaaaaatcaagtcaattctgaatcagattcagattctgaagaatctaagaagccaagatacagacataggcttttgcggcacaaattgactgtgagtgacggagaatctggagaagaaaaaaagacaaagcctaaagagcataaagaagtcaaaggcagaaacagaagaaaggtgagcagtgaagattcagaagattctgattttcaggaatcaggagttagtgaagaagttagtgaatccgaagatgaacagcggcccagaacaaggtctgcaaagaaagcagagttggaagaaaatcagcggagctataaacagaaaaagaaaaggcgacgtattaaggttcaagaagattcatccagtgaaaacaagagtaattctgaggaagaagaggaggaaaaagaagaggaggaggaagaggaggaggaggaggaagaggaggaggaagatgaaaatgatgattccaagtctcctggaaaaggcagaaagaaaattcggaagattcttaaagatgataaactgagaacagaaacacaaaatgctcttaaggaagaggaagagagacgaaaacgtattgctgagagggagcgtgagcgagaaaaattgagagaggtgatagaaattgaagatgcttcacccaccaagtgtccaataacaaccaagttggttttagatgaagatgaagaaaccaaagaacctttagtgcaggttcatagaaatatggttatcaaattgaaaccccatcaagtagatggtgttcagtttatgtgggattgctgctgtgagtctgtgaaaaaaacaaagaaatctccaggttcaggatgcattcttgcccactgtatgggccttggtaagactttacaggtggtaagttttcttcatacagttcttttgtgtgacaaactggatttcagcacggcgttagtggtttgtcctcttaatactgctttgaattggatgaatgaatttgagaagtggcaagagggattaaaagatgatgagaagcttgaggtttctgaattagcaactgtgaaacgtcctcaggagagaagctacatgctgcagaggtggcaagaagatggtggtgttatgatcataggctatgagatgtatagaaatcttgctcaaggaaggaatgtgaagagtcggaaacttaaagaaatatttaacaaagctttggttgatccaggccctgattttgttgtttgtgatgaaggccatattctaaaaaatgaagcatctgctgtttctaaagctatgaattctatacgatcaaggaggaggattattttaacaggaacaccacttcaaaataacctaattgagtatcattgtatggttaattttatcaaggaaaatttacttggatccattaaggagttcaggaatagatttataaatccaattcaaaatggtcagtgtgcagattctaccatggtagatgtcagagtgatgaaaaaacgtgctcacattctctatgagatgttagctggatgtgttcagaggaaagattatacagcattaacaaaattcttgcctccaaaacacgaatatgtgttagctgtgagaatgacttctattcagtgcaagctctatcagtactacttagatcacttaacaggtgtgggcaataatagtgaaggtggaagaggaaaggcaggtgcaaagcttttccaagattttcagatgttaagtagaatatggactcatccttggtgtttgcagctagactacattagcaaagaaaataagggttattttgatgaagacagtatggatgaatttatagcctcagattctgatgaaacctccatgagtttaagctccgatgattatacaaaaaagaagaaaaaagggaaaaaggggaaaaaagatagtagctcaagtggaagtggcagtgacaatgatgttgaagtgattaaggtctggaattcaagatctcggggaggtggtgaaggaaatgtggatgaaacaggaaacaatccttctgtttctttaaaactggaagaaagtaaagctacttcttcttctaatccaagcagcccagctccagactggtacaaagattttgttacagatgctgatgctgaggttttagagcattctgggaaaatggtacttctctttgaaattcttcgaatggcagaggaaattggggataaagtccttgttttcagccagtccctcatatctctggacttgattgaagattttcttgaattagctagtagggagaagacagaagataaagataaaccccttatttataaaggtgaggggaagtggcttcgaaacattgactattaccgtttagatggttccactactgcacagtcaaggaagaagtgggctgaagaatttaatgatgaaactaatgtgagaggacgattatttatcatttctactaaagcaggatctctaggaattaatctggtagctgctaatcgagtaattatattcgacgcttcttggaatccatcttatgacatccagagtatattcagagtttatcgctttggacaaactaagcctgtttatgtatataggttcttagctcagggaaccatggaagataagatttatgatcggcaagtaactaagcagtcactgtcttttcgagttgttgatcagcagcaggtggagcgtcattttactatgaatgagcttactgaactttatacttttgagccagacttattagatgaccctaattcagaaaagaagaagaagagggatactcccatgctgccaaaggataccatacttgcagagctccttcagatacataaagaacacattgtaggataccatgaacatgattctcttttggaccacaaagaagaagaagagttgactgaagaagaaagaaaagcagcttgggctgagtatgaagcagagaagaagggactgaccatgcgtttcaacataccaactgggaccaatttaccccctgtcagtttcaactctcaaactccttatattcctttcaatttgggagccctgtcagcaatgagtaatcaacagctggaggacctcattaatcaaggaagagaaaaagttgtagaagcaacaaacagtgtgacagcagtgaggattcaacctcttgaggatataatttcagctgtatggaaggagaacatgaatctctcagaggcccaagtacaggcgttagcattaagtagacaagccagccaggagcttgatgttaaacgaagagaagcaatctacaatgatgtattgacaaaacaacagatgttaatcagctgtgttcagcgaatacttatgaacagaaggctccagcagcagtacaatcagcagcaacagcaacaaatgacttatcaacaagcaacactgggtcacctcatgatgccaaagcccccaaatttgatcatgaatccttctaactaccagcagattgatatgagaggaatgtatcagccagtggctggtggtatgcagccaccaccattacagcgtgcaccacccccaatgagaagcaaaaatccaggaccttcccaagggaaatcaatgtgattttgcactaaaagcttaatggattgttaaaatcatagaaagatcttttatttttttaggaatcaatgacttaacagaactcaactgtataaatagtttggtccccttaaatgccaatcttccatattagttttacttttttttttttaaatagggcataccatttcttcctgacatttgtcagtgatgttgcctagaatcttcttacacacgctgagtacagaagatatttcaaattgttttcagtgaaaacaagtccttccataatagtaacaactccacagatttcctctctaaatttttatgcctgcttttagcaaccataaaattgtcataaaattaataaatttaggaaagaataaagatttatatattcattctttacatataaaaacacacagctgagttcttagagttgattcctcaagttatgaaatacttttgtacttaatccatttcttgattaaagtgattgaaatggttttaatgttcttttgactgaagtctgaaactgggctcctgctttattgtctctgtgactgaaagttagaaactgagggttatctttgacacagaattgtgtgcaatattcttaaatactactgctctaaaagttggagaagtcttgcagttatcttagcattgtataaacagccttaagtatagcctaagaagagaattcctttttcttctttagtccttctgccattttttattttcagttatatgtgctgaaataattactggtaaaatttcagggttgtggattatcttccacacatgaattttctctctcctggcacgaatataaagcacatctcttaactgcatggtgccagtgctaatgcttcatcctgttgctggcagtgggatgtggacttagaaaatcaagttctagcattttagtaggttaacactgaagttgtggttgttaggttcacaccctgttttataaacaacatcaaaatggcagaaccattgctgactttaggttcacatgaggaatgtacttttaacaattcccagtactatcagtattgtgaaataattcctctgaaagataagaatcactggcttctatgcgcttcttttctctcatcatcatgttcttttaccccagtttccttacatttttttaaattgtttcagagtttgttttttttttagtttagattgtgaggcaattattaaatcaaaattaattcatccaatacccctttactagaagttttactagaaaatgtattacattttattttttcttaatccagttctgcaaaaatgacctataaatttattcatgtacaattttggttacttgaattgttaaagaaaacattgtttttgactatgggagtcaactcaacatggcagaaccatttttgagatgatgatacaacaggtagtgaaacagcttaagaattccaaaaaaaaaaaaaaaaaaaaaaaaaaagaaaactgggtttgggctttgctttaggtatcactggattagaatgagtttaacattagctaaaactgctttgagttgtttggatgattaagagattgccatttttatcttggaagaactagtggtaaaacatccaagagcactaggattgtgatacagaatttgtgaggtttggtggatccacgcccctctcccccactttcccatgatgaaatatcactaataaatcctgtatatttagatattatgctagccatgtaatcagatttatttaattgggtggggcaggtgtgtatttactttagaaaaaatgaaaaagacaagatttatgagaaatatttgaaggcagtacactctggccaactgttaccagttggtatttctacaagttcagaatattttaaacctgatttactagacctgggaattttcaacatggtctaattatttactcaaagacatagatgtgaaaattttaggcaaccttctaaatctttttcaccatggatgaaactataacttaaagaataatacttagaagggttaattggaaatcagagtttgaaataaaacttggaccactttgtatacactcttctcacttgacattttagctatataatatgtactttgagtataacatcaagctttaacaaatatttaaagacaaaaaaatcacgtcagtaaaatactaaaaggctcatttttatatttgttttagatgttttaaatagttgcaatggattaaaaatgatgatttaaaatgttgcttgtaatacagttttgcctgctaaattctccacattttgtaacctgttttatttctttgggtgtaaagcgtttttgcttagtattgtgatattgtatatgttttgtcccagttgtatagtaatgtttcagtccatcatccagctttggctgctgaaatcatacagctgtgaagacttgcctttgtttctgttagactgcttttcagttctgtattgagtatcttaagtactgtagaaaagatgtcacttcttcctttaaggctgttttgtaatatatataaggactggaattgtgtttttaaagaaaagcattcaagtatgacaatatactatctgtgttttcaccattcaaagtgctgtttagtagttgaaacttaaactatttaatgtcatttaataaagtgaccaaaatgtg

SEQ ID NO: 362077 - DNA, 10460 bp, Homo sapiens
  misc_feature (781)..(781): n is a, c, g, or t
ctgagcctcggcccaacaaaatggcggcggcagcggtgtcgctttgtttccgcggctcctgcggcggtggcagtggtagcggcctttgagctgtggggaggttccagcagcagctacagtgacgactaagactccagtgcatttctatcgtaaccgggcgcgggggagcgcagatcggcgcccagcaatcacagaagccgacaaggcgttcaagcgaaaacatgaccgctgagcccatgagtgaaagcaagttgaatacattggtgcagaagcttcatgacttccttgcacactcatcagaagaatctgaagaaacaagttctcctccacgacttgcaatgaatcaaaacacagataaaatcagtggttctggaagtaactctgatatgatggaaaacagcaaggaagagggaactagctcttcagaaaaatccaagtcttcaggatcgtcacgatcaaagaggaaaccttcaattgtaacaaagtatgtagaatcagatgatgaaaaacctttggatgatgaaactgtaaatgaagatgcgtctaatgaaaattcagaaaatgatattactatgcagagcttgccaaaaggtacagtgattgtacagccagagccagtgctgaatgaagacaaagatgattttaaagggcctgaatttagaagcagaagtaaaatgaaaactgaaaatctcaaaaaacgcggagtgctgtggtgatatccttatatttgattccttgtgcacatgtgggagaaaatctccaaagaattacctagttttgnttaattcttgagcgatgtatgcaccaaagcacatagaagatacttaaagatgggcttcatgggattgtgagctgcactgcttgtggacaacaggtcaatcattttcaaaaagattccatttatagacacccttcattgcaagttcttatttgtaagaattgctttaagtattacatgagtgatgatattagccgtgactcagatggaatggatgaacaatgtaggtggtgtgcggaaggtggaaacttgatttgttgtgacttttgccataatgctttctgcaagaaatgcattctacgcaaccttggtcgaaaggagttgtccacaataatggatgaaaacaaccaatggtattgctacatttgtcacccagagcctttgttggacttggtcactgcatgtaacagcgtatttgagaatttagaacagttgttgcagcaaaataagaagaagataaaagttgacagtgaaaagagtaataaagtatatgaacatacatccagattttctccaaagaagactagttcaaattgtaatggagaagaaaagaaattagatgattcctgttctggctctgtaacctactcttattccgcactaattgtgcccaaagagatgattaagaaggcaaaaaaactgattgagaccacagccaacatgaactccagttatgttaaatttttaaagcaggcaacagataattcagaaatcagttctgctacaaaattacgtcagcttaaggcttttaagtctgtgttggctgatattaagaaggctcatcttgcattggaagaagacttaaattccgagtttcgagcgatggatgctgtaaacaaagagaaaaataccaaagagcataaagtcatagatgctaagtttgaaacaaaagcacgaaaaggagaaaaaccttgtgctttggaaaagaaggatatttcaaagtcagaagctaaactttcaagaaaacaggtagatagtgagcacatgcatcagaatgttccaacagaggaacaaagaacaaataaaagtaccggtggtgaacataagaaatctgatagaaaagaagaacctcaatatgaacctgccaacacttctgaagatttagacatggatattgtgtctgttccttcctcagttccagaagacatttttgagaatcttgagactgctatggaagttcagagttcagttgatcatcaaggggatggcagcagtggaactgaacaagaagtggagagttcatctgtaaaattaaatatttcttcaaaagacaacagaggaggtattaaatcaaaaactacagctaaagtaacaaaagaattatatgttaaactcactcctgtttccctttctaattccccaattaaaggtgctgattgtcaggaagttccacaagataaagatggctataaaagttgtggtctgaaccccaagttagagaaatgtggacttggacaggaaaacagtgataatgagcatttggttgaaaatgaagtttcattacttttagaggaatctgatcttcgaagatccccacgtgtaaagactacacccttgaggcgaccgacagaaactaaccctgtaacatctaattcagatgaagaatgtaatgaaacagttaaggagaaacaaaaactatcagttccagtgagaaaaaaggataagcgtaattcttctgacagtgctatagataatcctaagcctaataaattgccaaaatctaagcaatcagagactgtggatcaaaattcagattctgatgaaatgctagcaatcctcaaagaggtgagcaggatgagtcacagttcttcttcagatactgatattaatgaaattcatacaaaccataagactttgtatgatttaaagactcaggcggggaaagatgataaaggaaaaaggaaacgaaaaagttctacatctggctcagattttgatactaaaaagggcaaatcagctaagagctctataatttctaaaaagaaacgacaaacccagtctgagtcttctaattatgactcagaattagaaaaagagataaagagcatgagtaaaattggtgctgccagaaccaccaaaaaaagaattccaaatacaaaagattttgactcttctgaagatgagaaacacagcaaaaaaggaatggataatcaagggcacaaaaatttgaagacctcacaagaaggatcatctgatgatgctgaaagaaaacaagagagagagactttctcttcagcagaaggcacagttgataaagacacgaccatcatggaattaagagatcgacttcctaagaagcagcaagcaagtgcttccactgatggtgtcgataagctttctgggaaagagcagagttttacttctttggaagttagaaaagttgctgaaactaaagaaaagagcaagcatctcaaaaccaaaacatgtaaaaaagtacaggatggcttatctgatattgcagagaaattcctaaagaaagaccagagcgatgaaacttctgaagatgataaaaagcagagcaaaaagggaactgaagaaaaaaagaaaccttcagactttaagaaaaaagtaattaaaatggaacaacagtatgaatcttcatctgatggcactgaaaagttacctgagcgagaagaaatttgtcattttcctaagggcataaaacaaattaagaatggaacaactgatggagaaaagaaaagtaaaaaaataagagataaaacttctaaaaagaaggatgaattatctgattatgctgagaagtcaacagggaaaggagatagttgtgactcttcagaggataaaaagagtaagaatggagcatatggtagagagaagaaaaggtgcaagttgcttggaaagagttcaaggaagagacaagattgttcatcatctgatactgagaaatattccatgaaagaagatggttgtaactcttctgataagagactgaaaagaatagaattgagggaaagaagaaatttaagttcaaagagaaatactaaggaaatacaaagtggctcatcatcatctgatgctgaggaaagttctgaagataataaaaagaagaagcaaagaacttcatctaaaaagaaggcagtcattgtcaaggagaaaaagagaaactccctaagaacaagcactaaaaggaagcaagctgacattacatcctcatcttcttctgatatagaagatgatgatcagaattctataggtgagggaagcagcgatgaacagaaaattaagcctgtgactgaaaatttagtgctgtcttcacatactggattttgccaatcttcaggagatgaagccttatctaaatcagtgcctgtcacagtggatgatgatgatgacgacaatgatcctgagaatagaattgccaagaagatgcttttagaagaaattaaagccaatctttcctctgatgaggatggatcttcagatgatgagccagaagaagggaaaaaaagaactggaaaacaaaatgaagaaaacccaggagatgaggaagcaaaaaatcaagtcaattctgaatcagattcagattctgaagaatctaagaagccaagatacagacataggcttttgcggcacaaattgactgtgagtgacggagaatctggagaagaaaaaaagacaaagcctaaagagcataaagaagtcaaaggcagaaacagaagaaaggtgagcagtgaagattcagaagattctgattttcaggaatcaggagttagtgaagaagttagtgaatccgaagatgaacagcggcccagaacaaggtctgcaaagaaagcagagttggaagaaaatcagcggagctataaacagaaaaagaaaaggcgacgtattaaggttcaagaagattcatccagtgaaaacaagagtaattctgaggaagaagaggaggaaaaagaagaggaggaggaagaggaggaggaggaggaagaggaggaggaagatgaaaatgatgattccaagtctcctggaaaaggcagaaagaaaattcggaagattcttaaagatgataaactgagaacagaaacacaaaatgctcttaaggaagaggaagagagacgaaaacgtattgctgagagggagcgtgagcgagaaaaattgagagaggtgatagaaattgaagatgcttcacccaccaagtgtccaataacaaccaagttggttttagatgaagatgaagaaaccaaagaacctttagtgcaggttcatagaaatatggttatcaaattgaaaccccatcaagtagatggtgttcagtttatgtgggattgctgctgtgagtctgtgaaaaaaacaaagaaatctccaggttcaggatgcattcttgcccactgtatgggccttggtaagactttacaggtggtaagttttcttcatacagttcttttgtgtgacaaactggatttcagcacggcgttagtggtttgtcctcttaatactgctttgaattggatgaatgaatttgagaagtggcaagagggattaaaagatgatgagaagcttgaggtttctgaattagcaactgtgaaacgtcctcaggagagaagctacatgctgcagaggtggcaagaagatggtggtgttatgatcataggctatgagatgtatagaaatcttgctcaaggaaggaatgtgaagagtcggaaacttaaagaaatatttaacaaagctttggttgatccaggccctgattttgttgtttgtgatgaaggccatattctaaaaaatgaagcatctgctgtttctaaagctatgaattctatacgatcaaggaggaggattattttaacaggaacaccacttcaaaataacctaattgagtatcattgtatggttaattttatcaaggaaaatttacttggatccattaaggagttcaggaatagatttataaatccaattcaaaatggtcagtgtgcagattctaccatggtagatgtcagagtgatgaaaaaacgtgctcacattctctatgagatgttagctggatgtgttcagaggaaagattatacagcattaacaaaattcttgcctccaaaacacgaatatgtgttagctgtgagaatgacttctattcagtgcaagctctatcagtactacttagatcacttaacaggtgtgggcaataatagtgaaggtggaagaggaaaggcaggtgcaaagcttttccaagattttcagatgttaagtagaatatggactcatccttggtgtttgcagctagactacattagcaaagaaaataagggttattttgatgaagacagtatggatgaatttatagcctcagattctgatgaaacctccatgagtttaagctccgatgattatacaaaaaagaagaaaaaagggaaaaaggggaaaaaagatagtagctcaagtggaagtggcagtgacaatgatgttgaagtgattaaggtctggaattcaagatctcggggaggtggtgaaggaaatgtggatgaaacaggaaacaatccttctgtttctttaaaactggaagaaagtaaagctacttcttcttctaatccaagcagcccagctccagactggtacaaagattttgttacagatgctgatgctgaggttttagagcattctgggaaaatggtacttctctttgaaattcttcgaatggcagaggaaattggggataaagtccttgttttcagccagtccctcatatctctggacttgattgaagattttcttgaattagctagtagggagaagacagaagataaagataaaccccttatttataaaggtgaggggaagtggcttcgaaacattgactattaccgtttagatggttccactactgcacagtcaaggaagaagtgggctgaagaatttaatgatgaaactaatgtgagaggacgattatttatcatttctactaaagcaggatctctaggaattaatctggtagctgctaatcgagtaattatattcgacgcttcttggaatccatcttatgacatccagagtatattcagagtttatcgctttggacaaactaagcctgtttatgtatataggttcttagctcagggaaccatggaagataagatttatgatcggcaagtaactaagcagtcactgtcttttcgagttgttgatcagcagcaggtggagcgtcattttactatgaatgagcttactgaactttatacttttgagccagacttattagatgaccctaattcagaaaagaagaagaagagggatactcccatgctgccaaaggataccatacttgcagagctccttcagatacataaagaacacattgtaggataccatgaacatgattctcttttggaccacaaagaagaagaagagttgactgaagaagaaagaaaagcagcttgggctgagtatgaagcagagaagaagggactgaccatgcgtttcaacataccaactgggaccaatttaccccctgtcagtttcaactctcaaactccttatattcctttcaatttgggagccctgtcagcaatgagtaatcaacagctggaggacctcattaatcaaggaagagaaaaagttgtagaagcaacaaacagtgtgacagcagtgaggattcaacctcttgaggatataatttcagctgtatggaaggagaacatgaatctctcagaggcccaagtacaggcgttagcattaagtagacaagccagccaggagcttgatgttaaacgaagagaagcaatctacaatgatgtattgacaaaacaacagatgttaatcagctgtgttcagcgaatacttatgaacagaaggctccagcagcagtacaatcagcagcaacagcaacaaatgacttatcaacaagcaacactgggtcacctcatgatgccaaagcccccaaatttgatcatgaatccttctaactaccagcagattgatatgagaggaatgtatcagccagtggctggtggtatgcagccaccaccattacagcgtgcaccacccccaatgagaagcaaaaatccaggaccttcccaagggaaatcaatgtgattttgcactaaaagcttaatggattgttaaaatcatagaaagatcttttatttttttaggaatcaatgacttaacagaactcaactgtataaatagtttggtccccttaaatgccaatcttccatattagttttacttttttttttttaaatagggcataccatttcttcctgacatttgtcagtgatgttgcctagaatcttcttacacacgctgagtacagaagatatttcaaattgttttcagtgaaaacaagtccttccataatagtaacaactccacagatttcctctctaaatttttatgcctgcttttagcaaccataaaattgtcataaaattaataaatttaggaaagaataaagatttatatattcattctttacatataaaaacacacagctgagttcttagagttgattcctcaagttatgaaatacttttgtacttaatccatttcttgattaaagtgattgaaatggttttaatgttcttttgactgaagtctgaaactgggctcctgctttattgtctctgtgactgaaagttagaaactgagggttatctttgacacagaattgtgtgcaatattcttaaatactactgctctaaaagttggagaagtcttgcagttatcttagcattgtataaacagccttaagtatagcctaagaagagaattcctttttcttctttagtccttctgccattttttattttcagttatatgtgctgaaataattactggtaaaatttcagggttgtggattatcttccacacatgaattttctctctcctggcacgaatataaagcacatctcttaactgcatggtgccagtgctaatgcttcatcctgttgctggcagtgggatgtggacttagaaaatcaagttctagcattttagtaggttaacactgaagttgtggttgttaggttcacaccctgttttataaacaacatcaaaatggcagaaccattgctgactttaggttcacatgaggaatgtacttttaacaattcccagtactatcagtattgtgaaataattcctctgaaagataagaatcactggcttctatgcgcttcttttctctcatcatcatgttcttttaccccagtttccttacatttttttaaattgtttcagagtttgttttttttttagtttagattgtgaggcaattattaaatcaaaattaattcatccaatacccctttactagaagttttactagaaaatgtattacattttattttttcttaatccagttctgcaaaaatgacctataaatttattcatgtacaattttggttacttgaattgttaaagaaaacattgtttttgactatgggagtcaactcaacatggcagaaccatttttgagatgatgatacaacaggtagtgaaacagcttaagaattccaaaaaaaaaaaaaaaaaaaaaaaaaaagaaaactgggtttgggctttgctttaggtatcactggattagaatgagtttaacattagctaaaactgctttgagttgtttggatgattaagagattgccatttttatcttggaagaactagtggtaaaacatccaagagcactaggattgtgatacagaatttgtgaggtttggtggatccacgcccctctcccccactttcccatgatgaaatatcactaataaatcctgtatatttagatattatgctagccatgtaatcagatttatttaattgggtggggcaggtgtgtatttactttagaaaaaatgaaaaagacaagatttatgagaaatatttgaaggcagtacactctggccaactgttaccagttggtatttctacaagttcagaatattttaaacctgatttactagacctgggaattttcaacatggtctaattatttactcaaagacatagatgtgaaaattttaggcaaccttctaaatctttttcaccatggatgaaactataacttaaagaataatacttagaagggttaattggaaatcagagtttgaaataaaacttggaccactttgtatacactcttctcacttgacattttagctatataatatgtactttgagtataacatcaagctttaacaaatatttaaagacaaaaaaatcacgtcagtaaaatactaaaaggctcatttttatatttgttttagatgttttaaatagttgcaatggattaaaaatgatgatttaaaatgttgcttgtaatacagttttgcctgctaaattctccacattttgtaacctgttttatttctttgggtgtaaagcgtttttgcttagtattgtgatattgtatatgttttgtcccagttgtatagtaatgtttcagtccatcatccagctttggctgctgaaatcatacagctgtgaagacttgcctttgtttctgttagactgcttttcagttctgtattgagtatcttaagtactgtagaaaagatgtcacttcttcctttaaggctgttttgtaatatatataaggactggaattgtgtttttaaagaaaagcattcaagtatgacaatatactatctgtgttttcaccattcaaagtgctgtttagtagttgaaacttaaactatttaatgtcatttaataaagtgaccaaaatgtg

SEQ ID NO: 362078 - DNA, 508 bp, Homo sapiens
tttttttttttacaacttttaacggtttatgatgttaaagtaatgacaaagtaaagtatcttttactattaaaattgctgcatttctaaatggcaggagttgtagcagagatgtaaaattggtgaatgtatttgtacttttaaaccataaagtaattatagatttaatgggtcagaacacattaaagtggaaaaatattatgtaacatgattctcttctaaatgagcgatggtattttttgaaagactatagggacattctgtggagacctaggacttagtattggtatgggatcattttatactattcacattgatcatagaatcatggagctttagagttggaagagcctgatacatcatctagttgaactttggcattttactatctctttccctgtgccttgcctggtttggaaattctggccgtttattgtttaagcaaaacaaagctataatattgtaagattgcttaatttattaaatttttttgtggatatttaaacgaa

SEQ ID NO: 362079 - DNA, 743 bp, Homo sapiens
  misc_feature (743)..(743): n is a, c, g, or t
ctgagcctcggcccaacaaaatggcggcggcagcggtgtcgctttgtttccgcggctcctgcggcggtggcagtggtagcggcctttgagctgtggggaggttccagcagcagctacagtgacgactaagactccagtgcatttctatcgtaaccgggcgcgggggagcgcagatcggcgcccagcaatcacagaagccgacaaggcgttcaagcgaaaacatgaccgctgagcccatgagtgaaagcaagttgaatacattggtgcagaagcttcatgacttccttgcacactcatcagaagaatctgaagaaacaagttctcctccacgacttgcaatgaatcaaaacacagataaaatcagtggttctggaagtaactctgatatgatggaaaacagcaaggaagagggaactagctcttcagaaaaatccaagtcttcaggatcgtcacgatcaaagaggaaaccttcaattgtaaacaaaaatgactaaataaaaagtatatattcacagtaaaaaaaaaaaaaaaaaaaaaaaaaaaaaaaaaaacccccgggcgggcctactatatgccgggggcgcggaaaaaaaggaggaaatagaaaaagggcgcacaacgtgccataaggggttccctcggccccagcttcttttggtcccaaggggggaaactcggccggcccccataaagggaggcgaaatatacgaaatacccaggttcccggatagatcccgcgaggn

SEQ ID NO: 362080 - DNA, 11175 bp, Homo sapiens
ctgagcctcggcccaacaaaatggcggcggcagcggtgtcgctttgtttccgcggctcctgcggcggtggcagtggtagcggcctttgagctgtggggaggttccagcagcagctacagtgacgactaagactccagtgcatttctatcgtaaccgggcgcgggggagcgcagatcggcgcccagcaatcacagaagccgacaaggcgttcaagcgaaaacatgaccgctgagcccatgagtgaaagcaagttgaatacattggtgcagaagcttcatgacttccttgcacactcatcagaagaatctgaagaaacaagttctcctccacgacttgcaatgaatcaaaacacagataaaatcagtggttctggaagtaactctgatatgatggaaaacagcaaggaagagggaactagctcttcagaaaaatccaagtcttcaggatcgtcacgatcaaagaggaaaccttcaattgtaacaaagtatgtagaatcagatgatgaaaaacctttggatgatgaaactgtaaatgaagatgcgtctaatgaaaattcagaaaatgatattactatgcagagcttgccaaaaggtacagtgattgtacagccagagccagtgctgaatgaagacaaagatgattttaaagggcctgaatttagaagcagaagtaaaatgaaaactgaaaatctcaaaaaacgcggagaagatgggcttcatgggattgtgagctgcactgcttgtggacaacaggtcaatcattttcaaaaagattccatttatagacacccttcattgcaagttcttatttgtaagaattgctttaagtattacatgagtgatgatattagccgtgactcagatggaatggatgaacaatgtaggtggtgtgcggaaggtggaaacttgatttgttgtgacttttgccataatgctttctgcaagaaatgcattctacgcaaccttggtcgaaaggagttgtccacaataatggatgaaaacaaccaatggtattgctacatttgtcacccagagcctttgttggacttggtcactgcatgtaacagcgtatttgagaatttagaacagttgttgcagcaaaataagaagaagataaaagttgacagtgaaaagagtaataaagtatatgaacatacatccagattttctccaaagaagactagttcaaattgtaatggagaagaaaagaaattagatgattcctgttctggctctgtaacctactcttattccgcactaattgtgcccaaagagatgattaagaaggcaaaaaaactgattgagaccacagccaacatgaactccagttatgttaaatttttaaagcaggcaacagataattcagaaatcagttctgctacaaaattacgtcagcttaaggcttttaagtctgtgttggctgatattaagaaggctcatcttgcattggaagaagacttaaattccgagtttcgagcgatggatgctgtaaacaaagagaaaaataccaaagagcataaagtcatagatgctaagtttgaaacaaaagcacgaaaaggagaaaaaccttgtgctttggaaaagaaggatatttcaaagtcagaagctaaactttcaagaaaacaggtagatagtgagcacatgcatcagaatgttccaacagaggaacaaagaacaaataaaagtaccggtggtgaacataagaaatctgatagaaaagaagaacctcaatatgaacctgccaacacttctgaagatttagacatggatattgtgtctgttccttcctcagttccagaagacatttttgagaatcttgagactgctatggaagttcagagttcagttgatcatcaaggggatggcagcagtggaactgaacaagaagtggagagttcatctgtaaaattaaatatttcttcaaaagacaacagaggaggtattaaatcaaaaactacagctaaagtaacaaaagaattatatgttaaactcactcctgtttccctttctaattccccaattaaaggtgctgattgtcaggaagttccacaagataaagatggctataaaagttgtggtctgaaccccaagttagagaaatgtggacttggacaggaaaacagtgataatgagcatttggttgaaaatgaagtttcattacttttagaggaatctgatcttcgaagatccccacgtgtaaagactacacccttgaggcgaccgacagaaactaaccctgtaacatctaattcagatgaagaatgtaatgaaacagttaaggagaaacaaaaactatcagttccagtgagaaaaaaggataagcgtaattcttctgacagtgctatagataatcctaagcctaataaattgccaaaatctaagcaatcagagactgtggatcaaaattcagattctgatgaaatgctagcaatcctcaaagaggtgagcaggatgagtcacagttcttcttcagatactgatattaatgaaattcatacaaaccataagactttgtatgatttaaagactcaggcggggaaagatgataaaggaaaaaggaaacgaaaaagttctacatctggctcagattttgatactaaaaagggcaaatcagctaagagctctataatttctaaaaagaaacgacaaacccagtctgagtcttctaattatgactcagaattagaaaaagagataaagagcatgagtaaaattggtgctgccagaaccaccaaaaaaagaattccaaatacaaaagattttgactcttctgaagatgagaaacacagcaaaaaaggaatggataatcaagggcacaaaaatttgaagacctcacaagaaggatcatctgatgatgctgaaagaaaacaagagagagagactttctcttcagcagaaggcacagttgataaagacacgaccatcatggaattaagagatcgacttcctaagaagcagcaagcaagtgcttccactgatggtgtcgataagctttctgggaaagagcagagttttacttctttggaagttagaaaagttgctgaaactaaagaaaagagcaagcatctcaaaaccaaaacatgtaaaaaagtacaggatggcttatctgatattgcagagaaattcctaaagaaagaccagagcgatgaaacttctgaagatgataaaaagcagagcaaaaagggaactgaagaaaaaaagaaaccttcagactttaagaaaaaagtaattaaaatggaacaacagtatgaatcttcatctgatggcactgaaaagttacctgagcgagaagaaatttgtcattttcctaagggcataaaacaaattaagaatggaacaactgatggagaaaagaaaagtaaaaaaataagagataaaacttctaaaaagaaggatgaattatctgattatgctgagaagtcaacagggaaaggagatagttgtgactcttcagaggataaaaagagtaagaatggagcatatggtagagagaagaaaaggtgcaagttgcttggaaagagttcaaggaagagacaagattgttcatcatctgatactgagaaatattccatgaaagaagatggttgtaactcttctgataagagactgaaaagaatagaattgagggaaagaagaaatttaagttcaaagagaaatactaaggaaatacaaagtggctcatcatcatctgatgctgaggaaagttctgaagataataaaaagaagaagcaaagaacttcatctaaaaagaaggcagtcattgtcaaggagaaaaagagaaactccctaagaacaagcactaaaaggaagcaagctgacattacatcctcatcttcttctgatatagaagatgatgatcagaattctataggtgagggaagcagcgatgaacagaaaattaagcctgtgactgaaaatttagtgctgtcttcacatactggattttgccaatcttcaggagatgaagccttatctaaatcagtgcctgtcacagtggatgatgatgatgacgacaatgatcctgagaatagaattgccaagaagatgcttttagaagaaattaaagccaatctttcctctgatgaggatggatcttcagatgatgagccagaagaagggaaaaaaagaactggaaaacaaaatgaagaaaacccaggagatgaggaagcaaaaaatcaagtcaattctgaatcagattcagattctgaagaatctaagaagccaagatacagacataggcttttgcggcacaaattgactgtgagtgacggagaatctggagaagaaaaaaagacaaagcctaaagagcataaagaagtcaaaggcagaaacagaagaaaggtgagcagtgaagattcagaagattctgattttcaggaatcaggagttagtgaagaagttagtgaatccgaagatgaacagcggcccagaacaaggtctgcaaagaaagcagagttggaagaaaatcagcggagctataaacagaaaaagaaaaggcgacgtattaaggttcaagaagattcatccagtgaaaacaagagtaattctgaggaagaagaggaggaaaaagaagaggaggaggaagaggaggaggaggaggaagaggaggaggaagatgaaaatgatgattccaagtctcctggaaaaggcagaaagaaaattcggaagattcttaaagatgataaactgagaacagaaacacaaaatgctcttaaggaagaggaagagagacgaaaacgtattgctgagagggagcgtgagcgagaaaaattgagagaggtgatagaaattgaagatgcttcacccaccaagtgtccaataacaaccaagttggttttagatgaagatgaagaaaccaaagaacctttagtgcaggttcatagaaatatggttatcaaattgaaaccccatcaagtagatggtgttcagtttatgtgggattgctgctgtgagtctgtgaaaaaaacaaagaaatctccaggttcaggatgcattcttgcccactgtatgggccttggtaagactttacaggtggtaagttttcttcatacagttcttttgtgtgacaaactggatttcagcacggcgttagtggtttgtcctcttaatactgctttgaattggatgaatgaatttgagaagtggcaagagggattaaaagatgatgagaagcttgaggtttctgaattagcaactgtgaaacgtcctcaggagagaagctacatgctgcagaggtggcaagaagatggtggtgttatgatcataggctatgagatgtatagaaatcttgctcaaggaaggaatgtgaagagtcggaaacttaaagaaatatttaacaaagctttggttgatccaggccctgattttgttgtttgtgatgaaggccatattctaaaaaatgaagcatctgctgtttctaaagctatgaattctatacgatcaaggaggaggattattttaacaggaacaccacttcaaaataacctaattgagtatcattgtatggttaattttatcaaggaaaatttacttggatccattaaggagttcaggaatagatttataaatccaattcaaaatggtcagtgtgcagattctaccatggtagatgtcagagtgatgaaaaaacgtgctcacattctctatgagatgttagctggatgtgttcagaggaaagattatacagcattaacaaaattcttgcctccaaaacacgaatatgtgttagctgtgagaatgacttctattcagtgcaagctctatcagtactacttagatcacttaacaggtgtgggcaataatagtgaaggtggaagaggaaaggcaggtgcaaagcttttccaagattttcagatgttaagtagaatatggactcatccttggtgtttgcagctagactacattagcaaagaaaataagggttattttgatgaagacagtatggatgaatttatagcctcagattctgatgaaacctccatgagtttaagctccgatgattatacaaaaaagaagaaaaaagggaaaaaggggaaaaaagatagtagctcaagtggaagtggcagtgacaatgatgttgaagtgattaaggtctggaattcaagatctcggggaggtggtgaaggaaatgtggatgaaacaggaaacaatccttctgtttctttaaaactggaagaaagtaaagctacttcttcttctaatccaagcagcccagctccagactggtacaaagattttgttacagatgctgatgctgaggttttagagcattctgggaaaatggtacttctctttgaaattcttcgaatggcagaggaaattggggataaagtccttgttttcagccagtccctcatatctctggacttgattgaagattttcttgaattagctagtagggagaagacagaagataaagataaaccccttatttataaaggtgaggggaagtggcttcgaaacattgactattaccgtttagatggttccactactgcacagtcaaggaagaagtgggctgaagaatttaatgatgaaactaatgtgagaggacgattatttatcatttctactaaagcaggatctctaggaattaatctggtagctgctaatcgagtaattatattcgacgcttcttggaatccatcttatgacatccagagtatattcagagtttatcgctttggacaaactaagcctgtttatgtatataggttcttagctcagggaaccatggaagataagatttatgatcggcaagtaactaagcagtcactgtcttttcgagttgttgatcagcagcaggtggagcgtcattttactatgaatgagcttactgaactttatacttttgagccagacttattagatgaccctaattcagaaaagaagaagaagagggatactcccatgctgccaaaggataccatacttgcagagctccttcagatacataaagaacacattgtaggataccatgaacatgattctcttttggaccacaaagaagaagaagagttgactgaagaagaaagaaaagcagcttgggctgagtatgaagcagagaagaagggactgaccatgcgtttcaacataccaactgggaccaatttaccccctgtcagtttcaactctcaaactccttatattcctttcaatttgggagccctgtcagcaatgagtaatcaacagctggaggacctcattaatcaaggaagagaaaaagttgtagaagcaacaaacagtgtgacagcagtgaggattcaacctcttgaggatataatttcagctgtatggaaggagaacatgaatctctcagaggcccaagtacaggcgttagcattaagtagacaagccagccaggagcttgatgttaaacgaagagaagcaatctacaatgatgtattgacaaaacaacagatgttaatcagctgtgttcagcgaatacttatgaacagaaggctccagcagcagtacaatcagcagcaacagcaacaaatgacttatcaacaagcaacactgggtcacctcatgatgccaaagcccccaaatttgatcatgaatccttctaactaccagcagattgatatgagaggaatgtatcagccagtggctggtggtatgcagccaccaccattacagcgtgcaccacccccaatgagaagcaaaaatccaggaccttcccaagggaaatcaatgtgattttgcactaaaagcttaatggattgttaaaatcatagaaagatcttttatttttttaggaatcaatgacttaacagaactcaactgtataaatagtttggtccccttaaatgccaatcttccatattagttttacttttttttttttaaatagggcataccatttcttcctgacatttgtcagtgatgttgcctagaatcttcttacacacgctgagtacagaagatatttcaaattgttttcagtgaaaacaagtccttccataatagtaacaactccacagatttcctctctaaatttttatgcctgcttttagcaaccataaaattgtcataaaattaataaatttaggaaagaataaagatttatatattcattctttacatataaaaacacacagctgagttcttagagttgattcctcaagttatgaaatacttttgtacttaatccatttcttgattaaagtgattgaaatggttttaatgttcttttgactgaagtctgaaactgggctcctgctttattgtctctgtgactgaaagttagaaactgagggttatctttgacacagaattgtgtgcaatattcttaaatactactgctctaaaagttggagaagtcttgcagttatcttagcattgtataaacagccttaagtatagcctaagaagagaattcctttttcttctttagtccttctgccattttttattttcagttatatgtgctgaaataattactggtaaaatttcagggttgtggattatcttccacacatgaattttctctctcctggcacgaatataaagcacatctcttaactgcatggtgccagtgctaatgcttcatcctgttgctggcagtgggatgtggacttagaaaatcaagttctagcattttagtaggttaacactgaagttgtggttgttaggttcacaccctgttttataaacaacatcaaaatggcagaaccattgctgactttaggttcacatgaggaatgtacttttaacaattcccagtactatcagtattgtgaaataattcctctgaaagataagaatcactggcttctatgcgcttcttttctctcatcatcatgttcttttaccccagtttccttacatttttttaaattgtttcagagtttgttttttttttagtttagattgtgaggcaattattaaatcaaaattaattcatccaatacccctttactagaagttttactagaaaatgtattacattttattttttcttaatccagttctgcaaaaatgacctataaatttattcatgtacaattttggttacttgaattgttaaagaaaacattgtttttgactatgggagtcaactcaacatggcagaaccatttttgagatgatgatacaacaggtagtgaaacagcttaagaattccaaaaaaaaaaaaaaaaaaaaaaaaaaagaaaactgggtttgggctttgctttaggtatcactggattagaatgagtttaacattagctaaaactgctttgagttgtttggatgattaagagattgccatttttatcttggaagaactagtggtaaaacatccaagagcactaggattgtgatacagaatttgtgaggtttggtggatccacgcccctctcccccactttcccatgatgaaatatcactaataaatcctgtatatttagatattatgctagccatgtaatcagatttatttaattgggtggggcaggtgtgtatttactttagaaaaaatgaaaaagacaagatttatgagaaatatttgaaggcagtacactctggccaactgttaccagttggtatttctacaagttcagaatattttaaacctgatttactagacctgggaattttcaacatggtctaattatttactcaaagacatagatgtgaaaattttaggcaaccttctaaatctttttcaccatggatgaaactataacttaaagaataatacttagaagggttaattggaaatcagagtttgaaataaaacttggaccactttgtatacactcttctcacttgacattttagctatataatatgtactttgagtataacatcaagctttaacaaatatttaaagacaaaaaaatcacgtcagtaaaatactaaaaggctcatttttatatttgttttagatgttttaaatagttgcaatggattaaaaatgatgatttaaaatgttgcttgtaatacagttttgcctgctaaattctccacattttgtaacctgttttatttctttgggtgtaaagcgtttttgcttagtattgtgatattgtatatgttttgtcccagttgtatagtaatgtttcagtccatcatccagctttggctgctgaaatcatacagctgtgaagacttgcctttgtttctgttagactgcttttcagttctgtattgagtatcttaagtactgtagaaaagatgtcacttcttcctttaaggctgttttgtaatatatataaggactggaattgtgtttttaaagaaaagcattcaagtatgacaatatactatctgtgttttcaccattcaaagtgctgtttagtagttgaaacttaaactatttaatgtcatttaataaagtgaccaaaatgtgttgtgctctttattgtattttcacagctttgaaaatctgtgcacatactgtttcatagaaaatgtatagcttttgttgtcctatataatggtggttcttttgcacatttagttatttaatattgagaggtcacgaagtttggttattgaatctgttatatactaaattctgtaaagggagatctctcatctcaaaaagaatttacataccaggaagtccatgtgtgtttgtgttagttttggatgtctttgtgtaatccagccccatttcctgtttcccaacagctgtaacactcattttaagtcaagcagggctaccaacccacacttgatagaaaagctgcttaccattcagaagcttccttattacctggcctccaaatgagctgaatattttgtagccttcccttagctatgttcattttccctccattatcataaaatcagatcgatatttatgtgccccaaacaaaactttaagagcagttacattctgtcccagtagcccttgtttcctttgagagtagcatgttgtgaggctatagagacttattctaccagtaaaacaggtcaatccttttacatgtttattatactaaaaattatgttcagggtatttactactttatttcaccagactcagtctcaagtgacttggctatctccaaatcagatctacccttagagaataaacatttttctaccgttattttttttcaagtctataatctgagccagtcccaaaggagtgatcaagtttcagaaatgctttcatcttcacaacattttatatatactattatatggggtgaataaagttttaaatccgaaatatata

SEQ ID NO: 362081 - DNA, 10127 bp, Homo sapiens
ctgagcctcggcccaacaaaatggcggcggcagcggtgtcgctttgtttccgcggctcctgcggcggtggcagtggtagcggcctttgagctgtggggaggttccagcagcagctacagtgacgactaagactccagtgcatttctatcgtaaccgggcgcgggggagcgcagatcggcgcccagcaatcacagaagccgacaaggcgttcaagcgaaaacatgaccgctgagcccatgagtgaaagcaagttgaatacattggtgcagaagcttcatgacttccttgcacactcatcagaagaatctgaagaaacaagttctcctccacgacttgcaatgaatcaaaacacagataaaatcagtggttctggaagtaactctgatatgatggaaaacagcaaggaagagggaactagctcttcagaaaaatccaagtcttcaggatcgtcacgatcaaagaggaaaccttcaattgtaacaaagtatgtagaatcagatgatgaaaaacctttggatgatgaaactgtaaatgaagatgcgtctaatgaaaattcagaaaatgatattactatgcagagcttgccaaaaggtacagtgattgtacagccagagccagtgctgaatgaagacaaagatgattttaaagggcctgaatttagaagcagaagtaaaatgaaaactgaaaatctcaaaaaacgcggagaagatgggcttcatgggattgtgagctgcactgcttgtggacaacaggtcaatcattttcaaaaagattccatttatagacacccttcattgcaagttcttatttgtaagaattgctttaagtattacatgagtgatgatattagccgtgactcagatggaatggatgaacaatgtaggtggtgtgcggaaggtggaaacttgatttgttgtgacttttgccataatgctttctgcaagaaatgcattctacgcaaccttggtcgaaaggagttgtccacaataatggatgaaaacaaccaatggtattgctacatttgtcacccagagcctttgttggacttggtcactgcatgtaacagcgtatttgagaatttagaacagttgttgcagcaaaataagaagaagataaaagttgacagtgaaaagagtaataaagtatatgaacatacatccagattttctccaaagaagactagttcaaattgtaatggagaagaaaagaaattagatgattcctgttctggctctgtaacctactcttattccgcactaattgtgcccaaagagatgattaagaaggcaaaaaaactgattgagaccacagccaacatgaactccagttatgttaaatttttaaagcaggcaacagataattcagaaatcagttctgctacaaaattacgtcagcttaaggcttttaagtctgtgttggctgatattaagaaggctcatcttgcattggaagaagacttaaattccgagtttcgagcgatggatgctgtaaacaaagagaaaaataccaaagagcataaagtcatagatgctaagtttgaaacaaaagcacgaaaaggagaaaaaccttgtgctttggaaaagaaggatatttcaaagtcagaagctaaactttcaagaaaacaggtagatagtgagcacatgcatcagaatgttccaacagaggaacaaagaacaaataaaagtaccggtggtgaacataagaaatctgatagaaaagaagaacctcaatatgaacctgccaacacttctgaagatttagacatggatattgtgtctgttccttcctcagttccagaagacatttttgagaatcttgagactgctatggaagttcagagttcagttgatcatcaaggggatggcagcagtggaactgaacaagaagtggagagttcatctgtaaaattaaatatttcttcaaaagacaacagaggaggtattaaatcaaaaactacagctaaagtaacaaaagaattatatgttaaactcactcctgtttccctttctaattccccaattaaaggtgctgattgtcaggaagttccacaagataaagatggctataaaagttgtggtctgaaccccaagttagagaaatgtggacttggacaggaaaacagtgataatgagcatttggttgaaaatgaagtttcattacttttagaggaatctgatcttcgaagatccccacgtgtaaagactacacccttgaggcgaccgacagaaactaaccctgtaacatctaattcagatgaagaatgtaatgaaacagttaaggagaaacaaaaactatcagttccagtgagaaaaaaggataagcgtaattcttctgacagtgctatagataatcctaagcctaataaattgccaaaatctaagcaatcagagactgtggatcaaaattcagattctgatgaaatgctagcaatcctcaaagaggtgagcaggatgagtcacagttcttcttcagatactgatattaatgaaattcatacaaaccataagactttgtatgatttaaagactcaggcggggaaagatgataaaggaaaaaggaaacgaaaaagttctacatctggctcagattttgatactaaaaagggcaaatcagctaagagctctataatttctaaaaagaaacgacaaacccagtctgagtcttctaattatgactcagaattagaaaaagagataaagagcatgagtaaaattggtgctgccagaaccaccaaaaaaagaattccaaatacaaaagattttgactcttctgaagatgagaaacacagcaaaaaaggaatggataatcaagggcacaaaaatttgaagacctcacaagaaggatcatctgatgatgctgaaagaaaacaagagagagagactttctcttcagcagaaggcacagttgataaagacacgaccatcatggaattaagagatcgacttcctaagaagcagcaagcaagtgcttccactgatggtgtcgataagctttctgggaaagagcagagttttacttctttggaagttagaaaagttgctgaaactaaagaaaagagcaagcatctcaaaaccaaaacatgtaaaaaagtacaggatggcttatctgatattgcagagaaattcctaaagaaagaccagagcgatgaaacttctgaagatgataaaaagcagagcaaaaagggaactgaagaaaaaaagaaaccttcagactttaagaaaaaagtaattaaaatggaacaacagtatgaatcttcatctgatggcactgaaaagttacctgagcgagaagaaatttgtcattttcctaagggcataaaacaaattaagaatggaacaactgatggagaaaagaaaagtaaaaaaataagagataaaacttctaaaaagaaggatgaattatctgattatgctgagaagtcaacagggaaaggagatagttgtgactcttcagaggataaaaagagtaagaatggagcatatggtagagagaagaaaaggtgcaagttgcttggaaagagttcaaggaagagacaagattgttcatcatctgatactgagaaatattccatgaaagaagatggttgtaactcttctgataagagactgaaaagaatagaattgagggaaagaagaaatttaagttcaaagagaaatactaaggaaatacaaagtggctcatcatcatctgatgctgaggaaagttctgaagataataaaaagaagaagcaaagaacttcatctaaaaagaaggcagtcattgtcaaggagaaaaagagaaactccctaagaacaagcactaaaaggaagcaagctgacattacatcctcatcttcttctgatatagaagatgatgatcagaattctataggtgagggaagcagcgatgaacagaaaattaagcctgtgactgaaaatttagtgctgtcttcacatactggattttgccaatcttcaggagatgaagccttatctaaatcagtgcctgtcacagtggatgatgatgatgacgacaatgatcctgagaatagaattgccaagaagatgcttttagaagaaattaaagccaatctttcctctgatgaggatggatcttcagatgatgagccagaagaagggaaaaaaagaactggaaaacaaaatgaagaaaacccaggagatgaggaagcaaaaaatcaagtcaattctgaatcagattcagattctgaagaatctaagaagccaagatacagacataggcttttgcggcacaaattgactgtgagtgacggagaatctggagaagaaaaaaagacaaagcctaaagagcataaagaagtcaaaggcagaaacagaagaaaggtgagcagtgaagattcagaagattctgattttcaggaatcaggagttagtgaagaagttagtgaatccgaagatgaacagcggcccagaacaaggtctgcaaagaaagcagagttggaagaaaatcagcggagctataaacagaaaaagaaaaggcgacgtattaaggttcaagaagattcatccagtgaaaacaagagtaattctgaggaagaagaggaggaaaaagaagaggaggaggaagaggaggaggaggaggaagaggaggaggaagatgaaaatgatgattccaagtctcctggaaaaggcagaaagaaaattcggaagattcttaaagatgataaactgagaacagaaacacaaaatgctcttaaggaagaggaagagagacgaaaacgtattgctgagagggagcgtgagcgagaaaaattgagagaggtgatagaaattgaagatgcttcacccaccaagtgtccaataacaaccaagttggttttagatgaagatgaagaaaccaaagaacctttagtgcaggttcatagaaatatggttatcaaattgaaaccccatcaagtagatggtgttcagtttatgtgggattgctgctgtgagtctgtgaaaaaaacaaagaaatctccaggttcaggatgcattcttgcccactgtatgggccttggtaagactttacaggtggtaagttttcttcatacagttcttttgtgtgacaaactggatttcagcacggcgttagtggtttgtcctcttaatactgctttgaattggatgaatgaatttgagaagtggcaagagggattaaaagatgatgagaagcttgaggtttctgaattagcaactgtgaaacgtcctcaggagagaagctacatgctgcagaggtggcaagaagatggtggtgttatgatcataggctatgagatgtatagaaatcttgctcaaggaaggaatgtgaagagtcggaaacttaaagaaatatttaacaaagctttggttgatccaggccctgattttgttgtttgtgatgaaggccatattctaaaaaatgaagcatctgctgtttctaaagctatgaattctatacgatcaaggaggaggattattttaacaggaacaccacttcaaaataacctaattgagtatcattgtatggttaattttatcaaggaaaatttacttggatccattaaggagttcaggaatagatttataaatccaattcaaaatggtcagtgtgcagattctaccatggtagatgtcagagtgatgaaaaaacgtgctcacattctctatgagatgttagctggatgtgttcagaggaaagattatacagcattaacaaaattcttgcctccaaaacacgaatatgtgttagctgtgagaatgacttctattcagtgcaagctctatcagtactacttagatcacttaacaggtgtgggcaataatagtgaaggtggaagaggaaaggcaggtgcaaagcttttccaagattttcagatgttaagtagaatatggactcatccttggtgtttgcagctagactacattagcaaagaaaataagggttattttgatgaagacagtatggatgaatttatagcctcagattctgatgaaacctccatgagtttaagctccgatgattatacaaaaaagaagaaaaaagggaaaaaggggaaaaaagatagtagctcaagtggaagtggcagtgacaatgatgttgaagtgattaaggtctggaattcaagatctcggggaggtggtgaaggaaatgtggatgaaacaggaaacaatccttctgtttctttaaaactggaagaaagtaaagctacttcttcttctaatccaagcagcccagctccagactggtacaaagattttgttacagatgctgatgctgaggttttagagcattctgggaaaatggtacttctctttgaaattcttcgaatggcagaggaaattggggataaagtccttgttttcagccagtccctcatatctctggacttgattgaagattttcttgaattagctagtagggagaagacagaagataaagataaaccccttatttataaaggtgaggggaagtggcttcgaaacattgactattaccgtttagatggttccactactgcacagtcaaggaagaagtgggctgaagaatttaatgatgaaactaatgtgagaggacgattatttatcatttctactaaagcaggatctctaggaattaatctggtagctgctaatcgagtaattatattcgacgcttcttggaatccatcttatgacatccagagtatattcagagtttatcgctttggacaaactaagcctgtttatgtatataggttcttagctcagggaaccatggaagataagatttatgatcggcaagtaactaagcagtcactgtcttttcgagttgttgatcagcagcaggtggagcgtcattttactatgaatgagcttactgaactttatacttttgagccagacttattagatgaccctaattcagaaaagaagaagaagagggatactcccatgctgccaaaggataccatacttgcagagctccttcagatacataaagaacacattgtaggataccatgaacatgattctcttttggaccacaaagaagaagaagagttgactgaagaagaaagaaaagcagcttgggctgagtatgaagcagagaagaagggactgaccatgcgtttcaacataccaactgggaccaatttaccccctgtcagtttcaactctcaaactccttatattcctttcaatttgggagccctgtcagcaatgagtaatcaacagctggaggacctcattaatcaaggaagagaaaaagttgtagaagcaacaaacagtgtgacagcagtgaggattcaacctcttgaggatataatttcagctgtatggaaggagaacatgaatctctcagaggcccaagtacaggcgttagcattaagtagacaagccagccaggagcttgatgttaaacgaagagaagcaatctacaatgatgtattgacaaaacaacagatgttaatcagctgtgttcagcgaatacttatgaacagaaggctccagcagcagtacaatcagcagcaacagcaacaaatgacttatcaacaagcaacactgggtcacctcatgatgccaaagcccccaaatttgatcatgaatccttctaactaccagcagattgatatgagaggaatgtatcagccagtggctggtggtatgcagccaccaccattacagcgtgcaccacccccaatgagaagcaaaaatccaggaccttcccaagggaaatcaatgtgattttgcactaaaagcttaatggattgttaaaatcatagaaagatcttttatttttttaggaatcaatgacttaacagaactcaactgtataaatagtttggtccccttaaatgccaatcttccatattagttttacttttttttttttaaatagggcataccatttcttcctgacatttgtcagtgatgttgcctagaatcttcttacacacgctgagtacagaagatatttcaaattgttttcagtgaaaacaagtccttccataatagtaacaactccacagatttcctctctaaatttttatgcctgcttttagcaaccataaaattgtcataaaattaataaatttaggaaagaataaagatttatatattcattctttacatataaaaacacacagctgagttcttagagttgattcctcaagttatgaaatacttttgtacttaatccatttcttgattaaagtgattgaaatggttttaatgttcttttgactgaagtctgaaactgggctcctgctttattgtctctgtgactgaaagttagaaactgagggttatctttgacacagaattgtgtgcaatattcttaaatactactgctctaaaagttggagaagtcttgcagttatcttagcattgtataaacagccttaagtatagcctaagaagagaattcctttttcttctttagtccttctgccattttttattttcagttatatgtgctgaaataattactggtaaaatttcagggttgtggattatcttccacacatgaattttctctctcctggcacgaatataaagcacatctcttaactgcatggtgccagtgctaatgcttcatcctgttgctggcagtgggatgtggacttagaaaatcaagttctagcattttagtaggttaacactgaagttgtggttgttaggttcacaccctgttttataaacaacatcaaaatggcagaaccattgctgactttaggttcacatgaggaatgtacttttaacaattcccagtactatcagtattgtgaaataattcctctgaaagataagaatcactggcttctatgcgcttcttttctctcatcatcatgttcttttaccccagtttccttacatttttttaaattgtttcagagtttgttttttttttagtttagattgtgaggcaattattaaatcaaaattaattcatccaatacccctttactagaagttttactagaaaatgtattacattttattttttcttaatccagttctgcaaaaatgacctataaatttattcatgtacaattttggttacttgaattgttaaagaaaacattgtttttgactatgggagtcaactcaacatggcagaaccatttttgagatgatgatacaacaggtagtgaaacagcttaagaattccaaaaaaaaaaaaaaaaaaaaaaaaaaagaaaactgggtttgggctttgctttaggtatcactggattagaatgagtttaacattagctaaaactgctttgagttgtttggatgattaagagattgccatttttatcttggaagaactagtggtaaaacatccaagagcactaggattgtgatacagaatttgtgaggtttggtggatccacgcccctctcccccactttcccatgatgaaatatcactaataaatcctgtatatttagatattatgctagccatgtaatcagatttatttaattgggtggggcaggtgtgtatttactttagaaaaaatgaaaaagacaagatttatgagaaatatttgaaggcagtacactctggccaactgttaccagttggtatttctacaagttcagaatattttaaacctgatttactagacctgggaattttcaacatggtctaattatttactcaaagacatagatgtgaaaattttaggcaaccttctaaatctttttcaccatggatgaaactataacttaaagaataatacttagaagggttaattggaaatcagagtttgaaataaaacttggaccactttgtatacactcttctcacttgacattttagctatataatatgtactttgagtataacatcaagctttaacaaatatttaaagacaaaaaaatcacgtcagtaaaatactaaaaggctcatttttatatttgttttagatgttttaaatagttgcaatggattaaaaatgatgatttaaaatgttgcttgtaatacagttttgcctgctaaattctccacattttgtaacctgttttatttctttgggtgtaaagcgtttttgcttagtattgtgatattgtatatgttttgtcccagttgtatagtaatgtttcagtccatcatccagctttggctgctgaaatcatacagctgtgaagacttcgccaggcgtaggggtcctctaggtcg

SEQ ID NO: 362082 - DNA, 8554 bp, Homo sapiens
ctgagcctcggcccaacaaaatggcggcggcagcggtgtcgctttgtttccgcggctcctgcggcggtggcagtggtagcggcctttgagctgtggggaggttccagcagcagctacagtgacgactaagactccagtgcatttctatcgtaaccgggcgcgggggagcgcagatcggcgcccagcaatcacagaagccgacaaggcgttcaagcgaaaacatgaccgctgagcccatgaggtgctgattgtcaggaagttccacaagataaagatggctataaaagttgtggtctgaaccccaagttagagaaatgtggacttggacaggaaaacagtgataatgagcatttggttgaaaatgaagtttcattacttttagaggaatctgatcttcgaagatccccacgtgtaaagactacacccttgaggcgaccgacagaaactaaccctgtaacatctaattcagatgaagaatgtaatgaaacagttaaggagaaacaaaaactatcagttccagtgagaaaaaaggataagcgtaattcttctgacagtgctatagataatcctaagcctaataaattgccaaaatctaagcaatcagagactgtggatcaaaattcagattctgatgaaatgctagcaatcctcaaagaggtgagcaggatgagtcacagttcttcttcagatactgatattaatgaaattcatacaaaccataagactttgtatgatttaaagactcaggcggggaaagatgataaaggaaaaaggaaacgaaaaagttctacatctggctcagattttgatactaaaaagggcaaatcagctaagagctctataatttctaaaaagaaacgacaaacccagtctgagtcttctaattatgactcagaattagaaaaagagataaagagcatgagtaaaattggtgctgccagaaccaccaaaaaaagaattccaaatacaaaagattttgactcttctgaagatgagaaacacagcaaaaaaggaatggataatcaagggcacaaaaatttgaagacctcacaagaaggatcatctgatgatgctgaaagaaaacaagagagagagactttctcttcagcagaaggcacagttgataaagacacgaccatcatggaattaagagatcgacttcctaagaagcagcaagcaagtgcttccactgatggtgtcgataagctttctgggaaagagcagagttttacttctttggaagttagaaaagttgctgaaactaaagaaaagagcaagcatctcaaaaccaaaacatgtaaaaaagtacaggatggcttatctgatattgcagagaaattcctaaagaaagaccagagcgatgaaacttctgaagatgataaaaagcagagcaaaaagggaactgaagaaaaaaagaaaccttcagactttaagaaaaaagtaattaaaatggaacaacagtatgaatcttcatctgatggcactgaaaagttacctgagcgagaagaaatttgtcattttcctaagggcataaaacaaattaagaatggaacaactgatggagaaaagaaaagtaaaaaaataagagataaaacttctaaaaagaaggatgaattatctgattatgctgagaagtcaacagggaaaggagatagttgtgactcttcagaggataaaaagagtaagaatggagcatatggtagagagaagaaaaggtgcaagttgcttggaaagagttcaaggaagagacaagattgttcatcatctgatactgagaaatattccatgaaagaagatggttgtaactcttctgataagagactgaaaagaatagaattgagggaaagaagaaatttaagttcaaagagaaatactaaggaaatacaaagtggctcatcatcatctgatgctgaggaaagttctgaagataataaaaagaagaagcaaagaacttcatctaaaaagaaggcagtcattgtcaaggagaaaaagagaaactccctaagaacaagcactaaaaggaagcaagctgacattacatcctcatcttcttctgatatagaagatgatgatcagaattctataggtgagggaagcagcgatgaacagaaaattaagcctgtgactgaaaatttagtgctgtcttcacatactggattttgccaatcttcaggagatgaagccttatctaaatcagtgcctgtcacagtggatgatgatgatgacgacaatgatcctgagaatagaattgccaagaagatgcttttagaagaaattaaagccaatctttcctctgatgaggatggatcttcagatgatgagccagaagaagggaaaaaaagaactggaaaacaaaatgaagaaaacccaggagatgaggaagcaaaaaatcaagtcaattctgaatcagattcagattctgaagaatctaagaagccaagatacagacataggcttttgcggcacaaattgactgtgagtgacggagaatctggagaagaaaaaaagacaaagcctaaagagcataaagaagtcaaaggcagaaacagaagaaaggtgagcagtgaagattcagaagattctgattttcaggaatcaggagttagtgaagaagttagtgaatccgaagatgaacagcggcccagaacaaggtctgcaaagaaagcagagttggaagaaaatcagcggagctataaacagaaaaagaaaaggcgacgtattaaggttcaagaagattcatccagtgaaaacaagagtaattctgaggaagaagaggaggaaaaagaagaggaggaggaagaggaggaggaggaggaagaggaggaggaagatgaaaatgatgattccaagtctcctggaaaaggcagaaagaaaattcggaagattcttaaagatgataaactgagaacagaaacacaaaatgctcttaaggaagaggaagagagacgaaaacgtattgctgagagggagcgtgagcgagaaaaattgagagaggtgatagaaattgaagatgcttcacccaccaagtgtccaataacaaccaagttggttttagatgaagatgaagaaaccaaagaacctttagtgcaggttcatagaaatatggttatcaaattgaaaccccatcaagtagatggtgttcagtttatgtgggattgctgctgtgagtctgtgaaaaaaacaaagaaatctccaggttcaggatgcattcttgcccactgtatgggccttggtaagactttacaggtggtaagttttcttcatacagttcttttgtgtgacaaactggatttcagcacggcgttagtggtttgtcctcttaatactgctttgaattggatgaatgaatttgagaagtggcaagagggattaaaagatgatgagaagcttgaggtttctgaattagcaactgtgaaacgtcctcaggagagaagctacatgctgcagaggtggcaagaagatggtggtgttatgatcataggctatgagatgtatagaaatcttgctcaaggaaggaatgtgaagagtcggaaacttaaagaaatatttaacaaagctttggttgatccaggccctgattttgttgtttgtgatgaaggccatattctaaaaaatgaagcatctgctgtttctaaagctatgaattctatacgatcaaggaggaggattattttaacaggaacaccacttcaaaataacctaattgagtatcattgtatggttaattttatcaaggaaaatttacttggatccattaaggagttcaggaatagatttataaatccaattcaaaatggtcagtgtgcagattctaccatggtagatgtcagagtgatgaaaaaacgtgctcacattctctatgagatgttagctggatgtgttcagaggaaagattatacagcattaacaaaattcttgcctccaaaacacgaatatgtgttagctgtgagaatgacttctattcagtgcaagctctatcagtactacttagatcacttaacaggtgtgggcaataatagtgaaggtggaagaggaaaggcaggtgcaaagcttttccaagattttcagatgttaagtagaatatggactcatccttggtgtttgcagctagactacattagcaaagaaaataagggttattttgatgaagacagtatggatgaatttatagcctcagattctgatgaaacctccatgagtttaagctccgatgattatacaaaaaagaagaaaaaagggaaaaaggggaaaaaagatagtagctcaagtggaagtggcagtgacaatgatgttgaagtgattaaggtctggaattcaagatctcggggaggtggtgaaggaaatgtggatgaaacaggaaacaatccttctgtttctttaaaactggaagaaagtaaagctacttcttcttctaatccaagcagcccagctccagactggtacaaagattttgttacagatgctgatgctgaggttttagagcattctgggaaaatggtacttctctttgaaattcttcgaatggcagaggaaattggggataaagtccttgttttcagccagtccctcatatctctggacttgattgaagattttcttgaattagctagtagggagaagacagaagataaagataaaccccttatttataaaggtgaggggaagtggcttcgaaacattgactattaccgtttagatggttccactactgcacagtcaaggaagaagtgggctgaagaatttaatgatgaaactaatgtgagaggacgattatttatcatttctactaaagcaggatctctaggaattaatctggtagctgctaatcgagtaattatattcgacgcttcttggaatccatcttatgacatccagagtatattcagagtttatcgctttggacaaactaagcctgtttatgtatataggttcttagctcagggaaccatggaagataagatttatgatcggcaagtaactaagcagtcactgtcttttcgagttgttgatcagcagcaggtggagcgtcattttactatgaatgagcttactgaactttatacttttgagccagacttattagatgaccctaattcagaaaagaagaagaagagggatactcccatgctgccaaaggataccatacttgcagagctccttcagatacataaagaacacattgtaggataccatgaacatgattctcttttggaccacaaagaagaagaagagttgactgaagaagaaagaaaagcagcttgggctgagtatgaagcagagaagaagggactgaccatgcgtttcaacataccaactgggaccaatttaccccctgtcagtttcaactctcaaactccttatattcctttcaatttgggagccctgtcagcaatgagtaatcaacagctggaggacctcattaatcaaggaagagaaaaagttgtagaagcaacaaacagtgtgacagcagtgaggattcaacctcttgaggatataatttcagctgtatggaaggagaacatgaatctctcagaggcccaagtacaggcgttagcattaagtagacaagccagccaggagcttgatgttaaacgaagagaagcaatctacaatgatgtattgacaaaacaacagatgttaatcagctgtgttcagcgaatacttatgaacagaaggctccagcagcagtacaatcagcagcaacagcaacaaatgacttatcaacaagcaacactgggtcacctcatgatgccaaagcccccaaatttgatcatgaatccttctaactaccagcagattgatatgagaggaatgtatcagccagtggctggtggtatgcagccaccaccattacagcgtgcaccacccccaatgagaagcaaaaatccaggaccttcccaagggaaatcaatgtgattttgcactaaaagcttaatggattgttaaaatcatagaaagatcttttatttttttaggaatcaatgacttaacagaactcaactgtataaatagtttggtccccttaaatgccaatcttccatattagttttacttttttttttttaaatagggcataccatttcttcctgacatttgtcagtgatgttgcctagaatcttcttacacacgctgagtacagaagatatttcaaattgttttcagtgaaaacaagtccttccataatagtaacaactccacagatttcctctctaaatttttatgcctgcttttagcaaccataaaattgtcataaaattaataaatttaggaaagaataaagatttatatattcattctttacatataaaaacacacagctgagttcttagagttgattcctcaagttatgaaatacttttgtacttaatccatttcttgattaaagtgattgaaatggttttaatgttcttttgactgaagtctgaaactgggctcctgctttattgtctctgtgactgaaagttagaaactgagggttatctttgacacagaattgtgtgcaatattcttaaatactactgctctaaaagttggagaagtcttgcagttatcttagcattgtataaacagccttaagtatagcctaagaagagaattcctttttcttctttagtccttctgccattttttattttcagttatatgtgctgaaataattactggtaaaatttcagggttgtggattatcttccacacatgaattttctctctcctggcacgaatataaagcacatctcttaactgcatggtgccagtgctaatgcttcatcctgttgctggcagtgggatgtggacttagaaaatcaagttctagcattttagtaggttaacactgaagttgtggttgttaggttcacaccctgttttataaacaacatcaaaatggcagaaccattgctgactttaggttcacatgaggaatgtacttttaacaattcccagtactatcagtattgtgaaataattcctctgaaagataagaatcactggcttctatgcgcttcttttctctcatcatcatgttcttttaccccagtttccttacatttttttaaattgtttcagagtttgttttttttttagtttagattgtgaggcaattattaaatcaaaattaattcatccaatacccctttactagaagttttactagaaaatgtattacattttattttttcttaatccagttctgcaaaaatgacctataaatttattcatgtacaattttggttacttgaattgttaaagaaaacattgtttttgactatgggagtcaactcaacatggcagaaccatttttgagatgatgatacaacaggtagtgaaacagcttaagaattccaaaaaaaaaaaaaaaaaaaaaaaaaaagaaaactgggtttgggctttgctttaggtatcactggattagaatgagtttaacattagctaaaactgctttgagttgtttggatgattaagagattgccatttttatcttggaagaactagtggtaaaacatccaagagcactaggattgtgatacagaatttgtgaggtttggtggatccacgcccctctcccccactttcccatgatgaaatatcactaataaatcctgtatatttagatattatgctagccatgtaatcagatttatttaattgggtggggcaggtgtgtatttactttagaaaaaatgaaaaagacaagatttatgagaaatatttgaaggcagtacactctggccaactgttaccagttggtatttctacaagttcagaatattttaaacctgatttactagacctgggaattttcaacatggtctaattatttactcaaagacatagatgtgaaaattttaggcaaccttctaaatctttttcaccatggatgaaactataacttaaagaataatacttagaagggttaattggaaatcagagtttgaaataaaacttggaccactttgtatacactcttctcacttgacattttagctatataatatgtactttgagtataacatcaagctttaacaaatatttaaagacaaaaaaatcacgtcagtaaaatactaaaaggctcatttttatatttgttttagatgttttaaatagttgcaatggattaaaaatgatgatttaaaatgttgcttgtaatacagttttgcctgctaaattctccacattttgtaacctgttttatttctttgggtgtaaagcgtttttgcttagtattgtgatattgtatatgttttgtcccagttgtatagtaatgtttcagtccatcatccagctttggctgctgaaatcatacagctgtgaagacttgcctttgtttctgttagactgcttttcagttctgtattgagtatcttaagtactgtagaaaagatgtcacttcttcctttaaggctgttttgtaatatatataaggactggaattgtgtttttaaagaaaagcattcaagtatgacaatatactatctgtgttttcaccattcaaagtgctgtttagtagttgaaacttaaactatttaatgtcatttaataaagtgaccaaaatgtg

SEQ ID NO: 362083 - DNA, 10232 bp, Homo sapiens
ctgagcctcggcccaacaaaatggcggcggcagcggtgtcgctttgtttccgcggctcctgcggcggtggcagtggtagcggcctttgagctgtggggaggttccagcagcagctacagtgacgactaagactccagtgcatttctatcgtaaccgggcgcgggggagcgcagatcggcgcccagcaatcacagaagccgacaaggcgttcaagcgaaaacatgaccgctgagcccatgagtgaaagcaagttgaatacattggtgcagaagcttcatgacttccttgcacactcatcagaagaatctgaagaaacaagttctcctccacgacttgcaatgaatcaaaacacagataaaatcagtggttctggaagtaactctgatatgatggaaaacagcaaggaagagggaactagctcttcagaaaaatccaagtcttcaggatcgtcacgatcaaagaggaaaccttcaattgtaacaaagtatgtagaatcagatgatgaaaaacctttggatgatgaaactgtaaatgaagatgcgtctaatgaaaattcagaaaatgatattactatgcagagcttgccaaaaggtacagtgattgtacagccagagccagtgctgaatgaagacaaagatgattttaaagggcctgaatttagaagcagaagtaaaatgaaaactgaaaatctcaaaaaacgcggagaagatgggcttcatgggattgtgagctgcactgcttgtggacaacaggtcaatcattttcaaaaagattccatttatagacacccttcattgcaagttcttatttgtaagaattgctttaagtattacatgagtgatgatattagccgtgactcagatggaatggatgaacaatgtaggtggtgtgcggaaggtggaaacttgatttgttgtgacttttgccataatgctttctgcaagaaatgcattctacgcaaccttggtcgaaaggagttgtccacaataatggatgaaaacaaccaatggtattgctacatttgtcacccagagcctttgttggacttggtcactgcatgtaacagcgtatttgagaatttagaacagttgttgcagcaaaataagaagaagataaaagttgacagtgaaaagagtaataaagtatatgaacatacatccagattttctccaaagaagactagttcaaattgtaatggagaagaaaagaaattagatgattcctgttctggctctgtaacctactcttattccgcactaattgtgcccaaagagatgattaagaaggcaaaaaaactgattgagaccacagccaacatgaactccagttatgttaaatttttaaagcaggcaacagataattcagaaatcagttctgctacaaaattacgtcagcttaaggcttttaagtctgtgttggctgatattaagaaggctcatcttgcattggaagaagacttaaattccgagtttcgagcgatggatgctgtaaacaaagagaaaaataccaaagagcataaagtcatagatgctaagtttgaaacaaaagcacgaaaaggagaaaaaccttgtgctttggaaaagaaggatatttcaaagtcagaagctaaactttcaagaaaacaggtagatagtgagcacatgcatcagaatgttccaacagaggaacaaagaacaaataaaagtaccggtggtgaacataagaaatctgatagaaaagaagaacctcaatatgaacctgccaacacttctgaagatttagacatggatattgtgtctgttccttcctcagttccagaagacatttttgagaatcttgagactgctatggaagttcagagttcagttgatcatcaaggggatggcagcagtggaactgaacaagaagtggagagttcatctgtaaaattaaatatttcttcaaaagacaacagaggaggtattaaatcaaaaactacagctaaagtaacaaaagaattatatgttaaactcactcctgtttccctttctaattccccaattaaaggtgctgattgtcaggaagttccacaagataaagatggctataaaagttgtggtctgaaccccaagttagagaaatgtggacttggacaggaaaacagtgataatgagcatttggttgaaaatgaagtttcattacttttagaggaatctgatcttcgaagatccccacgtgtaaagactacacccttgaggcgaccgacagaaactaaccctgtaacatctaattcagatgaagaatgtaatgaaacagttaaggagaaacaaaaactatcagttccagtgagaaaaaaggataagcgtaattcttctgacagtgctatagataatcctaagcctaataaattgccaaaatctaagcaatcagagactgtggatcaaaattcagattctgatgaaatgctagcaatcctcaaagaggtgagcaggatgagtcacagttcttcttcagatactgatattaatgaaattcatacaaaccataagactttgtatgatttaaagactcaggcggggaaagatgataaaggaaaaaggaaacgaaaaagttctacatctggctcagattttgatactaaaaagggcaaatcagctaagagctctataatttctaaaaagaaacgacaaacccagtctgagtcttctaattatgactcagaattagaaaaagagataaagagcatgagtaaaattggtgctgccagaaccaccaaaaaaagaattccaaatacaaaagattttgactcttctgaagatgagaaacacagcaaaaaaggaatggataatcaagggcacaaaaatttgaagacctcacaagaaggatcatctgatgatgctgaaagaaaacaagagagagagactttctcttcagcagaaggcacagttgataaagacacgaccatcatggaattaagagatcgacttcctaagaagcagcaagcaagtgcttccactgatggtgtcgataagctttctgggaaagagcagagttttacttctttggaagttagaaaagttgctgaaactaaagaaaagagcaagcatctcaaaaccaaaacatgtaaaaaagtacaggatggcttatctgatattgcagagaaattcctaaagaaagaccagagcgatgaaacttctgaagatgataaaaagcagagcaaaaagggaactgaagaaaaaaagaaaccttcagactttaagaaaaaagtaattaaaatggaacaacagtatgaatcttcatctgatggcactgaaaagttacctgagcgagaagaaatttgtcattttcctaagggcataaaacaaattaagaatggaacaactgatggagaaaagaaaagtaaaaaaataagagataaaacttctaaaaagaaggatgaattatctgattatgctgagaagtcaacagggaaaggagatagttgtgactcttcagaggataaaaagagtaagaatggagcatatggtagagagaagaaaaggtgcaagttgcttggaaagagttcaaggaagagacaagattgttcatcatctgatactgagaaatattccatgaaagaagatggttgtaactcttctgataagagactgaaaagaatagaattgagggaaagaagaaatttaagttcaaagagaaatactaaggaaatacaaagtggctcatcatcatctgatgctgaggaaagttctgaagataataaaaagaagaagcaaagaacttcatctaaaaagaaggcagtcattgtcaaggagaaaaagagaaactccctaagaacaagcactaaaaggaagcaagctgacattacatcctcatcttcttctgatatagaagatgatgatcagaattctataggtgagggaagcagcgatgaacagaaaattaagcctgtgactgaaaatttagtgctgtcttcacatactggattttgccaatcttcaggagatgaagccttatctaaatcagtgcctgtcacagtggatgatgatgatgacgacaatgatcctgagaatagaattgccaagaagatgcttttagaagaaattaaagccaatctttcctctgatgaggatggatcttcagatgatgagccagaagaagggaaaaaaagaactggaaaacaaaatgaagaaaacccaggagatgaggaagcaaaaaatcaagtcaattctgaatcagattcagattctgaagaatctaagaagccaagatacagacataggcttttgcggcacaaattgactgtgagtgacggagaatctggagaagaaaaaaagacaaagcctaaagagcataaagaagtcaaaggcagaaacagaagaaaggtgagcagtgaagattcagaagattctgattttcaggaatcaggagttagtgaagaagttagtgaatccgaagatgaacagcggcccagaacaaggtctgcaaagaaagcagagttggaagaaaatcagcggagctataaacagaaaaagaaaaggcgacgtattaaggttcaagaagattcatccagtgaaaacaagagtaattctgaggaagaagaggaggaaaaagaagaggaggaggaagaggaggaggaggaggaagaggaggaggaagatgaaaatgatgattccaagtctcctggaaaaggcagaaagaaaattcggaagattcttaaagatgataaactgagaacagaaacacaaaatgctcttaaggaagaggaagagagacgaaaacgtattgctgagagggagcgtgagcgagaaaaattgagagaggtgatagaaattgaagatgcttcacccaccaagtgtccaataacaaccaagttggttttagatgaagatgaagaaaccaaagaacctttagtgcaggttcatagaaatatggttatcaaattgaaaccccatcaagtagatggtgttcagtttatgtgggattgctgctgtgagtctgtgaaaaaaacaaagaaatctccaggttcaggatgcattcttgcccactgtatgggccttggtaagactttacaggtggtaagttttcttcatacagttcttttgtgtgacaaactggatttcagcacggcgttagtggtttgtcctcttaatactgctttgaattggatgaatgaatttgagaagtggcaagagggattaaaagatgatgagaagcttgaggtttctgaattagcaactgtgaaacgtcctcaggagagaagctacatgctgcagaggtggcaagaagatggtggtgttatgatcataggctatgagatgtatagaaatcttgctcaaggaaggaatgtgaagagtcggaaacttaaagaaatatttaacaaagctttggttgatccaggccctgattttgttgtttgtgatgaaggccatattctaaaaaatgaagcatctgctgtttctaaagctatgaattctatacgatcaaggaggaggattattttaacaggaacaccacttcaaaataacctaattgagtatcattgtatggttaattttatcaaggaaaatttacttggatccattaaggagttcaggaatagatttataaatccaattcaaaatggtcagtgtgcagattctaccatggtagatgtcagagtgatgaaaaaacgtgctcacattctctatgagatgttagctggatgtgttcagaggaaagattatacagcattaacaaaattcttgcctccaaaacacgaatatgtgttagctgtgagaatgacttctattcagtgcaagctctatcagtactacttagatcacttaacaggtgtgggcaataatagtgaaggtggaagaggaaaggcaggtgcaaagcttttccaagattttcagatgttaagtagaatatggactcatccttggtgtttgcagctagactacattagcaaagaaaataagggttattttgatgaagacagtatggatgaatttatagcctcagattctgatgaaacctccatgagtttaagctccgatgattatacaaaaaagaagaaaaaagggaaaaaggggaaaaaagatagtagctcaagtggaagtggcagtgacaatgatgttgaagtgattaaggtctggaattcaagatctcggggaggtggtgaaggaaatgtggatgaaacaggaaacaatccttctgtttctttaaaactggaagaaagtaaagctacttcttcttctaatccaagcagcccagctccagactggtacaaagattttgttacagatgctgatgctgaggttttagagcattctgggaaaatggtacttctctttgaaattcttcgaatggcagaggaaattggggataaagtccttgttttcagccagtccctcatatctctggacttgattgaagattttcttgaattagctagtagggagaagacagaagataaagataaaccccttatttataaaggtgaggggaagtggcttcgaaacattgactattaccgtttagatggttccactactgcacagtcaaggaagaagtgggctgaagaatttaatgatgaaactaatgtgagaggacgattatttatcatttctactaaagcaggatctctaggaattaatctggtagctgctaatcgagtaattatattcgacgcttcttggaatccatcttatgacatccagagtatattcagagtttatcgctttggacaaactaagcctgtttatgtatataggttcttagctcagggaaccatggaagataagatttatgatcggcaagtaactaagcagtcactgtcttttcgagttgttgatcagcagcaggtggagcgtcattttactatgaatgagcttactgaactttatacttttgagccagacttattagatgaccctaattcagaaaagaagaagaagagggatactcccatgctgccaaaggataccatacttgcagagctccttcagatacataaagaacacattgtaggataccatgaacatgattctcttttggaccacaaagaagaagaagagttgactgaagaagaaagaaaagcagcttgggctgagtatgaagcagagaagaagggactgaccatgcgtttcaacataccaactgggaccaatttaccccctgtcagtttcaactctcaaactccttatattcctttcaatttgggagccctgtcagcaatgagtaatcaacagctggaggacctcattaatcaaggaagagaaaaagttgtagaagcaacaaacagtgtgacagcagtgaggattcaacctcttgaggatataatttcagctgtatggaaggagaacatgaatctctcagaggcccaagtacaggcgttagcattaagtagacaagccagccaggagcttgatgttaaacgaagagaagcaatatgacttatcaacaagcaacactgggtcacctcatgatgccaaagcccccaaatttgatcatgaatccttctaactaccagcagattgatatgagaggaatgtatcagccagtggctggtggtatgcagccaccaccattacagcgtgcaccacccccaatgagaagcaaaaatccaggaccttcccaagggaaatcaatgtgattttgcactaaaagcttaatggattgttaaaatcatagaaagatcttttatttttttaggaatcaatgacttaacagaactcaactgtataaatagtttggtccccttaaatgccaatcttccatattagttttacttttttttttttaaatagggcataccatttcttcctgacatttgtcagtgatgttgcctagaatcttcttacacacgctgagtacagaagatatttcaaattgttttcagtgaaaacaagtccttccataatagtaacaactccacagatttcctctctaaatttttatgcctgcttttagcaaccataaaattgtcataaaattaataaatttaggaaagaataaagatttatatattcattctttacatataaaaacacacagctgagttcttagagttgattcctcaagttatgaaatacttttgtacttaatccatttcttgattaaagtgattgaaatggttttaatgttcttttgactgaagtctgaaactgggctcctgctttattgtctctgtgactgaaagttagaaactgagggttatctttgacacagaattgtgtgcaatattcttaaatactactgctctaaaagttggagaagtcttgcagttatcttagcattgtataaacagccttaagtatagcctaagaagagaattcctttttcttctttagtccttctgccattttttattttcagttatatgtgctgaaataattactggtaaaatttcagggttgtggattatcttccacacatgaattttctctctcctggcacgaatataaagcacatctcttaactgcatggtgccagtgctaatgcttcatcctgttgctggcagtgggatgtggacttagaaaatcaagttctagcattttagtaggttaacactgaagttgtggttgttaggttcacaccctgttttataaacaacatcaaaatggcagaaccattgctgactttaggttcacatgaggaatgtacttttaacaattcccagtactatcagtattgtgaaataattcctctgaaagataagaatcactggcttctatgcgcttcttttctctcatcatcatgttcttttaccccagtttccttacatttttttaaattgtttcagagtttgttttttttttagtttagattgtgaggcaattattaaatcaaaattaattcatccaatacccctttactagaagttttactagaaaatgtattacattttattttttcttaatccagttctgcaaaaatgacctataaatttattcatgtacaattttggttacttgaattgttaaagaaaacattgtttttgactatgggagtcaactcaacatggcagaaccatttttgagatgatgatacaacaggtagtgaaacagcttaagaattccaaaaaaaaaaaaaaaaaaaaaaaaaaagaaaactgggtttgggctttgctttaggtatcactggattagaatgagtttaacattagctaaaactgctttgagttgtttggatgattaagagattgccatttttatcttggaagaactagtggtaaaacatccaagagcactaggattgtgatacagaatttgtgaggtttggtggatccacgcccctctcccccactttcccatgatgaaatatcactaataaatcctgtatatttagatattatgctagccatgtaatcagatttatttaattgggtggggcaggtgtgtatttactttagaaaaaatgaaaaagacaagatttatgagaaatatttgaaggcagtacactctggccaactgttaccagttggtatttctacaagttcagaatattttaaacctgatttactagacctgggaattttcaacatggtctaattatttactcaaagacatagatgtgaaaattttaggcaaccttctaaatctttttcaccatggatgaaactataacttaaagaataatacttagaagggttaattggaaatcagagtttgaaataaaacttggaccactttgtatacactcttctcacttgacattttagctatataatatgtactttgagtataacatcaagctttaacaaatatttaaagacaaaaaaatcacgtcagtaaaatactaaaaggctcatttttatatttgttttagatgttttaaatagttgcaatggattaaaaatgatgatttaaaatgttgcttgtaatacagttttgcctgctaaattctccacattttgtaacctgttttatttctttgggtgtaaagcgtttttgcttagtattgtgatattgtatatgttttgtcccagttgtatagtaatgtttcagtccatcatccagctttggctgctgaaatcatacagctgtgaagacttgcctttgtttctgttagactgcttttcagttctgtattgagtatcttaagtactgtagaaaagatgtcacttcttcctttaaggctgttttgtaatatatataaggactggaattgtgtttttaaagaaaagcattcaagtatgacaatatactatctgtgttttcaccattcaaagtgctgtttagtagttgaaacttaaactatttaatgtcatttaataaagtgaccaaaatgtg

SEQ ID NO: 362084 - DNA, 4744 bp, Homo sapiens
taatttctatatgatgggtttcttttgtaatcctatttgttttatgtgtttcaaaacgatattccaagagaatttataagcttctctacactgccaaaagtgtttatgtcacaagtaagattaaaactcctaatctagaaacttggttgatatagacaatttttgtgtctttaaccatatttcttttgatcaggtgtgggcaataatagtgaaggtggaagaggaaaggcaggtgcaaagcttttccaagattttcagatgttaagtagaatatggactcatccttggtgtttgcagctagactacattagcaaagaaaataagggttattttgatgaagacagtatggatgaatttatagcctcagattctgatgaaacctccatgagtttaagctccgatgattatacaaaaaagaagaaaaaagggaaaaaggggaaaaaagatagtagctcaagtggaagtggcagtgacaatgatgttgaagtgattaaggtctggaattcaagatctcggggaggtggtgaaggaaatgtggatgaaacaggaaacaatccttctgtttctttaaaactggaagaaagtaaagctacttcttcttctaatccaagcagcccagctccagactggtacaaagattttgttacagatgctgatgctgaggttttagagcattctgggaaaatggtacttctctttgaaattcttcgaatggcagaggaaattggggataaagtccttgttttcagccagtccctcatatctctggacttgattgaagattttcttgaattagctagtagggagaagacagaagataaagataaaccccttatttataaaggtgaggggaagtggcttcgaaacattgactattaccgtttagatggttccactactgcacagtcaaggaagaagtgggctgaagaatttaatgatgaaactaatgtgagaggacgattatttatcatttctactaaagcaggatctctaggaattaatctggtagctgctaatcgagtaattatattcgacgcttcttggaatccatcttatgacatccagagtatattcagagtttatcgctttggacaaactaagcctgtttatgtatataggttcttagctcagggaaccatggaagataagatttatgatcggcaagtaactaagcagtcactgtcttttcgagttgttgatcagcagcaggtggagcgtcattttactatgaatgagcttactgaactttatacttttgagccagacttattagatgaccctaattcagaaaagaagaagaagagggatactcccatgctgccaaaggataccatacttgcagagctccttcagatacataaagaacacattgtaggataccatgaacatgattctcttttggaccacaaagaagaagaagagttgactgaagaagaaagaaaagcagcttgggctgagtatgaagcagagaagaagggactgaccatgcgtttcaacataccaactgggaccaatttaccccctgtcagtttcaactctcaaactccttatattcctttcaatttgggagccctgtcagcaatgagtaatcaacagctggaggacctcattaatcaaggaagagaaaaagttgtagaagcaacaaacagtgtgacagcagtgaggattcaacctcttgaggatataatttcagctgtatggaaggagaacatgaatctctcagaggcccaagtacaggcgttagcattaagtagacaagccagccaggagcttgatgttaaacgaagagaagcaatctacaatgatgtattgacaaaacaacagatgttaatcagctgtgttcagcgaatacttatgaacagaaggctccagcagcagtacaatcagcagcaacagcaacaaatgacttatcaacaagcaacactgggtcacctcatgatgccaaagcccccaaatttgatcatgaatccttctaactaccagcagattgatatgagaggaatgtatcagccagtggctggtggtatgcagccaccaccattacagcgtgcaccacccccaatgagaagcaaaaatccaggaccttcccaagggaaatcaatgtgattttgcactaaaagcttaatggattgttaaaatcatagaaagatcttttatttttttaggaatcaatgacttaacagaactcaactgtataaatagtttggtccccttaaatgccaatcttccatattagttttacttttttttttttaaatagggcataccatttcttcctgacatttgtcagtgatgttgcctagaatcttcttacacacgctgagtacagaagatatttcaaattgttttcagtgaaaacaagtccttccataatagtaacaactccacagatttcctctctaaatttttatgcctgcttttagcaaccataaaattgtcataaaattaataaatttaggaaagaataaagatttatatattcattctttacatataaaaacacacagctgagttcttagagttgattcctcaagttatgaaatacttttgtacttaatccatttcttgattaaagtgattgaaatggttttaatgttcttttgactgaagtctgaaactgggctcctgctttattgtctctgtgactgaaagttagaaactgagggttatctttgacacagaattgtgtgcaatattcttaaatactactgctctaaaagttggagaagtcttgcagttatcttagcattgtataaacagccttaagtatagcctaagaagagaattcctttttcttctttagtccttctgccattttttattttcagttatatgtgctgaaataattactggtaaaatttcagggttgtggattatcttccacacatgaattttctctctcctggcacgaatataaagcacatctcttaactgcatggtgccagtgctaatgcttcatcctgttgctggcagtgggatgtggacttagaaaatcaagttctagcattttagtaggttaacactgaagttgtggttgttaggttcacaccctgttttataaacaacatcaaaatggcagaaccattgctgactttaggttcacatgaggaatgtacttttaacaattcccagtactatcagtattgtgaaataattcctctgaaagataagaatcactggcttctatgcgcttcttttctctcatcatcatgttcttttaccccagtttccttacatttttttaaattgtttcagagtttgttttttttttagtttagattgtgaggcaattattaaatcaaaattaattcatccaatacccctttactagaagttttactagaaaatgtattacattttattttttcttaatccagttctgcaaaaatgacctataaatttattcatgtacaattttggttacttgaattgttaaagaaaacattgtttttgactatgggagtcaactcaacatggcagaaccatttttgagatgatgatacaacaggtagtgaaacagcttaagaattccaaaaaaaaaaaaaaaaaaaaaaaaaaagaaaactgggtttgggctttgctttaggtatcactggattagaatgagtttaacattagctaaaactgctttgagttgtttggatgattaagagattgccatttttatcttggaagaactagtggtaaaacatccaagagcactaggattgtgatacagaatttgtgaggtttggtggatccacgcccctctcccccactttcccatgatgaaatatcactaataaatcctgtatatttagatattatgctagccatgtaatcagatttatttaattgggtggggcaggtgtgtatttactttagaaaaaatgaaaaagacaagatttatgagaaatatttgaaggcagtacactctggccaactgttaccagttggtatttctacaagttcagaatattttaaacctgatttactagacctgggaattttcaacatggtctaattatttactcaaagacatagatgtgaaaattttaggcaaccttctaaatctttttcaccatggatgaaactataacttaaagaataatacttagaagggttaattggaaatcagagtttgaaataaaacttggaccactttgtatacactcttctcacttgacattttagctatataatatgtactttgagtataacatcaagctttaacaaatatttaaagacaaaaaaatcacgtcagtaaaatactaaaaggctcatttttatatttgttttagatgttttaaatagttgcaatggattaaaaatgatgatttaaaatgttgcttgtaatacagttttgcctgctaaattctccacattttgtaacctgttttatttctttgggtgtaaagcgtttttgcttagtattgtgatattgtatatgttttgtcccagttgtatagtaatgtttcagtccatcatccagctttggctgctgaaatcatacagctgtgaagacttgcctttgtttctgttagactgcttttcagttctgtattgagtatcttaagtactgtagaaaagatgtcacttcttcctttaaggctgttttgtaatatatataaggactggaattgtgtttttaaagaaaagcattcaagtatgacaatatactatctgtgttttcaccattcaaagtgctgtttagtagttgaaacttaaactatttaatgtcatttaataaagtgaccaaaatgtg

SEQ ID NO: 362085 - DNA, 6884 bp, Homo sapiens
ctgagcctcggcccaacaaaatggcggcggcagcggtgtcgctttgtttccgcggctcctgcggcggtggcagtggtagcggcctttgagctgtggggaggttccagcagcagctacagtgacgactaagactccagtgcatttctatcgtaaccgggcgcgggggagcgcagatcggcgcccagcaatcacagaagccgacaaggcgttcaagcgaaaacatgaccgctgagcccatgagtgaaagcaagttgaatacattggtgcagaagcttcatgacttccttgcacactcatcagaagaatctgaagaaacaagttctcctccacgacttgcaatgaatcaaaacacagataaaatcagtggttctggaagtaactctgatatgatggaaaacagcaaggaagagggaactagctcttcagaaaaatccaagtcttcaggatcgtcacgatcaaagaggaaaccttcaattgtaacaaagtatgtagaatcagatgatgaaaaacctttggatgatgaaactgtaaatgaagatgcgtctaatgaaaattcagaaaatgatattactatgcagagcttgccaaaaggtacagtgattgtacagccagagccagtgctgaatgaagacaaagatgattttaaagggcctgaatttagaagcagaagtaaaatgaaaactgaaaatctcaaaaaacgcggagaagatgggcttcatgggattgtgagctgcactgcttgtggacaacaggtcaatcattttcaaaaagattccatttatagacacccttcattgcaagttcttatttgtaagaattgctttaagtattacatgagtgatgatattagccgtgactcagatggaatggatgaacaatgtaggtggtgtgcggaaggtggaaacttgatttgttgtgacttttgccataatgctttctgcaagaaatgcattctacgcaaccttggtcgaaaggagttgtccacaataatggatgaaaacaaccaatggtattgctacatttgtcacccagagcctttgttggacttggtcactgcatgtaacagcgtatttgagaatttagaacagttgttgcagcaaaataagaagaagataaaagttgacagtgaaaagagtaataaagtatatgaacatacatccagattttctccaaagaagactagttcaaattgtaatggagaagaaaagaaattagatgattcctgttctggctctgtaacctactcttattccgcactaattgtgcccaaagagatgattaagaaggcaaaaaaactgattgagaccacagccaacatgaactccagttatgttaaatttttaaagcaggcaacagataattcagaaatcagttctgctacaaaattacgtcagcttaaggcttttaagtctgtgttggctgatattaagaaggctcatcttgcattggaagaagacttaaattccgagtttcgagcgatggatgctgtaaacaaagagaaaaataccaaagagcataaagtcatagatgctaagtttgaaacaaaagcacgaaaaggagaaaaaccttgtgctttggaaaagaaggatatttcaaagtcagaagctaaactttcaagaaaacaggtagatagtgagcacatgcatcagaatgttccaacagaggaacaaagaacaaataaaagtaccggtggtgaacataagaaatctgatagaaaagaagaacctcaatatgaacctgccaacacttctgaagatttagacatggatattgtgtctgttccttcctcagttccagaagacatttttgagaatcttgagactgctatggaagttcagagttcagttgatcatcaaggggatggcagcagtggaactgaacaagaagtggagagttcatctgtaaaattaaatatttcttcaaaagacaacagaggaggtattaaatcaaaaactacagctaaagtaacaaaagaattatatgttaaactcactcctgtttccctttctaattccccaattaaaggtgctgattgtcaggaagttccacaagataaagatggctataaaagttgtggtctgaaccccaagttagagaaatgtggacttggacaggaaaacagtgataatgagcatttggttgaaaatgaagtttcattacttttagaggaatctgatcttcgaagatccccacgtgtaaagactacacccttgaggcgaccgacagaaactaaccctgtaacatctaattcagatgaagaatgtaatgaaacagttaaggagaaacaaaaactatcagttccagtgagaaaaaaggataagcgtaattcttctgacagtgctatagataatcctaagcctaataaattgccaaaatctaagcaatcagagactgtggatcaaaattcagattctgatgaaatgctagcaatcctcaaagaggtgagcaggatgagtcacagttcttcttcagatactgatattaatgaaattcatacaaaccataagactttgtatgatttaaagactcaggcggggaaagatgataaaggaaaaaggaaacgaaaaagttctacatctggctcagattttgatactaaaaagggcaaatcagctaagagctctataatttctaaaaagaaacgacaaacccagtctgagtcttctaattatgactcagaattagaaaaagagataaagagcatgagtaaaattggtgctgccagaaccaccaaaaaaagaattccaaatacaaaagattttgactcttctgaagatgagaaacacagcaaaaaaggaatggataatcaagggcacaaaaatttgaagacctcacaagaaggatcatctgatgatgctgaaagaaaacaagagagagagactttctcttcagcagaaggcacagttgataaagacacgaccatcatggaattaagagatcgacttcctaagaagcagcaagcaagtgcttccactgatggtgtcgataagctttctgggaaagagcagagttttacttctttggaagttagaaaagttgctgaaactaaagaaaagagcaagcatctcaaaaccaaaacatgtaaaaaagtacaggatggcttatctgatattgcagagaaattcctaaagaaagaccagagcgatgaaacttctgaagatgataaaaagcagagcaaaaagggaactgaagaaaaaaagaaaccttcagactttaagaaaaaagtaattaaaatggaacaacagtatgaatcttcatctgatggcactgaaaagttacctgagcgagaagaaatttgtcattttcctaagggcataaaacaaattaagaatggaacaactgatggagaaaagaaaagtaaaaaaataagagataaaacttctaaaaagaaggatgaattatctgattatgctgagaagtcaacagggaaaggagatagttgtgactcttcagaggataaaaagagtaagaatggagcatatggtagagagaagaaaaggtgcaagttgcttggaaagagttcaaggaagagacaagattgttcatcatctgatactgagaaatattccatgaaagaagatggttgtaactcttctgataagagactgaaaagaatagaattgagggaaagaagaaatttaagttcaaagagaaatactaaggaaatacaaagtggctcatcatcatctgatgctgaggaaagttctgaagataataaaaagaagaagcaaagaacttcatctaaaaagaaggcagtcattgtcaaggagaaaaagagaaactccctaagaacaagcactaaaaggaagcaagctgacattacatcctcatcttcttctgatatagaagatgatgatcagaattctataggtgagggaagcagcgatgaacagaaaattaagcctgtgactgaaaatttagtgctgtcttcacatactggattttgccaatcttcaggagatgaagccttatctaaatcagtgcctgtcacagtggatgatgatgatgacgacaatgatcctgagaatagaattgccaagaagatgcttttagaagaaattaaagccaatctttcctctgatgaggatggatcttcagatgatgagccagaagaagggaaaaaaagaactggaaaacaaaatgaagaaaacccaggagatgaggaagcaaaaaatcaagtcaattctgaatcagattcagattctgaagaatctaagaagccaagatacagacataggcttttgcggcacaaattgactgtgagtgacggagaatctggagaagaaaaaaagacaaagcctaaagagcataaagaagtcaaaggcagaaacagaagaaaggtgagcagtgaagattcagaagattctgattttcaggaatcaggagttagtgaagaagttagtgaatccgaagatgaacagcggcccagaacaaggtctgcaaagaaagcagagttggaagaaaatcagcggagctataaacagaaaaagaaaaggcgacgtattaaggttcaagaagattcatccagtgaaaacaagagtaattctgaggaagaagaggaggaaaaagaagaggaggaggaagaggaggaggaggaggaagaggaggaggaagatgaaaatgatgattccaagtctcctggaaaaggcagaaagaaaattcggaagattcttaaagatgataaactgagaacagaaacacaaaatgctcttaaggaagaggaagagagacgaaaacgtattgctgagagggagcgtgagcgagaaaaattgagagaggtgatagaaattgaagatgcttcacccaccaagtgtccaataacaaccaagttggttttagatgaagatgaagaaaccaaagaacctttagtgcaggttcatagaaatatggttatcaaattgaaaccccatcaagtagatggtgttcagtttatgtgggattgctgctgtgagtctgtgaaaaaaacaaagaaatctccaggttcaggatgcattcttgcccactgtatgggccttggtaagactttacaggtggtaagttttcttcatacagttcttttgtgtgacaaactggatttcagcacggcgttagtggtttgtcctcttaatactgctttgaattggatgaatgaatttgagaagtggcaagagggattaaaagatgatgagaagcttgaggtttctgaattagcaactgtgaaacgtcctcaggagagaagctacatgctgcagaggtggcaagaagatggtggtgttatgatcataggctatgagatgtatagaaatcttgctcaaggaaggaatgtgaagagtcggaaacttaaagaaatatttaacaaagctttggttgatccaggccctgattttgttgtttgtgatgaaggccatattctaaaaaatgaagcatctgctgtttctaaagctatgaattctatacgatcaaggaggaggattattttaacaggaacaccacttcaaaataacctaattgagtatcattgtatggttaattttatcaaggaaaatttacttggatccattaaggagttcaggaatagatttataaatccaattcaaaatggtcagtgtgcagattctaccatggtagatgtcagagtgatgaaaaaacgtgctcacattctctatgagatgttagctggatgtgttcagaggaaagattatacagcattaacaaaattcttgcctccaaaacacgaatatgtgttagctgtgagaatgacttctattcagtgcaagctctatcagtactacttagatcacttaacaggtgtgggcaataatagtgaaggtggaagaggaaaggcaggtgcaaagcttttccaagattttcagatgttaagtagaatatggactcatccttggtgtttgcagctagactacattagcaaagaaaataagggttattttgatgaagacagtatggatgaatttatagcctcagattctgatgaaacctccatgagtttaagctccgatgattatacaaaaaagaagaaaaaagggaaaaaggggaaaaaagatagtagctcaagtggaagtggcagtgacaatgatgttgaagtgattaaggtctggaattcaagatctcggggaggtggtgaaggaaatgtggatgaaacaggaaacaatccttctgtttctttaaaactggaagaaagtaaagctacttcttcttctaatccaagcagcccagctccagactggtacaaagattttgttacagatgctgatgctgaggttttagagcattctgggaaaatggtacttctctttgaaattcttcgaatggcagaggaaattggggataaagtccttgttttcagccagtccctcatatctctggacttgattgaagattttcttgaattagctagtagggagaagacagaagataaagataaaccccttatttataaaggtgagctacaaatatttctgtgtcgtaattttaaaaatactgatttaaacataccatacaaacattttagcaacaaaagaaacaaaactacccagtctcacaactctatcatatcaaaatttttttgcaatgtctatttgtccttatccatatatatgtatagtctttttcaaaataaaattgtattgtttatatttgaggtttacaacatggtgttatgggatacatatagatagtaaaatggctactgtagtgaagcagatgaacatatctatcatctcacatagttttttttggtgacaagagcagctaatatcaacttaagaaaaattcctaatacagcagtctttgttgttgaaattgttggataaattaaaactttttggtttctaaagcagttttattgagagataattcacatcctgtacaattcacccatttaaagt

SEQ ID NO: 362086 - DNA, 4383 bp, Homo sapiens
ctgagcctcggcccaacaaaatggcggcggcagcggtgtcgctttgtttccgcggctcctgcggcggtggcagtggtagcggcctttgagctgtggggaggttccagcagcagctacagtgacgactaagactccagtgcatttctatcgtaaccgggcgcgggggagcgcagatcggcgcccagcaatcacagaagccgacaaggcgttcaagcgaaaacatgaccgctgagcccatgagtgaaagcaagttgaatacattggtgcagaagcttcatgacttccttgcacactcatcagaagaatctgaagaaacaagttctcctccacgacttgcaatgaatcaaaacacagataaaatcagtggttctggaagtaactctgatatgatggaaaacagcaaggaagagggaactagctcttcagaaaaatccaagtcttcaggatcgtcacgatcaaagaggaaaccttcaattgtaacaaagtatgtagaatcagatgatgaaaaacctttggatgatgaaactgtaaatgaagatgcgtctaatgaaaattcagaaaatgatattactatgcagagcttgccaaaaggtacagtgattgtacagccagagccagtgctgaatgaagacaaagatgattttaaagggcctgaatttagaagcagaagtaaaatgaaaactgaaaatctcaaaaaacgcggagaagatgggcttcatgggattgtgagctgcactgcttgtggacaacaggtcaatcattttcaaaaagattccatttatagacacccttcattgcaagttcttatttgtaagaattgctttaagtattacatgagtgatgatattagccgtgactcagatggaatggatgaacaatgtaggtggtgtgcggaaggtggaaacttgatttgttgtgacttttgccataatgctttctgcaagaaatgcattctacgcaaccttggtcgaaaggagttgtccacaataatggatgaaaacaaccaatggtattgctacatttgtcacccagagcctttgttggacttggtcactgcatgtaacagcgtatttgagaatttagaacagttgttgcagcaaaataagaagaagataaaagttgacagtgaaaagagtaataaagtatatgaacatacatccagattttctccaaagaagactagttcaaattgtaatggagaagaaaagaaattagatgattcctgttctggctctgtaacctactcttattccgcactaattgtgcccaaagagatgattaagaaggcaaaaaaactgattgagaccacagccaacatgaactccagttatgttaaatttttaaagcaggcaacagataattcagaaatcagttctgctacaaaattacgtcagcttaaggcttttaagtctgtgttggctgatattaagaaggctcatcttgcattggaagaagacttaaattccgagtttcgagcgatggatgctgtaaacaaagagaaaaataccaaagagcataaagtcatagatgctaagtttgaaacaaaagcacgaaaaggagaaaaaccttgtgctttggaaaagaaggatatttcaaagtcagaagctaaactttcaagaaaacaggtagatagtgagcacatgcatcagaatgttccaacagaggaacaaagaacaaataaaagtaccggtggtgaacataagaaatctgatagaaaagaagaacctcaatatgaacctgccaacacttctgaagatttagacatggatattgtgtctgttccttcctcagttccagaagacatttttgagaatcttgagactgctatggaagttcagagttcagttgatcatcaaggggatggcagcagtggaactgaacaagaagtggagagttcatctgtaaaattaaatatttcttcaaaagacaacagaggaggtattaaatcaaaaactacagctaaagtaacaaaagaattatatgttaaactcactcctgtttccctttctaattccccaattaaaggtgctgattgtcaggaagttccacaagataaagatggctataaaagttgtggtctgaaccccaagttagagaaatgtggacttggacaggaaaacagtgataatgagcatttggttgaaaatgaagtttcattacttttagaggaatctgatcttcgaagatccccacgtgtaaagactacacccttgaggcgaccgacagaaactaaccctgtaacatctaattcagatgaagaatgtaatgaaacagttaaggagaaacaaaaactatcagttccagtgagaaaaaaggataagcgtaattcttctgacagtgctatagataatcctaagcctaataaattgccaaaatctaagcaatcagagactgtggatcaaaattcagattctgatgaaatgctagcaatcctcaaagaggtgagcaggatgagtcacagttcttcttcagatactgatattaatgaaattcatacaaaccataagactttgtatgatttaaagactcaggcggggaaagatgataaaggaaaaaggaaacgaaaaagttctacatctggctcagattttgatactaaaaagggcaaatcagctaagagctctataatttctaaaaagaaacgacaaacccagtctgagtcttctaattatgactcagaattagaaaaagagataaagagcatgagtaaaattggtgctgccagaaccaccaaaaaaagaattccaaatacaaaagattttgactcttctgaagatgagaaacacagcaaaaaaggaatggataatcaagggcacaaaaatttgaagacctcacaagaaggatcatctgatgatgctgaaagaaaacaagagagagagactttctcttcagcagaaggcacagttgataaagacacgaccatcatggaattaagagatcgacttcctaagaagcagcaagcaagtgcttccactgatggtgtcgataagctttctgggaaagagcagagttttacttctttggaagttagaaaagttgctgaaactaaagaaaagagcaagcatctcaaaaccaaaacatgtaaaaaagtacaggatggcttatctgatattgcagagaaattcctaaagaaagaccagagcgatgaaacttctgaagatgataaaaagcagagcaaaaaaaaaaaaaaaaaaaaaagaaaactgggtttgggctttgctttaggtatcactggattagaatgagtttaacattagctaaaactgctttgagttgtttggatgattaagagattgccatttttatcttggaagaactagtggtaaaacatccaagagcactaggattgtgatacagaatttgtgaggtttggtggatccacgcccctctcccccactttcccatgatgaaatatcactaataaatcctgtatatttagatattatgctagccatgtaatcagatttatttaattgggtggggcaggtgtgtatttactttagaaaaaatgaaaaagacaagatttatgagaaatatttgaaggcagtacactctggccaactgttaccagttggtatttctacaagttcagaatattttaaacctgatttactagacctgggaattttcaacatggtctaattatttactcaaagacatagatgtgaaaattttaggcaaccttctaaatctttttcaccatggatgaaactataacttaaagaataatacttagaagggttaattggaaatcagagtttgaaataaaacttggaccactttgtatacactcttctcacttgacattttagctatataatatgtactttgagtataacatcaagctttaacaaatatttaaagacaaaaaaatcacgtcagtaaaatactaaaaggctcatttttatatttgttttagatgttttaaatagttgcaatggattaaaaatgatgatttaaaatgttgcttgtaatacagttttgcctgctaaattctccacattttgtaacctgttttatttctttgggtgtaaagcgtttttgcttagtattgtgatattgtatatgttttgtcccagttgtatagtaatgtttcagtccatcatccagctttggctgctgaaatcatacagctgtgaagacttgcctttgtttctgttagactgcttttcagttctgtattgagtatcttaagtactgtagaaaagatgtcacttcttcctttaaggctgttttgtaatatatataaggactggaattgtgtttttaaagaaaagcattcaagtatgacaatatactatctgtgttttcaccattcaaagtgctgtttagtagttgaaacttaaactatttaatgtcatttaataaagtgaccaaaatgtg

SEQ ID NO: 362087 - DNA, 6047 bp, Homo sapiens
ctgagcctcggcccaacaaaatggcggcggcagcggtgtcgctttgtttccgcggctcctgcggcggtggcagtggtagcggcctttgagctgtggggaggttccagcagcagctacagtgacgactaagactccagtgcatttctatcgtaaccgggcgcgggggagcgcagatcggcgcccagcaatcacagaagccgacaaggcgttcaagcgaaaacatgaccgctgagcccatgagtgaaagcaagttgaatacattggtgcagaagcttcatgacttccttgcacactcatcagaagaatctgaagaaacaagttctcctccacgacttgcaatgaatcaaaacacagataaaatcagtggttctggaagtaactctgatatgatggaaaacagcaaggaagagggaactagctcttcagaaaaatccaagtcttcaggatcgtcacgatcaaagaggaaaccttcaattgtaacaaagtatgtagaatcagatgatgaaaaacctttggatgatgaaactgtaaatgaagatgcgtctaatgaaaattcagaaaatgatattactatgcagagcttgccaaaaggtacagtgattgtacagccagagccagtgctgaatgaagacaaagatgattttaaagggcctgaatttagaagcagaagtaaaatgaaaactgaaaatctcaaaaaacgcggagaagatgggcttcatgggattgtgagctgcactgcttgtggacaacaggtcaatcattttcaaaaagattccatttatagacacccttcattgcaagttcttatttgtaagaattgctttaagtattacatgagtgatgatattagccgtgactcagatggaatggatgaacaatgtaggtggtgtgcggaaggtggaaacttgatttgttgtgacttttgccataatgctttctgcaagaaatgcattctacgcaaccttggtcgaaaggagttgtccacaataatggatgaaaacaaccaatggtattgctacatttgtcacccagagcctttgttggacttggtcactgcatgtaacagcgtatttgagaatttagaacagttgttgcagcaaaataagaagaagataaaagttgacagtgaaaagagtaataaagtatatgaacatacatccagattttctccaaagaagactagttcaaattgtaatggagaagaaaagaaattagatgattcctgttctggctctgtaacctactcttattccgcactaattgtgcccaaagagatgattaagaaggcaaaaaaactgattgagaccacagccaacatgaactccagttatgttaaatttttaaagcaggcaacagataattcagaaatcagttctgctacaaaattacgtcagcttaaggcttttaagtctgtgttggctgatattaagaaggctcatcttgcattggaagaagacttaaattccgagtttcgagcgatggatgctgtaaacaaagagaaaaataccaaagagcataaagtcatagatgctaagtttgaaacaaaagcacgaaaaggagaaaaaccttgtgctttggaaaagaaggatatttcaaagtcagaagctaaactttcaagaaaacaggtagatagtgagcacatgcatcagaatgttccaacagaggaacaaagaacaaataaaagtaccggtggtgaacataagaaatctgatagaaaagaagaacctcaatatgaacctgccaacacttctgaagatttagacatggatattgtgtctgttccttcctcagttccagaagacatttttgagaatcttgagactgctatggaagttcagagttcagttgatcatcaaggggatggcagcagtggaactgaacaagaagtggagagttcatctgtaaaattaaatatttcttcaaaagacaacagaggaggtattaaatcaaaaactacagctaaagtaacaaaagaattatatgttaaactcactcctgtttccctttctaattccccaattaaaggtgctgattgtcaggaagttccacaagataaagatggctataaaagttgtggtctgaaccccaagttagagaaatgtggacttggacaggaaaacagtgataatgagcatttggttgaaaatgaagtttcattacttttagaggaatctgatcttcgaagatccccacgtgtaaagactacacccttgaggcgaccgacagaaactaaccctgtaacatctaattcagatgaagaatgtaatgaaacagttaaggagaaacaaaaactatcagttccagtgagaaaaaaggataagcgtaattcttctgacagtgctatagataatcctaagcctaataaattgccaaaatctaagcaatcagagactgtggatcaaaattcagattctgatgaaatgctagcaatcctcaaagaggtgagcaggatgagtcacagttcttcttcagatactgatattaatgaaattcatacaaaccataagactttgtatgatttaaagactcaggcggggaaagatgataaaggaaaaaggaaacgaaaaagttctacatctggctcagattttgatactaaaaagggcaaatcagctaagagctctataatttctaaaaagaaacgacaaacccagtctgagtcttctaattatgactcagaattagaaaaagagataaagagcatgagtaaaattggtgctgccagaaccaccaaaaaaagaattccaaatacaaaagattttgactcttctgaagatgagaaacacagcaaaaaaggaatggataatcaagggcacaaaaatttgaagacctcacaagaaggatcatctgatgatgctgaaagaaaacaagagagagagactttctcttcagcagaaggcacagttgataaagacacgaccatcatggaattaagagatcgacttcctaagaagcagcaagcaagtgcttccactgatggtgtcgataagctttctgggaaagagcagagttttacttctttggaagttagaaaagttgctgaaactaaagaaaagagcaagcatctcaaaaccaaaacatgtaaaaaagtacaggatggcttatctgatattgcagagaaattcctaaagaaagaccagagcgatgaaacttctgaagatgataaaaagcagagcaaaaagggaactgaagaaaaaaagaaaccttcagactttaagaaaaaagtaattaaaatggaacaacagtatgaatcttcatctgatggcactgaaaagttacctgagcgagaagaaatttgtcattttcctaagggcataaaacaaattaagaatggaacaactgatggagaaaagaaaagtaaaaaaataagagataaaacttctaaaaagaaggatgaattatctgattatgctgagaagtcaacagggaaaggagatagttgtgactcttcagaggataaaaagagtaagaatggagcatatggtagagagaagaaaaggtgcaagttgcttggaaagagttcaaggaagagacaagattgttcatcatctgatactgagaaatattccatgaaagaagatggttgtaactcttctgataagagactgaaaagaatagaattgagggaaagaagaaatttaagttcaaagagaaatactaaggaaatacaaagtggctcatcatcatctgatgctgaggaaagttctgaagataataaaaagaagaagcaaagaacttcatctaaaaagaaggcagtcattgtcaaggagaaaaagagaaactccctaagaacaagcactaaaaggaagcaagctgacattacatcctcatcttcttctgatatagaagatgatgatcagaattctataggtgagggaagcagcgatgaacagaaaattaagcctgtgactgaaaatttagtgctgtcttcacatactggattttgccaatcttcaggagatgaagccttatctaaatcagtgcctgtcacagtggatgatgatgatgacgacaatgatcctgagaatagaattgccaagaagatgcttttagaagaaattaaagccaatctttcctctgatgaggatggatcttcagatgatgagccagaagaagggaaaaaaagaactggaaaacaaaatgaagaaaacccaggagatgaggaagcaaaaaatcaagtcaattctgaatcagattcagattctgaagaatctaagaagccaagatacagacataggcttttgcggcacaaattgactgtgagtgacggagaatctggagaagaaaaaaagacaaagcctaaagagcataaagaagtcaaaggcagaaacagaagaaaggtgagcagtgaagattcagaagattctgattttcaggaatcaggagttagtgaagaagttagtgaatccgaagatgaacagcggcccagaacaaggtctgcaaagaaagcagagttggaagaaaatcagcggagctataaacagaaaaagaaaaggcgacgtattaaggttcaagaagattcatccagtgaaaacaagagtaattctgaggaagaagaggaggaaaaagaagaggaggaggaagaggaggaggaggaggaagaggaggaggaagatgaaaatgatgattccaagtctcctggaaaaggcagaaagaaaattcggaagattcttaaagatgataaactgagaacagaaacacaaaatgctcttaaggaagaggaagagagacgaaaacgtattgctgagagggagcgtgagcgagaaaaattgagagaggtgatagaaattgaagatgcttcacccaccaagtgtccaataacaaccaagttggttttagatgaagatgaagaaaccaaagaacctttagtgcaggttcatagaaatatggttatcaaattgaaaccccatcaagtagatggtgttcagtttatgtgggattgctgctgtgagtctgtgaaaaaaacaaagaaatctccaggttcaggatgcattcttgcccactgtatgggccttggtaagactttacaggtggtaagttttcttcatacagttcttttgtgtgacaaactggatttcagcacggcgttagtggtttgtcctcttaatactgctttgaattggatgaatgaatttgagaagtggcaagagggattaaaagatgatgagaagcttgaggtttctgaattagcaactgtgaaacgtcctcaggagagaagctacatgctgcagaggtggcaagaagatggtggtgttatgatcataggctatgagatgtatagaaatcttgctcaaggaaggaatgtgaagagtcggaaacttaaagaaatatttaacaaagctttggttgatccaggccctgattttgttgtttgtgatgaaggccatattctaaaaaatgaagcatctgctgtttctaaagctatgaattctatacgatcaaggaggaggattattttaacaggaacaccacttcaaaataacctaattgagtatcattgtatggttaattttatcaaggaaaatttacttggatccattaaggagttcaggaatagatttataaatccaattcaaaatggtcagtgtgcagattctaccatggtagatgtcagagtgatgaaaaaacgtgctcacattctctatgagatgttagctggatgtgttcagaggaaagattatacagcattaacaaaattcttgcctccaaaacacgaatatgtgttagctgtgagaatgacttctattcagtgcaagctctatcagtactacttagatcacttaacagttttgcatttgaataaaatgggtatgcttaaaagcataaaatatttctaattaaaacactgatgctgtcaaaattaaaatcaagaagcaaattgatgaaaaagatatacagcacatatgaataatgcccttaatttgtaaagagcttttatttcagaaaaattatgaatgtgaataaatccataaaagaagatatacaaaattccagagtatttttttaaaaagtatttacccacattaataataaaaggtgtataagtt

SEQ ID NO: 362088 - DNA, 5202 bp, Homo sapiens
ctgagcctcggcccaacaaaatggcggcggcagcggtgtcgctttgtttccgcggctcctgcggcggtggcagtggtagcggcctttgagctgtggggaggttccagcagcagctacagtgacgactaagactccagtgcatttctatcgtaaccgggcgcgggggagcgcagatcggcgcccagcaatcacagaagccgacaaggcgttcaagcgaaaacatgaccgctgagcccatgagtgaaagcaagttgaatacattggtgcagaagcttcatgacttccttgcacactcatcagaagaatctgaagaaacaagttctcctccacgacttgcaatgaatcaaaacacagataaaatcagtggttctggaagtaactctgatatgatggaaaacagcaaggaagagggaactagctcttcagaaaaatccaagtcttcaggatcgtcacgatcaaagaggaaaccttcaattgtaacaaagtatgtagaatcagatgatgaaaaacctttggatgatgaaactgtaaatgaagatgcgtctaatgaaaattcagaaaatgatattactatgcagagcttgccaaaaggtacagtgattgtacagccagagccagtgctgaatgaagacaaagatgattttaaagggcctgaatttagaagcagaagtaaaatgaaaactgaaaatctcaaaaaacgcggagaagatgggcttcatgggattgtgagctgcactgcttgtggacaacaggtcaatcattttcaaaaagattccatttatagacacccttcattgcaagttcttatttgtaagaattgctttaagtattacatgagtgatgatattagccgtgactcagatggaatggatgaacaatgtaggtggtgtgcggaaggtggaaacttgatttgttgtgacttttgccataatgctttctgcaagaaatgcattctacgcaaccttggtcgaaaggagttgtccacaataatggatgaaaacaaccaatggtattgctacatttgtcacccagagcctttgttggacttggtcactgcatgtaacagcgtatttgagaatttagaacagttgttgcagcaaaataagaagaagataaaagttgacagtgaaaagagtaataaagtatatgaacatacatccagattttctccaaagaagactagttcaaattgtaatggagaagaaaagaaattagatgattcctgttctggctctgtaacctactcttattccgcactaattgtgcccaaagagatgattaagaaggcaaaaaaactgattgagaccacagccaacatgaactccagttatgttaaatttttaaagcaggcaacagataattcagaaatcagttctgctacaaaattacgtcagcttaaggcttttaagtctgtgttggctgatattaagaaggctcatcttgcattggaagaagacttaaattccgagtttcgagcgatggatgctgtaaacaaagagaaaaataccaaagagcataaagtcatagatgctaagtttgaaacaaaagcacgaaaaggagaaaaaccttgtgctttggaaaagaaggatatttcaaagtcagaagctaaactttcaagaaaacaggtagatagtgagcacatgcatcagaatgttccaacagaggaacaaagaacaaataaaagtaccggtggtgaacataagaaatctgatagaaaagaagaacctcaatatgaacctgccaacacttctgaagatttagacatggatattgtgtctgttccttcctcagttccagaagacatttttgagaatcttgagactgctatggaagttcagagttcagttgatcatcaaggggatggcagcagtggaactgaacaagaagtggagagttcatctgtaaaattaaatatttcttcaaaagacaacagaggaggtattaaatcaaaaactacagctaaagtaacaaaagaattatatgttaaactcactcctgtttccctttctaattccccaattaaaggtgctgattgtcaggaagttccacaagataaagatggctataaaagttgtggtctgaaccccaagttagagaaatgtggacttggacaggaaaacagtgataatgagcatttggttgaaaatgaagtttcattacttttagaggaatctgatcttcgaagatccccacgtgtaaagactacacccttgaggcgaccgacagaaactaaccctgtaacatctaattcagatgaagaatgtaatgaaacagttaaggagaaacaaaaactatcagttccagtgagaaaaaaggataagcgtaattcttctgacagtgctatagataatcctaagcctaataaattgccaaaatctaagcaatcagagactgtggatcaaaattcagattctgatgaaatgctagcaatcctcaaagaggtgagcaggatgagtcacagttcttcttcagatactgatattaatgaaattcatacaaaccataagactttgtatgatttaaagactcaggcggggaaagatgataaaggaaaaaggaaacgaaaaagttctacatctggctcagattttgatactaaaaagggcaaatcagctaagagctctataatttctaaaaagaaacgacaaacccagtctgagtcttctaattatgactcagaattagaaaaagagataaagagcatgagtaaaattggtgctgccagaaccaccaaaaaaagaattccaaatacaaaagattttgactcttctgaagatgagaaacacagcaaaaaaggaatggataatcaagggcacaaaaatttgaagacctcacaagaaggatcatctgatgatgctgaaagaaaacaagagagagagactttctcttcagcagaaggcacagttgataaagacacgaccatcatggaattaagagatcgacttcctaagaagcagcaagcaagtgcttccactgatggtgtcgataagctttctgggaaagagcagagttttacttctttggaagttagaaaagttgctgaaactaaagaaaagagcaagcatctcaaaaccaaaacatgtaaaaaagtacaggatggcttatctgatattgcagagaaattcctaaagaaagaccagagcgatgaaacttctgaagatgataaaaagcagagcaaaaagggaactgaagaaaaaaagaaaccttcagactttaagaaaaaagtaattaaaatggaacaacagtatgaatcttcatctgatggcactgaaaagttacctgagcgagaagaaatttgtcattttcctaagggcataaaacaaattaagaatggaacaactgatggagaaaagaaaagtaaaaaaataagagataaaacttctaaaaagaaggatgaattatctgattatgctgagaagtcaacagggaaaggagatagttgtgactcttcagaggataaaaagagtaagaatggagcatatggtagagagaagaaaaggtgcaagttgcttggaaagagttcaaggaagagacaagattgttcatcatctgatactgagaaatattccatgaaagaagatggttgtaactcttctgataagagactgaaaagaatagaattgagggaaagaagaaatttaagttcaaagagaaatactaaggaaatacaaagtggctcatcatcatctgatgctgaggaaagttctgaagataataaaaagaagaagcaaagaacttcatctaaaaagaaggcagtcattgtcaaggagaaaaagagaaactccctaagaacaagcactaaaaggaagcaagctgacattacatcctcatcttcttctgatatagaagatgatgatcagaattctataggtgagggaagcagcgatgaacagaaaattaagcctgtgactgaaaatttagtgctgtcttcacatactggattttgccaatcttcaggagatgaagccttatctaaatcagtgcctgtcacagtggatgatgatgatgacgacaatgatcctgagaatagaattgccaagaagatgcttttagaagaaattaaagccaatctttcctctgatgaggatggatcttcagatgatgagccagaagaagggaaaaaaagaactggaaaacaaaatgaagaaaacccaggagatgaggaagcaaaaaatcaagtcaattctgaatcagattcagattctgaagaatctaagaagccaagatacagacataggcttttgcggcacaaattgactgtgagtgacggagaatctggagaagaaaaaaagacaaagcctaaagagcataaagaagtcaaaggcagaaacagaagaaaggtgagcagtgaagattcagaagattctgattttcaggaatcaggagttagtgaagaagttagtgaatccgaagatgaacagcggcccagaacaaggtctgcaaagaaagcagagttggaagaaaatcagcggagctataaacagaaaaagaaaaggcgacgtattaaggttcaagaagattcatccagtgaaaacaagagtaattctgaggaagaagaggaggaaaaagaagaggaggaggaagaggaggaggaggaggaagaggaggaggaagatgaaaatgatgattccaagtctcctggaaaaggcagaaagaaaattcggaagattcttaaagatgataaactgagaacagaaacacaaaatgctcttaaggaagaggaagagagacgaaaacgtattgctgagagggagcgtgagcgagaaaaattgagagaggtgatagaaattgaagatgcttcacccaccaagtgtccaataacaaccaagttggttttagatgaagatgaagaaaccaaagaacctttagtgcaggttcatagaaatatggttatcaaattgaaaccccatcaagtagatggtgttcagtttatgtgggattgctgctgtgagtctgtgaaaaaaacaaagaaatctccaggttcaggatgcattcttgcccactgtatgggccttggtaagactttacaggtaagagctgaagaatatgaaggtatcctgtttttgtggattcattaatatatattggattctattatgtttcaggcacagtcgtaggggctgaagataaagcagtgaacaagaataacaagatctgtctccaaggagcttatattctagtggaggagagagctgctaatca

SEQ ID NO: 362089 - DNA, 4216 bp, Homo sapiens
ctgagcctcggcccaacaaaatggcggcggcagcggtgtcgctttgtttccgcggctcctgcggcggtggcagtggtagcggcctttgagctgtggggaggttccagcagcagctacagtgacgactaagactccagtgcatttctatcgtaaccgggcgcgggggagcgcagatcggcgcccagcaatcacagaagccgacaaggcgttcaagcgaaaacatgaccgctgagcccatgagtgaaagcaagttgaatacattggtgcagaagcttcatgacttccttgcacactcatcagaagaatctgaagaaacaagttctcctccacgacttgcaatgaatcaaaacacagataaaatcagtggttctggaagtaactctgatatgatggaaaacagcaaggaagagggaactagctcttcagaaaaatccaagtcttcaggatcgtcacgatcaaagaggaaaccttcaattgtaacaaagtatgtagaatcagatgatgaaaaacctttggatgatgaaactgtaaatgaagatgcgtctaatgaaaattcagaaaatgatattactatgcagagcttgccaaaaggtacagtgattgtacagccagagccagtgctgaatgaagacaaagatgattttaaagggcctgaatttagaagcagaagtaaaatgaaaactgaaaatctcaaaaaacgcggagaagatgggcttcatgggattgtgagctgcactgcttgtggacaacaggtcaatcattttcaaaaagattccatttatagacacccttcattgcaagttcttatttgtaagaattgctttaagtattacatgagtgatgatattagccgtgactcagatggaatggatgaacaatgtaggtggtgtgcggaaggtggaaacttgatttgttgtgacttttgccataatgctttctgcaagaaatgcattctacgcaaccttggtcgaaaggagttgtccacaataatggatgaaaacaaccaatggtattgctacatttgtcacccagagcctttgttggacttggtcactgcatgtaacagcgtatttgagaatttagaacagttgttgcagcaaaataagaagaagataaaagttgacagtgaaaagagtaataaagtatatgaacatacatccagattttctccaaagaagactagttcaaattgtaatggagaagaaaagaaattagatgattcctgttctggctctgtaacctactcttattccgcactaattgtgcccaaagagatgattaagaaggcaaaaaaactgattgagaccacagccaacatgaactccagttatgttaaatttttaaagcaggcaacagataattcagaaatcagttctgctacaaaattacgtcagcttaaggcttttaagtctgtgttggctgatattaagaaggctcatcttgcattggaagaagacttaaattccgagtttcgagcgatggatgctgtaaacaaagagaaaaataccaaagagcataaagtcatagatgctaagtttgaaacaaaagcacgaaaaggagaaaaaccttgtgctttggaaaagaaggatatttcaaagtcagaagctaaactttcaagaaaacaggtagatagtgagcacatgcatcagaatgttccaacagaggaacaaagaacaaataaaagtaccggtggtgaacataagaaatctgatagaaaagaagaacctcaatatgaacctgccaacacttctgaagatttagacatggatattgtgtctgttccttcctcagttccagaagacatttttgagaatcttgagactgctatggaagttcagagttcagttgatcatcaaggggatggcagcagtggaactgaacaagaagtggagagttcatctgtaaaattaaatatttcttcaaaagacaacagaggaggtattaaatcaaaaactacagctaaagtaacaaaagaattatatgttaaactcactcctgtttccctttctaattccccaattaaaggtgctgattgtcaggaagttccacaagataaagatggctataaaagttgtggtctgaaccccaagttagagaaatgtggacttggacaggaaaacagtgataatgagcatttggttgaaaatgaagtttcattacttttagaggaatctgatcttcgaagatccccacgtgtaaagactacacccttgaggcgaccgacagaaactaaccctgtaacatctaattcagatgaagaatgtaatgaaacagttaaggagaaacaaaaactatcagttccagtgagaaaaaaggataagcgtaattcttctgacagtgctatagataatcctaagcctaataaattgccaaaatctaagcaatcagagactgtggatcaaaattcagattctgatgaaatgctagcaatcctcaaagaggtgagcaggatgagtcacagttcttcttcagatactgatattaatgaaattcatacaaaccataagactttgtatgatttaaagactcaggcggggaaagatgataaaggaaaaaggaaacgaaaaagttctacatctggctcagattttgatactaaaaagggcaaatcagctaagagctctataatttctaaaaagaaacgacaaacccagtctgagtcttctaattatgactcagaattagaaaaagagataaagagcatgagtaaaattggtgctgccagaaccaccaaaaaaagaattccaaatacaaaagattttgactcttctgaagatgagaaacacagcaaaaaaggaatggataatcaagggcacaaaaatttgaagacctcacaagaaggatcatctgatgatgctgaaagaaaacaagagagagagactttctcttcagcagaaggcacagttgataaagacacgaccatcatggaattaagagatcgacttcctaagaagcagcaagcaagtgcttccactgatggtgtcgataagctttctgggaaagagcagagttttacttctttggaagttagaaaagttgctgaaactaaagaaaagagcaagcatctcaaaaccaaaacatgtaaaaaagtacaggatggcttatctgatattgcagagaaattcctaaagaaagaccagagcgatgaaacttctgaagatgataaaaagcagagcaaaaagggaactgaagaaaaaaagaaaccttcagactttaagaaaaaagtaattaaaatggaacaacagtatgaatcttcatctgatggcactgaaaagttacctgagcgagaagaaatttgtcattttcctaagggcataaaacaaattaagaatggaacaactgatggagaaaagaaaagtaaaaaaataagagataaaacttctaaaaagaaggatgaattatctgattatgctgagaagtcaacagggaaaggagatagttgtgactcttcagaggataaaaagagtaagaatggagcatatggtagagagaagaaaaggtgcaagttgcttggaaagagttcaaggaagagacaagattgttcatcatctgatactgagaaatattccatgaaagaagatggttgtaactcttctgataagagactgaaaagaatagaattgagggaaagaagaaatttaagttcaaagagaaatactaaggaaatacaaagtggctcatcatcatctgatgctgaggaaagttctgaagataataaaaagaagaagcaaagaacttcatctaaaaagaaggcagtcattgtcaaggagaaaaagagaaactccctaagaacaagcactaaaaggaagcaagctgacattacatcctcatcttcttctgatatagaagatgatgatcagaattctataggtgagggaagcagcgatgaacagaaaattaagcctgtgactgaaaatttagtgctgtcttcacatactggattttgccaatcttcaggagatgaagccttatctaaatcagtgcctgtcacagtggatgatgatgatgacgacaatgatcctgagaataggtatgattccatctgtaaggactttaaaaagattataacacaccctaggcatgggcacaaacagcagcaacggaacagcaagcaggttgtaaaaaccaggagtgcctgccttagaaagactcgctcacagtcttcctgcaagtttgaaagaaaggccagaaaatgggctaaaactcagaaacctta

SEQ ID NO: 362090 - DNA, 266 bp, Homo sapiens
caagtggaagtggcagtgacaatgatgttgaagtgattaaggtctggaattcaagatctcggggaggtggtgaaggaaatgtggatgaaacaggaaacaatccttctgtttctttaaaactggaagaaagtgagtctaatgaatgttgcctttatcatggaacagtaatttggaaaatgtcatgtcgttagtccttttttcagtcacttacctgactaattgactcaaaggaatctttcctcaattgatgagtctaatcaagtact

SEQ ID NO: 362091 - DNA, 659 bp, Homo sapiens
ctggtttggaaattctggccgtttattgtttaagcaaaacaaagctataatattgtaagattgcttaatttattaaatttttttgtggatatttaaacgaaggtgacaatctgttttcttataggtggtaagttttcttcatacagttcttttgtgtgacaaactggatttcagcacggcgttagtggtttgtcctcttaatactgctttgaattggatgaatgaatttgagaagtggcaagagggattaaaagatgatgagaagcttgaggtaacttattttaaatgttttctattattaaaatagtcacatgaaattcatatagtaaactatttttaattttttttaatttttaatgttttttaaccagtgatgcatatttcagtgggaatatttaatattcacatgtttttagtagctacttaaaaaaatctttatttccccacaaaaggtttctgaattagcaactgtgaaacgtcctcaggagagaagctacatgctgcagaggtggcaagaagatggtggtgttatgatcataggctatgagatgtatagaaatcttgctcaaggaaggaatgtgaagagtcggaaacttaaagaaatatttaacaaagctttggttgatccaggtaaggtattaatagacagtgacataaag

SEQ ID NO: 362092 - DNA, 10224 bp, Homo sapiens
ctgagcctcggcccaacaaaatggcggcggcagcggtgtcgctttgtttccgcggctcctgcggcggtggcagtggtagcggcctttgagctgtggggaggttccagcagcagctacagtgacgactaagactccagtgcatttctatcgtaaccgggcgcgggggagcgcagatcggcgcccagcaatcacagaagccgacaaggcgttcaagcgaaaacatgaccgctgagcccatgagtgaaagcaagttgaatacattggtgcagaagcttcatgacttccttgcacactcatcagaagaatctgaagaaacaagttctcctccacgacttgcaatgaatcaaaacacagataaaatcagtggttctggaagtaactctgatatgatggaaaacagcaaggaagagggaactagctcttcagaaaaatccaagtcttcaggatcgtcacgatcaaagaggaaaccttcaattgtaacaaagtatgtagaatcagatgatgaaaaacctttggatgatgaaactgtaaatgaagatgcgtctaatgaaaattcagaaaatgatattactatgcagagcttgccaaaagaagatgggcttcatgggattgtgagctgcactgcttgtggacaacaggtcaatcattttcaaaaagattccatttatagacacccttcattgcaagttcttatttgtaagaattgctttaagtattacatgagtgatgatattagccgtgactcagatggaatggatgaacaatgtaggtggtgtgcggaaggtggaaacttgatttgttgtgacttttgccataatgctttctgcaagaaatgcattctacgcaaccttggtcgaaaggagttgtccacaataatggatgaaaacaaccaatggtattgctacatttgtcacccagagcctttgttggacttggtcactgcatgtaacagcgtatttgagaatttagaacagttgttgcagcaaaataagaagaagataaaagttgacagtgaaaagagtaataaagtatatgaacatacatccagattttctccaaagaagactagttcaaattgtaatggagaagaaaagaaattagatgattcctgttctggctctgtaacctactcttattccgcactaattgtgcccaaagagatgattaagaaggcaaaaaaactgattgagaccacagccaacatgaactccagttatgttaaatttttaaagcaggcaacagataattcagaaatcagttctgctacaaaattacgtcagcttaaggcttttaagtctgtgttggctgatattaagaaggctcatcttgcattggaagaagacttaaattccgagtttcgagcgatggatgctgtaaacaaagagaaaaataccaaagagcataaagtcatagatgctaagtttgaaacaaaagcacgaaaaggagaaaaaccttgtgctttggaaaagaaggatatttcaaagtcagaagctaaactttcaagaaaacaggtagatagtgagcacatgcatcagaatgttccaacagaggaacaaagaacaaataaaagtaccggtggtgaacataagaaatctgatagaaaagaagaacctcaatatgaacctgccaacacttctgaagatttagacatggatattgtgtctgttccttcctcagttccagaagacatttttgagaatcttgagactgctatggaagttcagagttcagttgatcatcaaggggatggcagcagtggaactgaacaagaagtggagagttcatctgtaaaattaaatatttcttcaaaagacaacagaggaggtattaaatcaaaaactacagctaaagtaacaaaagaattatatgttaaactcactcctgtttccctttctaattccccaattaaaggtgctgattgtcaggaagttccacaagataaagatggctataaaagttgtggtctgaaccccaagttagagaaatgtggacttggacaggaaaacagtgataatgagcatttggttgaaaatgaagtttcattacttttagaggaatctgatcttcgaagatccccacgtgtaaagactacacccttgaggcgaccgacagaaactaaccctgtaacatctaattcagatgaagaatgtaatgaaacagttaaggagaaacaaaaactatcagttccagtgagaaaaaaggataagcgtaattcttctgacagtgctatagataatcctaagcctaataaattgccaaaatctaagcaatcagagactgtggatcaaaattcagattctgatgaaatgctagcaatcctcaaagaggtgagcaggatgagtcacagttcttcttcagatactgatattaatgaaattcatacaaaccataagactttgtatgatttaaagactcaggcggggaaagatgataaaggaaaaaggaaacgaaaaagttctacatctggctcagattttgatactaaaaagggcaaatcagctaagagctctataatttctaaaaagaaacgacaaacccagtctgagtcttctaattatgactcagaattagaaaaagagataaagagcatgagtaaaattggtgctgccagaaccaccaaaaaaagaattccaaatacaaaagattttgactcttctgaagatgagaaacacagcaaaaaaggaatggataatcaagggcacaaaaatttgaagacctcacaagaaggatcatctgatgatgctgaaagaaaacaagagagagagactttctcttcagcagaaggcacagttgataaagacacgaccatcatggaattaagagatcgacttcctaagaagcagcaagcaagtgcttccactgatggtgtcgataagctttctgggaaagagcagagttttacttctttggaagttagaaaagttgctgaaactaaagaaaagagcaagcatctcaaaaccaaaacatgtaaaaaagtacaggatggcttatctgatattgcagagaaattcctaaagaaagaccagagcgatgaaacttctgaagatgataaaaagcagagcaaaaagggaactgaagaaaaaaagaaaccttcagactttaagaaaaaagtaattaaaatggaacaacagtatgaatcttcatctgatggcactgaaaagttacctgagcgagaagaaatttgtcattttcctaagggcataaaacaaattaagaatggaacaactgatggagaaaagaaaagtaaaaaaataagagataaaacttctaaaaagaaggatgaattatctgattatgctgagaagtcaacagggaaaggagatagttgtgactcttcagaggataaaaagagtaagaatggagcatatggtagagagaagaaaaggtgcaagttgcttggaaagagttcaaggaagagacaagattgttcatcatctgatactgagaaatattccatgaaagaagatggttgtaactcttctgataagagactgaaaagaatagaattgagggaaagaagaaatttaagttcaaagagaaatactaaggaaatacaaagtggctcatcatcatctgatgctgaggaaagttctgaagataataaaaagaagaagcaaagaacttcatctaaaaagaaggcagtcattgtcaaggagaaaaagagaaactccctaagaacaagcactaaaaggaagcaagctgacattacatcctcatcttcttctgatatagaagatgatgatcagaattctataggtgagggaagcagcgatgaacagaaaattaagcctgtgactgaaaatttagtgctgtcttcacatactggattttgccaatcttcaggagatgaagccttatctaaatcagtgcctgtcacagtggatgatgatgatgacgacaatgatcctgagaatagaattgccaagaagatgcttttagaagaaattaaagccaatctttcctctgatgaggatggatcttcagatgatgagccagaagaagggaaaaaaagaactggaaaacaaaatgaagaaaacccaggagatgaggaagcaaaaaatcaagtcaattctgaatcagattcagattctgaagaatctaagaagccaagatacagacataggcttttgcggcacaaattgactgtgagtgacggagaatctggagaagaaaaaaagacaaagcctaaagagcataaagaagtcaaaggcagaaacagaagaaaggtgagcagtgaagattcagaagattctgattttcaggaatcaggagttagtgaagaagttagtgaatccgaagatgaacagcggcccagaacaaggtctgcaaagaaagcagagttggaagaaaatcagcggagctataaacagaaaaagaaaaggcgacgtattaaggttcaagaagattcatccagtgaaaacaagagtaattctgaggaagaagaggaggaaaaagaagaggaggaggaagaggaggaggaggaggaagaggaggaggaagatgaaaatgatgattccaagtctcctggaaaaggcagaaagaaaattcggaagattcttaaagatgataaactgagaacagaaacacaaaatgctcttaaggaagaggaagagagacgaaaacgtattgctgagagggagcgtgagcgagaaaaattgagagaggtgatagaaattgaagatgcttcacccaccaagtgtccaataacaaccaagttggttttagatgaagatgaagaaaccaaagaacctttagtgcaggttcatagaaatatggttatcaaattgaaaccccatcaagtagatggtgttcagtttatgtgggattgctgctgtgagtctgtgaaaaaaacaaagaaatctccaggttcaggatgcattcttgcccactgtatgggccttggtaagactttacaggtggtaagttttcttcatacagttcttttgtgtgacaaactggatttcagcacggcgttagtggtttgtcctcttaatactgctttgaattggatgaatgaatttgagaagtggcaagagggattaaaagatgatgagaagcttgaggtttctgaattagcaactgtgaaacgtcctcaggagagaagctacatgctgcagaggtggcaagaagatggtggtgttatgatcataggctatgagatgtatagaaatcttgctcaaggaaggaatgtgaagagtcggaaacttaaagaaatatttaacaaagctttggttgatccaggccctgattttgttgtttgtgatgaaggccatattctaaaaaatgaagcatctgctgtttctaaagctatgaattctatacgatcaaggaggaggattattttaacaggaacaccacttcaaaataacctaattgagtatcattgtatggttaattttatcaaggaaaatttacttggatccattaaggagttcaggaatagatttataaatccaattcaaaatggtcagtgtgcagattctaccatggtagatgtcagagtgatgaaaaaacgtgctcacattctctatgagatgttagctggatgtgttcagaggaaagattatacagcattaacaaaattcttgcctccaaaacacgaatatgtgttagctgtgagaatgacttctattcagtgcaagctctatcagtactacttagatcacttaacaggtgtgggcaataatagtgaaggtggaagaggaaaggcaggtgcaaagcttttccaagattttcagatgttaagtagaatatggactcatccttggtgtttgcagctagactacattagcaaagaaaataagggttattttgatgaagacagtatggatgaatttatagcctcagattctgatgaaacctccatgagtttaagctccgatgattatacaaaaaagaagaaaaaagggaaaaaggggaaaaaagatagtagctcaagtggaagtggcagtgacaatgatgttgaagtgattaaggtctggaattcaagatctcggggaggtggtgaaggaaatgtggatgaaacaggaaacaatccttctgtttctttaaaactggaagaaagtaaagctacttcttcttctaatccaagcagcccagctccagactggtacaaagattttgttacagatgctgatgctgaggttttagagcattctgggaaaatggtacttctctttgaaattcttcgaatggcagaggaaattggggataaagtccttgttttcagccagtccctcatatctctggacttgattgaagattttcttgaattagctagtagggagaagacagaagataaagataaaccccttatttataaaggtgaggggaagtggcttcgaaacattgactattaccgtttagatggttccactactgcacagtcaaggaagaagtgggctgaagaatttaatgatgaaactaatgtgagaggacgattatttatcatttctactaaagcaggatctctaggaattaatctggtagctgctaatcgagtaattatattcgacgcttcttggaatccatcttatgacatccagagtatattcagagtttatcgctttggacaaactaagcctgtttatgtatataggttcttagctcagggaaccatggaagataagatttatgatcggcaagtaactaagcagtcactgtcttttcgagttgttgatcagcagcaggtggagcgtcattttactatgaatgagcttactgaactttatacttttgagccagacttattagatgaccctaattcagaaaagaagaagaagagggatactcccatgctgccaaaggataccatacttgcagagctccttcagatacataaagaacacattgtaggataccatgaacatgattctcttttggaccacaaagaagaagaagagttgactgaagaagaaagaaaagcagcttgggctgagtatgaagcagagaagaagggactgaccatgcgtttcaacataccaactgggaccaatttaccccctgtcagtttcaactctcaaactccttatattcctttcaatttgggagccctgtcagcaatgagtaatcaacagctggaggacctcattaatcaaggaagagaaaaagttgtagaagcaacaaacagtgtgacagcagtgaggattcaacctcttgaggatataatttcagctgtatggaaggagaacatgaatctctcagaggcccaagtacaggcgttagcattaagtagacaagccagccaggagcttgatgttaaacgaagagaagcaatctacaatgatgtattgacaaaacaacagatgttaatcagctgtgttcagcgaatacttatgaacagaaggctccagcagcagtacaatcagcagcaacagcaacaaatgacttatcaacaagcaacactgggtcacctcatgatgccaaagcccccaaatttgatcatgaatccttctaactaccagcagattgatatgagaggaatgtatcagccagtggctggtggtatgcagccaccaccattacagcgtgcaccacccccaatgagaagcaaaaatccaggaccttcccaagggaaatcaatgtgattttgcactaaaagcttaatggattgttaaaatcatagaaagatcttttatttttttaggaatcaatgacttaacagaactcaactgtataaatagtttggtccccttaaatgccaatcttccatattagttttacttttttttttttaaatagggcataccatttcttcctgacatttgtcagtgatgttgcctagaatcttcttacacacgctgagtacagaagatatttcaaattgttttcagtgaaaacaagtccttccataatagtaacaactccacagatttcctctctaaatttttatgcctgcttttagcaaccataaaattgtcataaaattaataaatttaggaaagaataaagatttatatattcattctttacatataaaaacacacagctgagttcttagagttgattcctcaagttatgaaatacttttgtacttaatccatttcttgattaaagtgattgaaatggttttaatgttcttttgactgaagtctgaaactgggctcctgctttattgtctctgtgactgaaagttagaaactgagggttatctttgacacagaattgtgtgcaatattcttaaatactactgctctaaaagttggagaagtcttgcagttatcttagcattgtataaacagccttaagtatagcctaagaagagaattcctttttcttctttagtccttctgccattttttattttcagttatatgtgctgaaataattactggtaaaatttcagggttgtggattatcttccacacatgaattttctctctcctggcacgaatataaagcacatctcttaactgcatggtgccagtgctaatgcttcatcctgttgctggcagtgggatgtggacttagaaaatcaagttctagcattttagtaggttaacactgaagttgtggttgttaggttcacaccctgttttataaacaacatcaaaatggcagaaccattgctgactttaggttcacatgaggaatgtacttttaacaattcccagtactatcagtattgtgaaataattcctctgaaagataagaatcactggcttctatgcgcttcttttctctcatcatcatgttcttttaccccagtttccttacatttttttaaattgtttcagagtttgttttttttttagtttagattgtgaggcaattattaaatcaaaattaattcatccaatacccctttactagaagttttactagaaaatgtattacattttattttttcttaatccagttctgcaaaaatgacctataaatttattcatgtacaattttggttacttgaattgttaaagaaaacattgtttttgactatgggagtcaactcaacatggcagaaccatttttgagatgatgatacaacaggtagtgaaacagcttaagaattccaaaaaaaaaaaaaaaaaaaaaaaaaaagaaaactgggtttgggctttgctttaggtatcactggattagaatgagtttaacattagctaaaactgctttgagttgtttggatgattaagagattgccatttttatcttggaagaactagtggtaaaacatccaagagcactaggattgtgatacagaatttgtgaggtttggtggatccacgcccctctcccccactttcccatgatgaaatatcactaataaatcctgtatatttagatattatgctagccatgtaatcagatttatttaattgggtggggcaggtgtgtatttactttagaaaaaatgaaaaagacaagatttatgagaaatatttgaaggcagtacactctggccaactgttaccagttggtatttctacaagttcagaatattttaaacctgatttactagacctgggaattttcaacatggtctaattatttactcaaagacatagatgtgaaaattttaggcaaccttctaaatctttttcaccatggatgaaactataacttaaagaataatacttagaagggttaattggaaatcagagtttgaaataaaacttggaccactttgtatacactcttctcacttgacattttagctatataatatgtactttgagtataacatcaagctttaacaaatatttaaagacaaaaaaatcacgtcagtaaaatactaaaaggctcatttttatatttgttttagatgttttaaatagttgcaatggattaaaaatgatgatttaaaatgttgcttgtaatacagttttgcctgctaaattctccacattttgtaacctgttttatttctttgggtgtaaagcgtttttgcttagtattgtgatattgtatatgttttgtcccagttgtatagtaatgtttcagtccatcatccagctttggctgctgaaatcatacagctgtgaagacttgcctttgtttctgttagactgcttttcagttctgtattgagtatcttaagtactgtagaaaagatgtcacttcttcctttaaggctgttttgtaatatatataaggactggaattgtgtttttaaagaaaagcattcaagtatgacaatatactatctgtgttttcaccattcaaagtgctgtttagtagttgaaacttaaactatttaatgtcatttaataaagtgaccaaaatgtg

SEQ ID NO: 362093 - DNA, 10887 bp, Homo sapiens
ctgagcctcggcccaacaaaatggcggcggcagcggtgtcgctttgtttccgcggctcctgcggcggtggcagtggtagcggcctttgagctgtggggaggttccagcagcagctacagtgacgactaagactccagtgcatttctatcgtaaccgggcgcgggggagcgcagatcggcgcccagcaatcacagaagccgacaaggcgttcaagcgaaaacatgaccgctgagcccatgagtgaaagcaagttgaatacattggtgcagaagcttcatgacttccttgcacactcatcagaagaatctgaagaaacaagttctcctccacgacttgcaatgaatcaaaacacagataaaatcagtggttctggaagtaactctgatatgatggaaaacagcaaggaagagggaactagctcttcagaaaaatccaagtcttcaggatcgtcacgatcaaagaggaaaccttcaattgtaacaaagtatgtagaatcagatgatgaaaaacctttggatgatgaaactgtaaatgaagatgcgtctaatgaaaattcagaaaatgatattactatgcagagcttgccaaaaggtacagtgattgtacagccagagccagtgctgaatgaagacaaagatgattttaaagggcctgaatttagaagcagaagtaaaatgaaaactgaaaatctcaaaaaacgcggagaagatgggcttcatgggattgtgagctgcactgcttgtggacaacaggtcaatcattttcaaaaagattccatttatagacacccttcattgcaagttcttatttgtaagaattgctttaagtattacatgagtgatgatattagccgtgactcagatggaatggatgaacaatgtaggtggtgtgcggaaggtggaaacttgatttgttgtgacttttgccataatgctttctgcaagaaatgcattctacgcaaccttggtcgaaaggagttgtccacaataatggatgaaaacaaccaatggtattgctacatttgtcacccagagcctttgttggacttggtcactgcatgtaacagcgtatttgagaatttagaacagttgttgcagcaaaataagaagaagataaaagttgacagtgaaaagagtaataaagtatatgaacatacatccagattttctccaaagaagactagttcaaattgtaatggagaagaaaagaaattagatgattcctgttctggctctgtaacctactcttattccgcactaattgtgcccaaagagatgattaagaaggcaaaaaaactgattgagaccacagccaacatgaactccagttatgttaaatttttaaagcaggcaacagataattcagaaatcagttctgctacaaaattacgtcagcttaaggcttttaagtctgtgttggctgatattaagaaggctcatcttgcattggaagaagacttaaattccgagtttcgagcgatggatgctgtaaacaaagagaaaaataccaaagagcataaagtcatagatgctaagtttgaaacaaaagcacgaaaaggagaaaaaccttgtgctttggaaaagaaggatatttcaaagtcagaagctaaactttcaagaaaacaggtagatagtgagcacatgcatcagaatgttccaacagaggaacaaagaacaaataaaagtaccggtggtgaacataagaaatctgatagaaaagaagaacctcaatatgaacctgccaacacttctgaagatttagacatggatattgtgtctgttccttcctcagttccagaagacatttttgagaatcttgagactgctatggaagttcagagttcagttgatcatcaaggggatggcagcagtggaactgaacaagaagtggagagttcatctgtaaaattaaatatttcttcaaaagacaacagaggaggtattaaatcaaaaactacagctaaagtaacaaaagaattatatgttaaactcactcctgtttccctttctaattccccaattaaaggtgctgattgtcaggaagttccacaagataaagatggctataaaagttgtggtctgaaccccaagttagagaaatgtggacttggacaggaaaacagtgataatgagcatttggttgaaaatgaagtttcattacttttagaggaatctgatcttcgaagatccccacgtgtaaagactacacccttgaggcgaccgacagaaactaaccctgtaacatctaattcagatgaagaatgtaatgaaacagttaaggagaaacaaaaactatcagttccagtgagaaaaaaggataagcgtaattcttctgacagtgctatagataatcctaagcctaataaattgccaaaatctaagcaatcagagactgtggatcaaaattcagattctgatgaaatgctagcaatcctcaaagaggtgagcaggatgagtcacagttcttcttcagatactgatattaatgaaattcatacaaaccataagactttgtatgatttaaagactcaggcggggaaagatgataaaggaaaaaggaaacgaaaaagttctacatctggctcagattttgatactaaaaagggcaaatcagctaagagctctataatttctaaaaagaaacgacaaacccagtctgagtcttctaattatgactcagaattagaaaaagagataaagagcatgagtaaaattggtgctgccagaaccaccaaaaaaagaattccaaatacaaaagattttgactcttctgaagatgagaaacacagcaaaaaaggaatggataatcaagggcacaaaaatttgaagacctcacaagaaggatcatctgatgatgctgaaagaaaacaagagagagagactttctcttcagcagaaggcacagttgataaagacacgaccatcatggaattaagagatcgacttcctaagaagcagcaagcaagtgcttccactgatggtgtcgataagctttctgggaaagagcagagttttacttctttggaagttagaaaagttgctgaaactaaagaaaagagcaagcatctcaaaaccaaaacatgtaaaaaagtacaggatggcttatctgatattgcagagaaattcctaaagaaagaccagagcgatgaaacttctgaagatgataaaaagcagagcaaaaagggaactgaagaaaaaaagaaaccttcagactttaagaaaaaagtaattaaaatggaacaacagtatgaatcttcatctgatggcactgaaaagttacctgagcgagaagaaatttgtcattttcctaagggcataaaacaaattaagaatggaacaactgatggagaaaagaaaagtaaaaaaataagagataaaacttctaaaaagaaggatgaattatctgattatgctgagaagtcaacagggaaaggagatagttgtgactcttcagaggataaaaagagtaagaatggagcatatggtagagagaagaaaaggtgcaagttgcttggaaagagttcaaggaagagacaagattgttcatcatctgatactgagaaatattccatgaaagaagatggttgtaactcttctgataagagactgaaaagaatagaattgagggaaagaagaaatttaagttcaaagagaaatactaaggaaatacaaagtggctcatcatcatctgatgctgaggaaagttctgaagataataaaaagaagaagcaaagaacttcatctaaaaagaaggcagtcattgtcaaggagaaaaagagaaactccctaagaacaagcactaaaaggaagcaagctgacattacatcctcatcttcttctgatatagaagatgatgatcagaattctataggtgagggaagcagcgatgaacagaaaattaagcctgtgactgaaaatttagtgctgtcttcacatactggattttgccaatcttcaggagatgaagccttatctaaatcagtgcctgtcacagtggatgatgatgatgacgacaatgatcctgagaatagaattgccaagaagatgcttttagaagaaattaaagccaatctttcctctgatgaggatggatcttcagatgatgagccagaagaagggaaaaaaagaactggaaaacaaaatgaagaaaacccaggagatgaggaagcaaaaaatcaagtcaattctgaatcagattcagattctgaagaatctaagaagccaagatacagacataggcttttgcggcacaaattgactgtgagtgacggagaatctggagaagaaaaaaagacaaagcctaaagagcataaagaagtcaaaggcagaaacagaagaaaggtgagcagtgaagattcagaagattctgattttcaggaatcaggagttagtgaagaagttagtgaatccgaagatgaacagcggcccagaacaaggtctgcaaagaaagcagagttggaagaaaatcagcggagctataaacagaaaaagaaaaggcgacgtattaaggttcaagaagattcatccagtgaaaacaagagtaattctgaggaagaagaggaggaaaaagaagaggaggaggaagaggaggaggaggaggaagaggaggaggaagatgaaaatgatgattccaagtctcctggaaaaggcagaaagaaaattcggaagattcttaaagatgataaactgagaacagaaacacaaaatgctcttaaggaagaggaagagagacgaaaacgtattgctgagagggagcgtgagcgagaaaaattgagagaggtgatagaaattgaagatgcttcacccaccaagtgtccaataacaaccaagttggttttagatgaagatgaagaaaccaaagaacctttagtgcaggttcatagaaatatggttatcaaattgaaaccccatcaagtagatggtgttcagtttatgtgggattgctgctgtgagtctgtgaaaaaaacaaagaaatctccaggttcaggatgcattcttgcccactgtatgggccttggtaagactttacaggtggtaagttttcttcatacagttcttttgtgtgacaaactggatttcagcacggcgttagtggtttgtcctcttaatactgctttgaattggatgaatgaatttgagaagtggcaagagggattaaaagatgatgagaagcttgaggtttctgaattagcaactgtgaaacgtcctcaggagagaagctacatgctgcagaggtggcaagaagatggtggtgttatgatcataggctatgagatgtatagaaatcttgctcaaggaaggaatgtgaagagtcggaaacttaaagaaatatttaacaaagctttggttgatccaggccctgattttgttgtttgtgatgaaggccatattctaaaaaatgaagcatctgctgtttctaaagctatgaattctatacgatcaaggaggaggattattttaacaggaacaccacttcaaaataacctaattgagtatcattgtatggttaattttatcaaggaaaatttacttggatccattaaggagttcaggaatagatttataaatccaattcaaaatggtcagtgtgcagattctaccatggtagatgtcagagtgatgaaaaaacgtgctcacattctctatgagatgttagctggatgtgttcagaggaaagattatacagcattaacaaaattcttgcctccaaaacacgaatatgtgttagctgtgagaatgacttctattcagtgcaagctctatcagtactacttagatcacttaacaggtgtgggcaataatagtgaaggtggaagaggaaaggcaggtgcaaagcttttccaagattttcagatgttaagtagaatatggactcatccttggtgtttgcagctagactacattagcaaagaaaataagggttattttgatgaagacagtatggatgaatttatagcctcagattctgatgaaacctccatgagtttaagctccgatgattatacaaaaaagaagaaaaaagggaaaaaggggaaaaaagatagtagctcaagtggaagtggcagtgacaatgatgttgaagtgattaaggtctggaattcaagatctcggggaggtggtgaaggaaatgtggatgaaacaggaaacaatccttctgtttctttaaaactggaagaaagtaaagctacttcttcttctaatccaagcagcccagctccagactggtacaaagattttgttacagatgctgatgctgaggttttagagcattctgggaaaatggtacttctctttgaaattcttcgaatggcagaggaaattggggataaagtccttgttttcagccagtccctcatatctctggacttgattgaagattttcttgaattagctagtagggagaagacagaagataaagataaaccccttatttataaaggtgaggggaagtggcttcgaaacattgactattaccgtttagatggttccactactgcacagtcaaggaagaagtgggctgaagaatttaatgatgaaactaatgtgagaggacgattatttatcatttctactaaagcaggatctctaggaattaatctggtagctgctaatcgagtaattatattcgacgcttcttggaatccatcttatgacatccagagtatattcagagtttatcgctttggacaaactaagcctgtttatgtatataggttcttagctcagggaaccatggaagataagatttatgatcggcaagtaactaagcagtcactgtcttttcgagttgttgatcagcagcaggtggagcgtcattttactatgaatgagcttactgaactttatacttttgagccagacttattagatgaccctaattcagaaaagaagaagaagagggatactcccatgctgccaaaggataccatacttgcagagctccttcagatacataaagaacacattgtaggataccatgaacatgattctcttttggaccacaaagaagaagaagagttgactgaagaagaaagaaaagcagcttgggctgagtatgaagcagagaagaagggactgaccatgcgtttcaacataccaactgggaccaatttaccccctgtcagtttcaactctcaaactccttatattcctttcaatttgggagccctgtcagcaatgagtaatcaacagctggaggacctcattaatcaaggaagagaaaaagttgtagaagcaacaaacagtgtgacagcagtgaggattcaacctcttgaggatataatttcagctgtatggaaggagaacatgaatctctcagaggcccaagtacaggcgttagcattaagtagacaagccagccaggagcttgatgttaaacgaagagaagcaatctacaatgatgtattgacaaaacaacagatgttaatcagctgtgttcagcgaatacttatgaacagaaggctccagcagcagtacaatcagcagcaacagcaacaaatgacttatcaacaagcaacactgggtcacctcatgatgccaaagcccccaaatttgatcatgaatccttctaactaccagcagattgatatgagaggaatgtatcagccagtggctggtggtatgcagccaccaccattacagcgtgcaccacccccaatgagaagcaaaaatccaggaccttcccaagggaaatcaatgtgattttgcactaaaagcttaatggattgttaaaatcatagaaagatcttttatttttttaggaatcaatgacttaacagaactcaactgtataaatagtttggtccccttaaatgccaatcttccatattagttttacttttttttttttaaatagggcataccatttcttcctgacatttgtcagtgatgttgcctagaatcttcttacacacgctgagtacagaagatatttcaaattgttttcagtgaaaacaagtccttccataatagtaacaactccacagatttcctctctaaatttttatgcctgcttttagcaaccataaaattgtcataaaattaataaatttaggaaagaataaagatttatatattcattctttacatataaaaacacacagctgagttcttagagttgattcctcaagttatgaaatacttttgtacttaatccatttcttgattaaagtgattgaaatggttttaatgttcttttgactgaagtctgaaactgggctcctgctttattgtctctgtgactgaaagttagaaactgagggttatctttgacacagaattgtgtgcaatattcttaaatactactgctctaaaagttggagaagtcttgcagttatcttagcattgtataaacagccttaagtatagcctaagaagagaattcctttttcttctttagtccttctgccattttttattttcagttatatgtgctgaaataattactggtaaaatttcagggttgtggattatcttccacacatgaattttctctctcctggcacgaatataaagcacatctcttaactgcatggtgccagtgctaatgcttcatcctgttgctggcagtgggatgtggacttagaaaatcaagttctagcattttagtaggttaacactgaagttgtggttgttaggttcacaccctgttttataaacaacatcaaaatggcagaaccattgctgactttaggttcacatgaggaatgtacttttaacaattcccagtactatcagtattgtgaaataattcctctgaaagataagaatcactggcttctatgcgcttcttttctctcatcatcatgttcttttaccccagtttccttacatttttttaaattgtttcagagtttgttttttttttagtttagattgtgaggcaattattaaatcaaaattaattcatccaatacccctttactagaagttttactagaaaatgtattacattttattttttcttaatccagttctgcaaaaatgacctataaatttattcatgtacaattttggttacttgaattgttaaagaaaacattgtttttgactatgggagtcaactcaacatggcagaaccatttttgagatgatgatacaacaggtagtgaaacagcttaagaattccaaaaaaaaaaaaaaaaaaaaaaaaaaagaaaactgggtttgggctttgctttaggtatcactggattagaatgagtttaacattagctaaaactgctttgagttgtttggatgattaagagattgccatttttatcttggaagaactagtggtaaaacatccaagagcactaggattgtgatacagaatttgtgaggtttggtggatccacgcccctctcccccactttcccatgatgaaatatcactaataaatcctgtatatttagatattatgctagccatgtaatcagatttatttaattgggtggggcaggtgtgtatttactttagaaaaaatgaaaaagacaagatttatgagaaatatttgaaggcagtacactctggccaactgttaccagttggtatttctacaagttcagaatattttaaacctgatttactagacctgggaattttcaacatggtctaattatttactcaaagacatagatgtgaaaattttaggcaaccttctaaatctttttcaccatggatgaaactataacttaaagaataatacttagaagggttaattggaaatcagagtttgaaataaaacttggaccactttgtatacactcttctcacttgacattttagctatataatatgtactttgagtataacatcaagctttaacaaatatttaaagacaaaaaaatcacgtcagtaaaatactaaaaggctcatttttatatttgttttagatgttttaaatagttgcaatggattaaaaatgatgatttaaaatgttgcttgtaatacagttttgcctgctaaattctccacattttgtaacctgttttatttctttgggtgtaaagcgtttttgcttagtattgtgatattgtatatgttttgtcccagttgtatagtaatgtttcagtccatcatccagctttggctgctgaaatcatacagctgtgaagacttgcctttgtttctgttagactgcttttcagttctgtattgagtatcttaagtactgtagaaaagatgtcacttcttcctttaaggctgttttgtaatatatataaggactggaattgtgtttttaaagaaaagcattcaagtatgacaatatactatctgtgttttcaccattcaaagtgctgtttagtagttgaaacttaaactatttaatgtcatttaataaagtgaccaaaatgtgttgtgctctttattgtattttcacagctttgaaaatctgtgcacatactgtttcatagaaaatgtatagcttttgttgtcctatataatggtggttcttttgcacatttagttatttaatattgagaggtcacgaagtttggttattgaatctgttatatactaaattctgtaaagggagatctctcatctcaaaaagaatttacataccaggaagtccatgtgtgtttgtgttagttttggatgtctttgtgtaatccagccccatttcctgtttcccaacagctgtaacactcattttaagtcaagcagggctaccaacccacacttgatagaaaagctgcttaccattcagaagcttccttattacctggcctccaaatgagctgaatattttgtagccttcccttagctatgttcattttccctccattatcataaaatcagatcgatatttatgtgccccaaacaaaactttaagagcagttacattctgtcccagtagcccttgtttcctttgagatctccgtcgaactgggatcctctgatg

SEQ ID NO: 362094 - DNA, 10051 bp, Homo sapiens
ctgagcctcggcccaacaaaatggcggcggcagcggtgtcgctttgtttccgcggctcctgcggcggtggcagtggtagcggcctttgagctgtggggaggttccagcagcagctacagtgacgactaagactccagtgcatttctatcgtaaccgggcgcgggggagcgcagatcggcgcccagcaatcacagaagccgacaaggcgttcaagcgaaaacatgaccgctgagcccatgagtgaaagcaagttgaatacattggtgcagaagcttcatgacttccttgcacactcatcagaagaatctgaagaaacaagttctcctccacgacttgcaatgaatcaaaacacagataaaatcagtggttctggaagtaactctgatatgatggaaaacagcaaggaagagggaactagctcttcagaaaaatccaagtcttcaggatcgtcacgatcaaagaggaaaccttcaattgtaacaaagtatgtagaatcagatgatgaaaaacctttggatgatgaaactgtaaatgaagatgcgtctaatgaaaattcagaaaatgatattactatgcagagcttgccaaaaggtacagtgattgtacagccagagccagtgctgaatgaagacaaagatgattttaaagggcctgaatttagaagcagaagtaaaatgaaaactgaaaatctcaaaaaacgcggagaagatgggcttcatgggattgtgagctgcactgcttgtggacaacaggtcaatcattttcaaaaagattccatttatagacacccttcattgcaagttcttatttgtaagaattgctttaagtattacatgagtgatgatattagccgtgactcagatggaatggatgaacaatgtaggtggtgtgcggaaggtggaaacttgatttgttgtgacttttgccataatgctttctgcaagaaatgcattctacgcaaccttggtcgaaaggagttgtccacaataatggatgaaaacaaccaatggtattgctacatttgtcacccagagcctttgttggacttggtcactgcatgtaacagcgtatttgagaatttagaacagttgttgcagcaaaataagaagaagataaaagttgacagtgaaaagagtaataaagtatatgaacatacatccagattttctccaaagaagactagttcaaattgtaatggagaagaaaagaaattagatgattcctgttctggctctgtaacctactcttattccgcactaattgtgcccaaagagatgattaagaaggcaaaaaaactgattgagaccacagccaacatgaactccagttatgttaaatttttaaagcaggcaacagataattcagaaatcagttctgctacaaaattacgtcagcttaaggcttttaagtctgtgttggctgatattaagaaggctcatcttgcattggaagaagacttaaattccgagtttcgagcgatggatgctgtaaacaaagagaaaaataccaaagagcataaagtcatagatgctaagtttgaaacaaaagcacgaaaaggagaaaaaccttgtgctttggaaaagaaggatatttcaaagtcagaagctaaactttcaagaaaacaggtagatagtgagcacatgcatcagaatgttccaacagaggaacaaagaacaaataaaagtaccggtggtgaacataagaaatctgatagaaaagaagaacctcaatatgaacctgccaacacttctgaagatttagacatggatattgtgtctgttccttcctcagttccagaagacatttttgagaatcttgagactgctatggaagttcagagttcagttgatcatcaaggggatggcagcagtggaactgaacaagaagtggagagttcatctgtaaaattaaatatttcttcaaaagacaacagaggaggtattaaatcaaaaactacagctaaagtaacaaaagaattatatgttaaactcactcctgtttccctttctaattccccaattaaaggtgctgattgtcaggaagttccacaagataaagatggctataaaagttgtggtctgaaccccaagttagagaaatgtggacttggacaggaaaacagtgataatgagcatttggttgaaaatgaagtttcattacttttagaggaatctgatcttcgaagatccccacgtgtaaagactacacccttgaggcgaccgacagaaactaaccctgtaacatctaattcagatgaagaatgtaatgaaacagttaaggagaaacaaaaactatcagttccagtgagaaaaaaggataagcgtaattcttctgacagtgctatagataatcctaagcctaataaattgccaaaatctaagcaatcagagactgtggatcaaaattcagattctgatgaaatgctagcaatcctcaaagaggtgagcaggatgagtcacagttcttcttcagatactgatattaatgaaattcatacaaaccataagactttgtatgatttaaagactcaggcggggaaagatgataaaggaaaaaggaaacgaaaaagttctacatctggctcagattttgatactaaaaagggcaaatcagctaagagctctataatttctaaaaagaaacgacaaacccagtctgagtcttctaattatgactcagaattagaaaaagagataaagagcatgagtaaaattggtgctgccagaaccaccaaaaaaagaattccaaatacaaaagattttgactcttctgaagatgagaaacacagcaaaaaaggaatggataatcaagggcacaaaaatttgaagacctcacaagaaggatcatctgatgatgctgaaagaaaacaagagagagagactttctcttcagcagaaggcacagttgataaagacacgaccatcatggaattaagagatcgacttcctaagaagcagcaagcaagtgcttccactgatggtgtcgataagctttctgggaaagagcagagttttacttctttggaagttagaaaagttgctgaaactaaagaaaagagcaagcatctcaaaaccaaaacatgtaaaaaagtacaggatggcttatctgatattgcagagaaattcctaaagaaagaccagagcgatgaaacttctgaagatgataaaaagcagagcaaaaagggaactgaagaaaaaaagaaaccttcagactttaagaaaaaagtaattaaaatggaacaacagtatgaatcttcatctgatggcactgaaaagttacctgagcgagaagaaatttgtcattttcctaagggcataaaacaaattaagaatggaacaactgatggagaaaagaaaagtaaaaaaataagagataaaacttctaaaaagaaggatgaattatctgattatgctgagaagtcaacagggaaaggagatagttgtgactcttcagaggataaaaagagtaagaatggagcatatggtagagagaagaaaaggtgcaagttgcttggaaagagttcaaggaagagacaagattgttcatcatctgatactgagaaatattccatgaaagaagatggttgtaactcttctgataagagactgaaaagaatagaattgagggaaagaagaaatttaagttcaaagagaaatactaaggaaatacaaagtggctcatcatcatctgatgctgaggaaagttctgaagataataaaaagaagaagcaaagaacttcatctaaaaagaaggcagtcattgtcaaggagaaaaagagaaactccctaagaacaagcactaaaaggaagcaagctgacattacatcctcatcttcttctgatatagaagatgatgatcagaattctataggtgagggaagcagcgatgaacagaaaattaagcctgtgactgaaaatttagtgctgtcttcacatactggattttgccaatcttcaggagatgaagccttatctaaatcagtgcctgtcacagtggatgatgatgatgacgacaatgatcctgagaatagaattgccaagaagatgcttttagaagaaattaaagccaatctttcctctgatgaggatggatcttcagatgatgagccagaagaagggaaaaaaagaactggaaaacaaaatgaagaaaacccaggagatgaggaagcaaaaaatcaagtcaattctgaatcagattcagattctgaagaatctaagaagccaagatacagacataggcttttgcggcacaaattgactgtgagtgacggagaatctggagaagaaaaaaagacaaagcctaaagagcataaagaagtcaaaggcagaaacagaagaaaggtgagcagtgaagattcagaagattctgattttcaggaatcaggagttagtgaagaagttagtgaatccgaagatgaacagcggcccagaacaaggtctgcaaagaaagcagagttggaagaaaatcagcggagctataaacagaaaaagaaaaggcgacgtattaaggttcaagaagattcatccagtgaaaacaagagtaattctgaggaagaagaggaggaaaaagaagaggaggaggaagaggaggaggaggaggaagaggaggaggaagatgaaaatgatgattccaagtctcctggaaaaggcagaaagaaaattcggaagattcttaaagatgataaactgagaacagaaacacaaaatgctcttaaggaagaggaagagagacgaaaacgtattgctgagagggagcgtgagcgagaaaaattgagagaggtgatagaaattgaagatgcttcacccaccaagtgtccaataacaaccaagttggttttagatgaagatgaagaaaccaaagaacctttagtgcaggttcatagaaatatggttatcaaattgaaaccccatcaagtagatggtgttcagtttatgtgggattgctgctgtgagtctgtgaaaaaaacaaagaaatctccaggttcaggatgcattcttgcccactgtatgggccttggtaagactttacaggtggtaagttttcttcatacagttcttttgtgtgacaaactggatttcagcacggcgttagtggtttgtcctcttaatactgctttgaattggatgaatgaatttgagaagtggcaagagggattaaaagatgatgagaagcttgaggtttctgaattagcaactgtgaaacgtcctcaggagagaagctacatgctgcagaggtggcaagaagatggtggtgttatgatcataggctatgagatgtatagaaatcttgctcaaggaaggaatgtgaagagtcggaaacttaaagaaatatttaacaaagctttggttgatccaggccctgattttgttgtttgtgatgaaggccatattctaaaaaatgaagcatctgctgtttctaaagctatgaattctatacgatcaaggaggaggattattttaacaggaacaccacttcaaaataacctaattgagtatcattgtatggttaattttatcaaggaaaatttacttggatccattaaggagttcaggaatagatttataaatccaattcaaaatggtcagtgtgcagattctaccatggtagatgtcagagtgatgaaaaaacgtgctcacattctctatgagatgttagctggatgtgttcagaggaaagattatacagcattaacaaaattcttgcctccaaaacacgaatatgtgttagctgtgagaatgacttctattcagtgcaagctctatcagtactacttagatcacttaacaggtgtgggcaataatagtgaaggtggaagaggaaaggcaggtgcaaagcttttccaagattttcagatgttaagtagaatatggactcatccttggtgtttgcagctagactacattagcaaagaaaataagggttattttgatgaagacagtatggatgaatttatagcctcagattctgatgaaacctccatgagtttaagctccgatgattatacaaaaaagaagaaaaaagggaaaaaggggaaaaaagatagtagctcaagtggaagtggcagtgacaatgatgttgaagtgattaaggtctggaattcaagatctcggggaggtggtgaaggaaatgtggatgaaacaggaaacaatccttctgtttctttaaaactggaagaaagtaaagctacttcttcttctaatccaagcagcccagctccagactggtacaaagattttgttacagatgctgatgctgaggttttagagcattctgggaaaatggtacttctctttgaaattcttcgaatggcagaggaaattggggataaagtccttgttttcagccagtccctcatatctctggacttgattgaagattttcttgaattagctagtagggagaagacagaagataaagataaaccccttatttataaaggtgaggggaagtggcttcgaaacattgactattaccgtttagatggttccactactgcacagtcaaggaagaagtgggctgaagaatttaatgatgaaactaatgtgagaggacgattatttatcatttctactaaagcaggatctctaggaattaatctggtagctgctaatcgagtaattatattcgacgcttcttggaatccatcttatgacatccagagtatattcagagtttatcgctttggacaaactaagcctgtttatgtatataggttcttagctcagggaaccatggaagataagatttatgatcggcaagtaactaagcagtcactgtcttttcgagttgttgatcagcagcaggtggagcgtcattttactatgaatgagcttactgaactttatacttttgagccagacttattagatgaccctaattcagaaaagaagaagaagagggatactcccatgctgccaaaggataccatacttgcagagctccttcagatacataaagaacacattgtaggataccatgaacatgattctcttttggaccacaaagaagaagaagagttgactgaagaagaaagaaaagcagcttgggctgagtatgaagcagagaagaagggactgaccatgcgtttcaacataccaactgggaccaatttaccccctgtcagtttcaactctcaaactccttatattcctttcaatttgggagccctgtcagcaatgagtaatcaacagctggaggacctcattaatcaaggaagagaaaaagttgtagaagcaacaaacagtgtgacagcagtgaggattcaacctcttgaggatataatttcagctgtatggaaggagaacatgaatctctcagaggcccaagtacaggcgttagcattaagtagacaagccagccaggagcttgatgttaaacgaagagaagcaatctacaatgatgtattgacaaaacaacagatgttaatcagctgtgttcagcgaatacttatgaacagaaggctccagcagcagtacaatcagcagcaacagcaacaaatgacttatcaacaagcaacactgggtcacctcatgatgccaaagcccccaaatttgatcatgaatccttctaactaccagcagattgatatgagaggaatgtatcagccagtggctggtggtatgcagccaccaccattacagcgtgcaccacccccaatgagaagcaaaaatccaggaccttcccaagggaaatcaatgtgattttgcactaaaagcttaatggattgttaaaatcatagaaagatcttttatttttttaggaatcaatgacttaacagaactcaactgtataaatagtttggtccccttaaatgccaatcttccatattagttttacttttttttttttaaatagggcataccatttcttcctgacatttgtcagtgatgttgcctagaatcttcttacacacgctgagtacagaagatatttcaaattgttttcagtgaaaacaagtccttccataatagtaacaactccacagatttcctctctaaatttttatgcctgcttttagcaaccataaaattgtcataaaattaataaatttaggaaagaataaagatttatatattcattctttacatataaaaacacacagctgagttcttagagttgattcctcaagttatgaaatacttttgtacttaatccatttcttgattaaagtgattgaaatggttttaatgttcttttgactgaagtctgaaactgggctcctgctttattgtctctgtgactgaaagttagaaactgagggttatctttgacacagaattgtgtgcaatattcttaaatactactgctctaaaagttggagaagtcttgcagttatcttagcattgtataaacagccttaagtatagcctaagaagagaattcctttttcttctttagtccttctgccattttttattttcagttatatgtgctgaaataattactggtaaaatttcagggttgtggattatcttccacacatgaattttctctctcctggcacgaatataaagcacatctcttaactgcatggtgccagtgctaatgcttcatcctgttgctggcagtgggatgtggacttagaaaatcaagttctagcattttagtaggttaacactgaagttgtggttgttaggttcacaccctgttttataaacaacatcaaaatggcagaaccattgctgactttaggttcacatgaggaatgtacttttaacaattcccagtactatcagtattgtgaaataattcctctgaaagataagaatcactggcttctatgcgcttcttttctctcatcatcatgttcttttaccccagtttccttacatttttttaaattgtttcagagtttgttttttttttagtttagattgtgaggcaattattaaatcaaaattaattcatccaatacccctttactagaagttttactagaaaatgtattacattttattttttcttaatccagttctgcaaaaatgacctataaatttattcatgtacaattttggttacttgaattgttaaagaaaacattgtttttgactatgggagtcaactcaacatggcagaaccatttttgagatgatgatacaacaggtagtgaaacagcttaagaattccaaaaaaaaaaaaaaaaaaaaaaaaaaaaaaaaacggggttggggcttgcgtttaaggcgttctccgggggttcaaaagcggagtttacacctttaaccttaacacccgtgctttgggagttgggtgcggtagctggctcaaggagagtggcggcgttttttcttcttgggcgaccagcaccttgtgtgggtacaccttctcccaagggccgcctcttgggtgttgtggtgcgtaacccacggacttctggtggcggggtgtggtggggagtcccccgcgcccttttctccccccaatttttcccctgtggatggaatattctcccctaaataaactcccggggtatttattctaaagcaaatttttatgtgcgctgctcccagtgtgataatcccaaaggttttcattcacacacatggggggcgcgagcggcgccgagggtggtggttttctctttagcaaaaacattgtggacaaacagcgacaccgagtctctctgtgagagcatcatcttctggcgaggacggcgcaggaaccccctcttgggcgccactggttgtccccacggccggcggtttttccccaacccaggcttccaagaacttttttttcacccaccgggttttacacaaacccggggaagtttcccccgtgggcgccctacttttttctccccccagggacgctttgcgtggttgaacactttgtgggcacccccttctaaaaattctttttccccgcgggggtgacactcttattcctctagacgaatcatatctctgacgcggcgtgcgggcgaccacccagcggtctggccaactcacgtctgggccccttggttttacctcgtctcctccacgggacttcggacctattagatgggtcctgggtgttcacatcaggtttcccattttttcgccccaca

SEQ ID NO: 362095 - DNA, 6451 bp, Homo sapiens
ttcgtgatagtcgattcctagaggtatcccctctgcgaatcccacagtactggattttgccaatcttcaggagatgaagccttatctaaatcagtgcctgtcacagtggatgatgatgatgacgacaatgatcctgagaatagaattgccaagaagatgcttttagaagaaattaaagccaatctttcctctgatgaggatggatcttcagatgatgagccagaagaagggaaaaaaagaactggaaaacaaaatgaagaaaacccaggagatgaggaagcaaaaaatcaagtcaattctgaatcagattcagattctgaagaatctaagaagccaagatacagacataggcttttgcggcacaaattgactgtgagtgacggagaatctggagaagaaaaaaagacaaagcctaaagagcataaagaagtcaaaggcagaaacagaagaaaggtgagcagtgaagattcagaagattctgattttcaggaatcaggagttagtgaagaagttagtgaatccgaagatgaacagcggcccagaacaaggtctgcaaagaaagcagagttggaagaaaatcagcggagctataaacagaaaaagaaaaggcgacgtattaaggttcaagaagattcatccagtgaaaacaagagtaattctgaggaagaagaggaggaaaaagaagaggaggaggaagaggaggaggaggaggaagaggaggaggaagatgaaaatgatgattccaagtctcctggaaaaggcagaaagaaaattcggaagattcttaaagatgataaactgagaacagaaacacaaaatgctcttaaggaagaggaagagagacgaaaacgtattgctgagagggagcgtgagcgagaaaaattgagagaggtgatagaaattgaagatgcttcacccaccaagtgtccaataacaaccaagttggttttagatgaagatgaagaaaccaaagaacctttagtgcaggttcatagaaatatggttatcaaattgaaaccccatcaagtagatggtgttcagtttatgtgggattgctgctgtgagtctgtgaaaaaaacaaagaaatctccaggttcaggatgcattcttgcccactgtatgggccttggtaagactttacaggtggtaagttttcttcatacagttcttttgtgtgacaaactggatttcagcacggcgttagtggtttgtcctcttaatactgctttgaattggatgaatgaatttgagaagtggcaagagggattaaaagatgatgagaagcttgaggtttctgaattagcaactgtgaaacgtcctcaggagagaagctacatgctgcagaggtggcaagaagatggtggtgttatgatcataggctatgagatgtatagaaatcttgctcaaggaaggaatgtgaagagtcggaaacttaaagaaatatttaacaaagctttggttgatccaggccctgattttgttgtttgtgatgaaggccatattctaaaaaatgaagcatctgctgtttctaaagctatgaattctatacgatcaaggaggaggattattttaacaggaacaccacttcaaaataacctaattgagtatcattgtatggttaattttatcaaggaaaatttacttggatccattaaggagttcaggaatagatttataaatccaattcaaaatggtcagtgtgcagattctaccatggtagatgtcagagtgatgaaaaaacgtgctcacattctctatgagatgttagctggatgtgttcagaggaaagattatacagcattaacaaaattcttgcctccaaaacacgaatatgtgttagctgtgagaatgacttctattcagtgcaagctctatcagtactacttagatcacttaacaggtgtgggcaataatagtgaaggtggaagaggaaaggcaggtgcaaagcttttccaagattttcagatgttaagtagaatatggactcatccttggtgtttgcagctagactacattagcaaagaaaataagggttattttgatgaagacagtatggatgaatttatagcctcagattctgatgaaacctccatgagtttaagctccgatgattatacaaaaaagaagaaaaaagggaaaaaggggaaaaaagatagtagctcaagtggaagtggcagtgacaatgatgttgaagtgattaaggtctggaattcaagatctcggggaggtggtgaaggaaatgtggatgaaacaggaaacaatccttctgtttctttaaaactggaagaaagtaaagctacttcttcttctaatccaagcagcccagctccagactggtacaaagattttgttacagatgctgatgctgaggttttagagcattctgggaaaatggtacttctctttgaaattcttcgaatggcagaggaaattggggataaagtccttgttttcagccagtccctcatatctctggacttgattgaagattttcttgaattagctagtagggagaagacagaagataaagataaaccccttatttataaaggtgaggggaagtggcttcgaaacattgactattaccgtttagatggttccactactgcacagtcaaggaagaagtgggctgaagaatttaatgatgaaactaatgtgagaggacgattatttatcatttctactaaagcaggatctctaggaattaatctggtagctgctaatcgagtaattatattcgacgcttcttggaatccatcttatgacatccagagtatattcagagtttatcgctttggacaaactaagcctgtttatgtatataggttcttagctcagggaaccatggaagataagatttatgatcggcaagtaactaagcagtcactgtcttttcgagttgttgatcagcagcaggtggagcgtcattttactatgaatgagcttactgaactttatacttttgagccagacttattagatgaccctaattcagaaaagaagaagaagagggatactcccatgctgccaaaggataccatacttgcagagctccttcagatacataaagaacacattgtaggataccatgaacatgattctcttttggaccacaaagaagaagaagagttgactgaagaagaaagaaaagcagcttgggctgagtatgaagcagagaagaagggactgaccatgcgtttcaacataccaactgggaccaatttaccccctgtcagtttcaactctcaaactccttatattcctttcaatttgggagccctgtcagcaatgagtaatcaacagctggaggacctcattaatcaaggaagagaaaaagttgtagaagcaacaaacagtgtgacagcagtgaggattcaacctcttgaggatataatttcagctgtatggaaggagaacatgaatctctcagaggcccaagtacaggcgttagcattaagtagacaagccagccaggagcttgatgttaaacgaagagaagcaatctacaatgatgtattgacaaaacaacagatgttaatcagctgtgttcagcgaatacttatgaacagaaggctccagcagcagtacaatcagcagcaacagcaacaaatgacttatcaacaagcaacactgggtcacctcatgatgccaaagcccccaaatttgatcatgaatccttctaactaccagcagattgatatgagaggaatgtatcagccagtggctggtggtatgcagccaccaccattacagcgtgcaccacccccaatgagaagcaaaaatccaggaccttcccaagggaaatcaatgtgattttgcactaaaagcttaatggattgttaaaatcatagaaagatcttttatttttttaggaatcaatgacttaacagaactcaactgtataaatagtttggtccccttaaatgccaatcttccatattagttttacttttttttttttaaatagggcataccatttcttcctgacatttgtcagtgatgttgcctagaatcttcttacacacgctgagtacagaagatatttcaaattgttttcagtgaaaacaagtccttccataatagtaacaactccacagatttcctctctaaatttttatgcctgcttttagcaaccataaaattgtcataaaattaataaatttaggaaagaataaagatttatatattcattctttacatataaaaacacacagctgagttcttagagttgattcctcaagttatgaaatacttttgtacttaatccatttcttgattaaagtgattgaaatggttttaatgttcttttgactgaagtctgaaactgggctcctgctttattgtctctgtgactgaaagttagaaactgagggttatctttgacacagaattgtgtgcaatattcttaaatactactgctctaaaagttggagaagtcttgcagttatcttagcattgtataaacagccttaagtatagcctaagaagagaattcctttttcttctttagtccttctgccattttttattttcagttatatgtgctgaaataattactggtaaaatttcagggttgtggattatcttccacacatgaattttctctctcctggcacgaatataaagcacatctcttaactgcatggtgccagtgctaatgcttcatcctgttgctggcagtgggatgtggacttagaaaatcaagttctagcattttagtaggttaacactgaagttgtggttgttaggttcacaccctgttttataaacaacatcaaaatggcagaaccattgctgactttaggttcacatgaggaatgtacttttaacaattcccagtactatcagtattgtgaaataattcctctgaaagataagaatcactggcttctatgcgcttcttttctctcatcatcatgttcttttaccccagtttccttacatttttttaaattgtttcagagtttgttttttttttagtttagattgtgaggcaattattaaatcaaaattaattcatccaatacccctttactagaagttttactagaaaatgtattacattttattttttcttaatccagttctgcaaaaatgacctataaatttattcatgtacaattttggttacttgaattgttaaagaaaacattgtttttgactatgggagtcaactcaacatggcagaaccatttttgagatgatgatacaacaggtagtgaaacagcttaagaattccaaaaaaaaaaaaaaaaaaaaaaaaaaagaaaactgggtttgggctttgctttaggtatcactggattagaatgagtttaacattagctaaaactgctttgagttgtttggatgattaagagattgccatttttatcttggaagaactagtggtaaaacatccaagagcactaggattgtgatacagaatttgtgaggtttggtggatccacgcccctctcccccactttcccatgatgaaatatcactaataaatcctgtatatttagatattatgctagccatgtaatcagatttatttaattgggtggggcaggtgtgtatttactttagaaaaaatgaaaaagacaagatttatgagaaatatttgaaggcagtacactctggccaactgttaccagttggtatttctacaagttcagaatattttaaacctgatttactagacctgggaattttcaacatggtctaattatttactcaaagacatagatgtgaaaattttaggcaaccttctaaatctttttcaccatggatgaaactataacttaaagaataatacttagaagggttaattggaaatcagagtttgaaataaaacttggaccactttgtatacactcttctcacttgacattttagctatataatatgtactttgagtataacatcaagctttaacaaatatttaaagacaaaaaaatcacgtcagtaaaatactaaaaggctcatttttatatttgttttagatgttttaaatagttgcaatggattaaaaatgatgatttaaaatgttgcttgtaatacagttttgcctgctaaattctccacattttgtaacctgttttatttctttgggtgtaaagcgtttttgcttagtattgtgatattgtatatgttttgtcccagttgtatagtaatgtttcagtccatcatccagctttggctgctgaaatcatacagctgtgaagacttgcctttgtttctgttagactgcttttcagttctgtattgagtatcttaagtactgtagaaaagatgtcacttcttcctttaaggctgttttgtaatatatataaggactggaattgtgtttttaaagaaaagcattcaagtatgacaatatactatctgtgttttcaccattcaaagtgctgtttagtagttgaaacttaaactatttaatgtcatttaataaagtgaccaaaatgtg

SEQ ID NO: 362096 - DNA, 3224 bp, Homo sapiens
cactgtttgttgcttctacaactttttctcttccttgattaatgaggtcctccagctgttgattactcattgctgacagggctcccaaattgaaaggaatgtaaggagtttgagagttgaaactgacagtgtgacagcagtgaggattcaacctcttgaggatataatttcagctgtatggaaggagaacatgaatctctcagaggcccaagtacaggcgttagcattaagtagacaagccagccaggagcttgatgttaaacgaagagaagcaatctacaatgatgtattgacaaaacaacagatgttaatcagctgtgttcagcgaatacttatgaacagaaggctccagcagcagtacaatcagcagcaacagcaacaaatgacttatcaacaagcaacactgggtcacctcatgatgccaaagcccccaaatttgatcatgaatccttctaactaccagcagattgatatgagaggaatgtatcagccagtggctggtggtatgcagccaccaccattacagcgtgcaccacccccaatgagaagcaaaaatccaggaccttcccaagggaaatcaatgtgattttgcactaaaagcttaatggattgttaaaatcatagaaagatcttttatttttttaggaatcaatgacttaacagaactcaactgtataaatagtttggtccccttaaatgccaatcttccatattagttttacttttttttttttaaatagggcataccatttcttcctgacatttgtcagtgatgttgcctagaatcttcttacacacgctgagtacagaagatatttcaaattgttttcagtgaaaacaagtccttccataatagtaacaactccacagatttcctctctaaatttttatgcctgcttttagcaaccataaaattgtcataaaattaataaatttaggaaagaataaagatttatatattcattctttacatataaaaacacacagctgagttcttagagttgattcctcaagttatgaaatacttttgtacttaatccatttcttgattaaagtgattgaaatggttttaatgttcttttgactgaagtctgaaactgggctcctgctttattgtctctgtgactgaaagttagaaactgagggttatctttgacacagaattgtgtgcaatattcttaaatactactgctctaaaagttggagaagtcttgcagttatcttagcattgtataaacagccttaagtatagcctaagaagagaattcctttttcttctttagtccttctgccattttttattttcagttatatgtgctgaaataattactggtaaaatttcagggttgtggattatcttccacacatgaattttctctctcctggcacgaatataaagcacatctcttaactgcatggtgccagtgctaatgcttcatcctgttgctggcagtgggatgtggacttagaaaatcaagttctagcattttagtaggttaacactgaagttgtggttgttaggttcacaccctgttttataaacaacatcaaaatggcagaaccattgctgactttaggttcacatgaggaatgtacttttaacaattcccagtactatcagtattgtgaaataattcctctgaaagataagaatcactggcttctatgcgcttcttttctctcatcatcatgttcttttaccccagtttccttacatttttttaaattgtttcagagtttgttttttttttagtttagattgtgaggcaattattaaatcaaaattaattcatccaatacccctttactagaagttttactagaaaatgtattacattttattttttcttaatccagttctgcaaaaatgacctataaatttattcatgtacaattttggttacttgaattgttaaagaaaacattgtttttgactatgggagtcaactcaacatggcagaaccatttttgagatgatgatacaacaggtagtgaaacagcttaagaattccaaaaaaaaaaaaaaaaaaaaaaaaaaagaaaactgggtttgggctttgctttaggtatcactggattagaatgagtttaacattagctaaaactgctttgagttgtttggatgattaagagattgccatttttatcttggaagaactagtggtaaaacatccaagagcactaggattgtgatacagaatttgtgaggtttggtggatccacgcccctctcccccactttcccatgatgaaatatcactaataaatcctgtatatttagatattatgctagccatgtaatcagatttatttaattgggtggggcaggtgtgtatttactttagaaaaaatgaaaaagacaagatttatgagaaatatttgaaggcagtacactctggccaactgttaccagttggtatttctacaagttcagaatattttaaacctgatttactagacctgggaattttcaacatggtctaattatttactcaaagacatagatgtgaaaattttaggcaaccttctaaatctttttcaccatggatgaaactataacttaaagaataatacttagaagggttaattggaaatcagagtttgaaataaaacttggaccactttgtatacactcttctcacttgacattttagctatataatatgtactttgagtataacatcaagctttaacaaatatttaaagacaaaaaaatcacgtcagtaaaatactaaaaggctcatttttatatttgttttagatgttttaaatagttgcaatggattaaaaatgatgatttaaaatgttgcttgtaatacagttttgcctgctaaattctccacattttgtaacctgttttatttctttgggtgtaaagcgtttttgcttagtattgtgatattgtatatgttttgtcccagttgtatagtaatgtttcagtccatcatccagctttggctgctgaaatcatacagctgtgaagacttgcctttgtttctgttagactgcttttcagttctgtattgagtatcttaagtactgtagaaaagatgtcacttcttcctttaaggctgttttgtaatatatataaggactggaattgtgtttttaaagaaaagcattcaagtatgacaatatactatctgtgttttcaccattcaaagtgctgtttagtagttgaaacttaaactatttaatgtcatttaataaagtgaccaaaatgtg

SEQ ID NO: 362097 - DNA, 6598 bp, Homo sapiens
ctgagcctcggcccaacaaaatggcggcggcagcggtgtcgctttgtttccgcggctcctgcggcggtggcagtggtagcggcctttgagctgtggggaggttccagcagcagctacagtgacgactaagactccagtgcatttctatcgtaaccgggcgcgggggagcgcagatcggcgcccagcaatcacagaagccgacaaggcgttcaagcgaaaacatgaccgctgagcccatgagtgaaagcaagttgaatacattggtgcagaagcttcatgacttccttgcacactcatcagaagaatctgaagaaacaagttctcctccacgacttgcaatgaatcaaaacacagataaaatcagtggttctggaagtaactctgatatgatggaaaacagcaaggaagagggaactagctcttcagaaaaatccaagtcttcaggatcgtcacgatcaaagaggaaaccttcaattgtaacaaagtatgtagaatcagatgatgaaaaacctttggatgatgaaactgtaaatgaagatgcgtctaatgaaaattcagaaaatgatattactatgcagagcttgccaaaaggtacagtgattgtacagccagagccagtgctgaatgaagacaaagatgattttaaagggcctgaatttagaagcagaagtaaaatgaaaactgaaaatctcaaaaaacgcggagaagatgggcttcatgggattgtgagctgcactgcttgtggacaacaggtcaatcattttcaaaaagattccatttatagacacccttcattgcaagttcttatttgtaagaattgctttaagtattacatgagtgatgatattagccgtgactcagatggaatggatgaacaatgtaggtggtgtgcggaaggtggaaacttgatttgttgtgacttttgccataatgctttctgcaagaaatgcattctacgcaaccttggtcgaaaggagttgtccacaataatggatgaaaacaaccaatggtattgctacatttgtcacccagagcctttgttggacttggtcactgcatgtaacagcgtatttgagaatttagaacagttgttgcagcaaaataagaagaagataaaagttgacagtgaaaagagtaataaagtatatgaacatacatccagattttctccaaagaagactagttcaaattgtaatggagaagaaaagaaattagatgattcctgttctggctctgtaacctactcttattccgcactaattgtgcccaaagagatgattaagaaggcaaaaaaactgattgagaccacagccaacatgaactccagttatgttaaatttttaaagcaggcaacagataattcagaaatcagttctgctacaaaattacgtcagcttaaggcttttaagtctgtgttggctgatattaagaaggctcatcttgcattggaagaagacttaaattccgagtttcgagcgatggatgctgtaaacaaagagaaaaataccaaagagcataaagtcatagatgctaagtttgaaacaaaagcacgaaaaggagaaaaaccttgtgctttggaaaagaaggatatttcaaagtcagaagctaaactttcaagaaaacaggtagatagtgagcacatgcatcagaatgttccaacagaggaacaaagaacaaataaaagtaccggtggtgaacataagaaatctgatagaaaagaagaacctcaatatgaacctgccaacacttctgaagatttagacatggatattgtgtctgttccttcctcagttccagaagacatttttgagaatcttgagactgctatggaagttcagagttcagttgatcatcaaggggatggcagcagtggaactgaacaagaagtggagagttcatctgtaaaattaaatatttcttcaaaagacaacagaggaggtattaaatcaaaaactacagctaaagtaacaaaagaattatatgttaaactcactcctgtttccctttctaattccccaattaaaggtgctgattgtcaggaagttccacaagataaagatggctataaaagttgtggtctgaaccccaagttagagaaatgtggacttggacaggaaaacagtgataatgagcatttggttgaaaatgaagtttcattacttttagaggaatctgatcttcgaagatccccacgtgtaaagactacacccttgaggcgaccgacagaaactaaccctgtaacatctaattcagatgaagaatgtaatgaaacagttaaggagaaacaaaaactatcagttccagtgagaaaaaaggataagcgtaattcttctgacagtgctatagataatcctaagcctaataaattgccaaaatctaagcaatcagagactgtggatcaaaattcagattctgatgaaatgctagcaatcctcaaagaggtgagcaggatgagtcacagttcttcttcagatactgatattaatgaaattcatacaaaccataagactttgtatgatttaaagactcaggcggggaaagatgataaaggaaaaaggaaacgaaaaagttctacatctggctcagattttgatactaaaaagggcaaatcagctaagagctctataatttctaaaaagaaacgacaaacccagtctgagtcttctaattatgactcagaattagaaaaagagataaagagcatgagtaaaattggtgctgccagaaccaccaaaaaaagaattccaaatacaaaagattttgactcttctgaagatgagaaacacagcaaaaaaggaatggataatcaagggcacaaaaatttgaagacctcacaagaaggatcatctgatgatgctgaaagaaaacaagagagagagactttctcttcagcagaaggcacagttgataaagacacgaccatcatggaattaagagatcgacttcctaagaagcagcaagcaagtgcttccactgatggtgtcgataagctttctgggaaagagcagagttttacttctttggaagttagaaaagttgctgaaactaaagaaaagagcaagcatctcaaaaccaaaacatgtaaaaaagtacaggatggcttatctgatattgcagagaaattcctaaagaaagaccagagcgatgaaacttctgaagatgataaaaagcagagcaaaaagggaactgaagaaaaaaagaaaccttcagactttaagaaaaaagtaattaaaatggaacaacagtatgaatcttcatctgatggcactgaaaagttacctgagcgagaagaaatttgtcattttcctaagggcataaaacaaattaagaatggaacaactgatggagaaaagaaaagtaaaaaaataagagataaaacttctaaaaagaaggatgaattatctgattatgctgagaagtcaacagggaaaggagatagttgtgactcttcagaggataaaaagagtaagaatggagcatatggtagagagaagaaaaggtgcaagttgcttggaaagagttcaaggaagagacaagattgttcatcatctgatactgagaaatattccatgaaagaagatggttgtaactcttctgataagagactgaaaagaatagaattgagggaaagaagaaatttaagttcaaagagaaatactaaggaaatacaaagtggctcatcatcatctgatgctgaggaaagttctgaagataataaaaagaagaagcaaagaacttcatctaaaaagaaggcagtcattgtcaaggagaaaaagagaaactccctaagaacaagcactaaaaggaagcaagctgacattacatcctcatcttcttctgatatagaagatgatgatcagaattctataggtgagggaagcagcgatgaacagaaaattaagcctgtgactgaaaatttagtgctgtcttcacatactggattttgccaatcttcaggagatgaagccttatctaaatcagtgcctgtcacagtggatgatgatgatgacgacaatgatcctgagaatagaattgccaagaagatgcttttagaagaaattaaagccaatctttcctctgatgaggatggatcttcagatgatgagccagaagaagggaaaaaaagaactggaaaacaaaatgaagaaaacccaggagatgaggaagcaaaaaatcaagtcaattctgaatcagattcagattctgaagaatctaagaagccaagatacagacataggcttttgcggcacaaattgactgtgagtgacggagaatctggagaagaaaaaaagacaaagcctaaagagcataaagaagtcaaaggcagaaacagaagaaaggtgagcagtgaagattcagaagattctgattttcaggaatcaggagttagtgaagaagttagtgaatccgaagatgaacagcggcccagaacaaggtctgcaaagaaagcagagttggaagaaaatcagcggagctataaacagaaaaagaaaaggcgacgtattaaggttcaagaagattcatccagtgaaaacaagagtaattctgaggaagaagaggaggaaaaagaagaggaggaggaagaggaggaggaggaggaagaggaggaggaagatgaaaatgatgattccaagtctcctggaaaaggcagaaagaaaattcggaagattcttaaagatgataaactgagaacagaaacacaaaatgctcttaaggaagaggaagagagacgaaaacgtattgctgagagggagcgtgagcgagaaaaattgagagaggtgatagaaattgaagatgcttcacccaccaagtgtccaataacaaccaagttggttttagatgaagatgaagaaaccaaagaacctttagtgcaggttcatagaaatatggttatcaaattgaaaccccatcaagtagatggtgttcagtttatgtgggattgctgctgtgagtctgtgaaaaaaacaaagaaatctccaggttcaggatgcattcttgcccactgtatgggccttggtaagactttacaggtggtaagttttcttcatacagttcttttgtgtgacaaactggatttcagcacggcgttagtggtttgtcctcttaatactgctttgaattggatgaatgaatttgagaagtggcaagagggattaaaagatgatgagaagcttgaggtttctgaattagcaactgtgaaacgtcctcaggagagaagctacatgctgcagaggtggcaagaagatggtggtgttatgatcataggctatgagatgtatagaaatcttgctcaaggaaggaatgtgaagagtcggaaacttaaagaaatatttaacaaagctttggttgatccaggccctgattttgttgtttgtgatgaaggccatattctaaaaaatgaagcatctgctgtttctaaagctatgaattctatacgatcaaggaggaggattattttaacaggaacaccacttcaaaataacctaattgagtatcattgtatggttaattttatcaaggaaaatttacttggatccattaaggagttcaggaatagatttataaatccaattcaaaatggtcagtgtgcagattctaccatggtagatgtcagagtgatgaaaaaacgtgctcacattctctatgagatgttagctggatgtgttcagaggaaagattatacagcattaacaaaattcttgcctccaaaacacgaatatgtgttagctgtgagaatgacttctattcagtgcaagctctatcagtactacttagatcacttaacaggtgtgggcaataatagtgaaggtggaagaggaaaggcaggtgcaaagcttttccaagattttcagatgttaagtagaatatggactcatccttggtgtttgcagctagactacattagcaaagaaaataagggttattttgatgaagacagtatggatgaatttatagcctcagattctgatgaaacctccatgagtttaagctccgatgattatacaaaaaagaagaaaaaagggaaaaaggggaaaaaagatagtagctcaagtggaagtggcagtgacaatgatgttgaagtgattaaggtctggaattcaagatctcggggaggtggtgaaggaaatgtggatgaaacaggaaacaatccttctgtttctttaaaactggaagaaagtaaagctacttcttcttctaatccaagcagcccagctccagactggtacaaagattttgttacagatgctgatgctgaggttttagagcattctgggaaaatggtacttctctttgaaattcttcgaatggcagaggaaattggggataaagtccttgttttcagccagtccctcatatctctggacttgattgaagattttcttgaattagctagtagggagaagacagaagataaagataaaccccttatttataaaggtgaggggaagtggcttcgaaacattgactattaccgtttagatggttccactactgcacagtcaaggaagaagtgggctgaagaatttaatgatgaaactaatgtgagaggacgattatttatcatttcgtacttaacggatcagcggaactctaggca

SEQ ID NO: 362098 - DNA, 5860 bp, Homo sapiens
ctgagcctcggcccaacaaaatggcggcggcagcggtgtcgctttgtttccgcggctcctgcggcggtggcagtggtagcggcctttgagctgtggggaggttccagcagcagctacagtgacgactaagactccagtgcatttctatcgtaaccgggcgcgggggagcgcagatcggcgcccagcaatcacagaagccgacaaggcgttcaagcgaaaacatgaccgctgagcccatgagtgaaagcaagttgaatacattggtgcagaagcttcatgacttccttgcacactcatcagaagaatctgaagaaacaagttctcctccacgacttgcaatgaatcaaaacacagataaaatcagtggttctggaagtaactctgatatgatggaaaacagcaaggaagagggaactagctcttcagaaaaatccaagtcttcaggatcgtcacgatcaaagaggaaaccttcaattgtaacaaagtatgtagaatcagatgatgaaaaacctttggatgatgaaactgtaaatgaagatgcgtctaatgaaaattcagaaaatgatattactatgcagagcttgccaaaaggtacagtgattgtacagccagagccagtgctgaatgaagacaaagatgattttaaagggcctgaatttagaagcagaagtaaaatgaaaactgaaaatctcaaaaaacgcggagaagatgggcttcatgggattgtgagctgcactgcttgtggacaacaggtcaatcattttcaaaaagattccatttatagacacccttcattgcaagttcttatttgtaagaattgctttaagtattacatgagtgatgatattagccgtgactcagatggaatggatgaacaatgtaggtggtgtgcggaaggtggaaacttgatttgttgtgacttttgccataatgctttctgcaagaaatgcattctacgcaaccttggtcgaaaggagttgtccacaataatggatgaaaacaaccaatggtattgctacatttgtcacccagagcctttgttggacttggtcactgcatgtaacagcgtatttgagaatttagaacagttgttgcagcaaaataagaagaagataaaagttgacagtgaaaagagtaataaagtatatgaacatacatccagattttctccaaagaagactagttcaaattgtaatggagaagaaaagaaattagatgattcctgttctggctctgtaacctactcttattccgcactaattgtgcccaaagagatgattaagaaggcaaaaaaactgattgagaccacagccaacatgaactccagttatgttaaatttttaaagcaggcaacagataattcagaaatcagttctgctacaaaattacgtcagcttaaggcttttaagtctgtgttggctgatattaagaaggctcatcttgcattggaagaagacttaaattccgagtttcgagcgatggatgctgtaaacaaagagaaaaataccaaagagcataaagtcatagatgctaagtttgaaacaaaagcacgaaaaggagaaaaaccttgtgctttggaaaagaaggatatttcaaagtcagaagctaaactttcaagaaaacaggtagatagtgagcacatgcatcagaatgttccaacagaggaacaaagaacaaataaaagtaccggtggtgaacataagaaatctgatagaaaagaagaacctcaatatgaacctgccaacacttctgaagatttagacatggatattgtgtctgttccttcctcagttccagaagacatttttgagaatcttgagactgctatggaagttcagagttcagttgatcatcaaggggatggcagcagtggaactgaacaagaagtggagagttcatctgtaaaattaaatatttcttcaaaagacaacagaggaggtattaaatcaaaaactacagctaaagtaacaaaagaattatatgttaaactcactcctgtttccctttctaattccccaattaaaggtgctgattgtcaggaagttccacaagataaagatggctataaaagttgtggtctgaaccccaagttagagaaatgtggacttggacaggaaaacagtgataatgagcatttggttgaaaatgaagtttcattacttttagaggaatctgatcttcgaagatccccacgtgtaaagactacacccttgaggcgaccgacagaaactaaccctgtaacatctaattcagatgaagaatgtaatgaaacagttaaggagaaacaaaaactatcagttccagtgagaaaaaaggataagcgtaattcttctgacagtgctatagataatcctaagcctaataaattgccaaaatctaagcaatcagagactgtggatcaaaattcagattctgatgaaatgctagcaatcctcaaagaggtgagcaggatgagtcacagttcttcttcagatactgatattaatgaaattcatacaaaccataagactttgtatgatttaaagactcaggcggggaaagatgataaaggaaaaaggaaacgaaaaagttctacatctggctcagattttgatactaaaaagggcaaatcagctaagagctctataatttctaaaaagaaacgacaaacccagtctgagtcttctaattatgactcagaattagaaaaagagataaagagcatgagtaaaattggtgctgccagaaccaccaaaaaaagaattccaaatacaaaagattttgactcttctgaagatgagaaacacagcaaaaaaggaatggataatcaagggcacaaaaatttgaagacctcacaagaaggatcatctgatgatgctgaaagaaaacaagagagagagactttctcttcagcagaaggcacagttgataaagacacgaccatcatggaattaagagatcgacttcctaagaagcagcaagcaagtgcttccactgatggtgtcgataagctttctgggaaagagcagagttttacttctttggaagttagaaaagttgctgaaactaaagaaaagagcaagcatctcaaaaccaaaacatgtaaaaaagtacaggatggcttatctgatattgcagagaaattcctaaagaaagaccagagcgatgaaacttctgaagatgataaaaagcagagcaaaaagggaactgaagaaaaaaagaaaccttcagactttaagaaaaaagtaattaaaatggaacaacagtatgaatcttcatctgatggcactgaaaagttacctgagcgagaagaaatttgtcattttcctaagggcataaaacaaattaagaatggaacaactgatggagaaaagaaaagtaaaaaaataagagataaaacttctaaaaagaaggatgaattatctgattatgctgagaagtcaacagggaaaggagatagttgtgactcttcagaggataaaaagagtaagaatggagcatatggtagagagaagaaaaggtgcaagttgcttggaaagagttcaaggaagagacaagattgttcatcatctgatactgagaaatattccatgaaagaagatggttgtaactcttctgataagagactgaaaagaatagaattgagggaaagaagaaatttaagttcaaagagaaatactaaggaaatacaaagtggctcatcatcatctgatgctgaggaaagttctgaagataataaaaagaagaagcaaagaacttcatctaaaaagaaggcagtcattgtcaaggagaaaaagagaaactccctaagaacaagcactaaaaggaagcaagctgacattacatcctcatcttcttctgatatagaagatgatgatcagaattctataggtgagggaagcagcgatgaacagaaaattaagcctgtgactgaaaatttagtgctgtcttcacatactggattttgccaatcttcaggagatgaagccttatctaaatcagtgcctgtcacagtggatgatgatgatgacgacaatgatcctgagaatagaattgccaagaagatgcttttagaagaaattaaagccaatctttcctctgatgaggatggatcttcagatgatgagccagaagaagggaaaaaaagaactggaaaacaaaatgaagaaaacccaggagatgaggaagcaaaaaatcaagtcaattctgaatcagattcagattctgaagaatctaagaagccaagatacagacataggcttttgcggcacaaattgactgtgagtgacggagaatctggagaagaaaaaaagacaaagcctaaagagcataaagaagtcaaaggcagaaacagaagaaaggtgagcagtgaagattcagaagattctgattttcaggaatcaggagttagtgaagaagttagtgaatccgaagatgaacagcggcccagaacaaggtctgcaaagaaagcagagttggaagaaaatcagcggagctataaacagaaaaagaaaaggcgacgtattaaggttcaagaagattcatccagtgaaaacaagagtaattctgaggaagaagaggaggaaaaagaagaggaggaggaagaggaggaggaggaggaagaggaggaggaagatgaaaatgatgattccaagtctcctggaaaaggcagaaagaaaattcggaagattcttaaagatgataaactgagaacagaaacacaaaatgctcttaaggaagaggaagagagacgaaaacgtattgctgagagggagcgtgagcgagaaaaattgagagaggtgatagaaattgaagatgcttcacccaccaagtgtccaataacaaccaagttggttttagatgaagatgaagaaaccaaagaacctttagtgcaggttcatagaaatatggttatcaaattgaaaccccatcaagtagatggtgttcagtttatgtgggattgctgctgtgagtctgtgaaaaaaacaaagaaatctccaggttcaggatgcattcttgcccactgtatgggccttggtaagactttacaggtggtaagttttcttcatacagttcttttgtgtgacaaactggatttcagcacggcgttagtggtttgtcctcttaatactgctttgaattggatgaatgaatttgagaagtggcaagagggattaaaagatgatgagaagcttgaggtttctgaattagcaactgtgaaacgtcctcaggagagaagctacatgctgcagaggtggcaagaagatggtggtgttatgatcataggctatgagatgtatagaaatcttgctcaaggaaggaatgtgaagagtcggaaacttaaagaaatatttaacaaagctttggttgatccaggtaaggtattaatagacagtgacataaagaagcaagttgaataaaaaatgtgtttatattttaacaaatagtaattgcacagctactaagtatctggtctttgttgtggttatccttcaggtttttgccttttagaaaattcttagtatttcaatagaataaaatcacccttaatgtcgccagctgttcagaatttatttgctgagtctgaaagtgtttagggttttaggggataccttgtaaacacttaaaaatgcatcaaatgcctgtgttgcaatcaaagattcttccagctatccaaatattaggtgataacaagagctctctccatatcctgaaaacagtttgtgtctttccaaacttcatgtcattagaagaattgctgcttgcttatctccttttaaggggccatcagtatgaaaggttaatattttcaatactgttgatccttatgtgatagtaatctgatgtgagagccagatgttgatatatttgccacttggaa

SEQ ID NO: 362099 - DNA, 4442 bp, Homo sapiens
ctgagcctcggcccaacaaaatggcggcggcagcggtgtcgctttgtttccgcggctcctgcggcggtggcagtggtagcggcctttgagctgtggggaggttccagcagcagctacagtgacgactaagactccagtgcatttctatcgtaaccgggcgcgggggagcgcagatcggcgcccagcaatcacagaagccgacaaggcgttcaagcgaaaacatgaccgctgagcccatgagtgaaagcaagttgaatacattggtgcagaagcttcatgacttccttgcacactcatcagaagaatctgaagaaacaagttctcctccacgacttgcaatgaatcaaaacacagataaaatcagtggttctggaagtaactctgatatgatggaaaacagcaaggaagagggaactagctcttcagaaaaatccaagtcttcaggatcgtcacgatcaaagaggaaaccttcaattgtaacaaagtatgtagaatcagatgatgaaaaacctttggatgatgaaactgtaaatgaagatgcgtctaatgaaaattcagaaaatgatattactatgcagagcttgccaaaaggtacagtgattgtacagccagagccagtgctgaatgaagacaaagatgattttaaagggcctgaatttagaagcagaagtaaaatgaaaactgaaaatctcaaaaaacgcggagaagatgggcttcatgggattgtgagctgcactgcttgtggacaacaggtcaatcattttcaaaaagattccatttatagacacccttcattgcaagttcttatttgtaagaattgctttaagtattacatgagtgatgatattagccgtgactcagatggaatggatgaacaatgtaggtggtgtgcggaaggtggaaacttgatttgttgtgacttttgccataatgctttctgcaagaaatgcattctacgcaaccttggtcgaaaggagttgtccacaataatggatgaaaacaaccaatggtattgctacatttgtcacccagagcctttgttggacttggtcactgcatgtaacagcgtatttgagaatttagaacagttgttgcagcaaaataagaagaagataaaagttgacagtgaaaagagtaataaagtatatgaacatacatccagattttctccaaagaagactagttcaaattgtaatggagaagaaaagaaattagatgattcctgttctggctctgtaacctactcttattccgcactaattgtgcccaaagagatgattaagaaggcaaaaaaactgattgagaccacagccaacatgaactccagttatgttaaatttttaaagcaggcaacagataattcagaaatcagttctgctacaaaattacgtcagcttaaggcttttaagtctgtgttggctgatattaagaaggctcatcttgcattggaagaagacttaaattccgagtttcgagcgatggatgctgtaaacaaagagaaaaataccaaagagcataaagtcatagatgctaagtttgaaacaaaagcacgaaaaggagaaaaaccttgtgctttggaaaagaaggatatttcaaagtcagaagctaaactttcaagaaaacaggtagatagtgagcacatgcatcagaatgttccaacagaggaacaaagaacaaataaaagtaccggtggtgaacataagaaatctgatagaaaagaagaacctcaatatgaacctgccaacacttctgaagatttagacatggatattgtgtctgttccttcctcagttccagaagacatttttgagaatcttgagactgctatggaagttcagagttcagttgatcatcaaggggatggcagcagtggaactgaacaagaagtggagagttcatctgtaaaattaaatatttcttcaaaagacaacagaggaggtattaaatcaaaaactacagctaaagtaacaaaagaattatatgttaaactcactcctgtttccctttctaattccccaattaaaggtgctgattgtcaggaagttccacaagataaagatggctataaaagttgtggtctgaaccccaagttagagaaatgtggacttggacaggaaaacagtgataatgagcatttggttgaaaatgaagtttcattacttttagaggaatctgatcttcgaagatccccacgtgtaaagactacacccttgaggcgaccgacagaaactaaccctgtaacatctaattcagatgaagaatgtaatgaaacagttaaggagaaacaaaaactatcagttccagtgagaaaaaaggataagcgtaattcttctgacagtgctatagataatcctaagcctaataaattgccaaaatctaagcaatcagagactgtggatcaaaattcagattctgatgaaatgctagcaatcctcaaagaggtgagcaggatgagtcacagttcttcttcagatactgatattaatgaaattcatacaaaccataagactttgtatgatttaaagactcaggcggggaaagatgataaaggaaaaaggaaacgaaaaagttctacatctggctcagattttgatactaaaaagggcaaatcagctaagagctctataatttctaaaaagaaacgacaaacccagtctgagtcttctaattatgactcagaattagaaaaagagataaagagcatgagtaaaattggtgctgccagaaccaccaaaaaaagaattccaaatacaaaagattttgactcttctgaagatgagaaacacagcaaaaaaggaatggataatcaagggcacaaaaatttgaagacctcacaagaaggatcatctgatgatgctgaaagaaaacaagagagagagactttctcttcagcagaaggcacagttgataaagacacgaccatcatggaattaagagatcgacttcctaagaagcagcaagcaagtgcttccactgatggtgtcgataagctttctgggaaagagcagagttttacttctttggaagttagaaaagttgctgaaactaaagaaaagagcaagcatctcaaaaccaaaacatgtaaaaaagtacaggatggcttatctgatattgcagagaaattcctaaagaaagaccagagcgatgaaacttctgaagatgataaaaagcagagcaaaaagggaactgaagaaaaaaagaaaccttcagactttaagaaaaaagtaattaaaatggaacaacagtatgaatcttcatctgatggcactgaaaagttacctgagcgagaagaaatttgtcattttcctaagggcataaaacaaattaagaatggaacaactgatggagaaaagaaaagtaaaaaaataagagataaaacttctaaaaagaaggatgaattatctgattatgctgagaagtcaacagggaaaggagatagttgtgactcttcagaggataaaaagagtaagaatggagcatatggtagagagaagaaaaggtgcaagttgcttggaaagagttcaaggaagagacaagattgttcatcatctgatactgagaaatattccatgaaagaagatggttgtaactcttctgataagagactgaaaagaatagaattgagggaaagaagaaatttaagttcaaagagaaatactaaggaaatacaaagtggctcatcatcatctgatgctgaggaaagttctgaagataataaaaagaagaagcaaagaacttcatctaaaaagaaggcagtcattgtcaaggagaaaaagagaaactccctaagaacaagcactaaaaggaagcaagctgacattacatcctcatcttcttctgatatagaagatgatgatcagaattctataggtgagggaagcagcgatgaacagaaaattaagcctgtgactgaaaatttagtgctgtcttcacatactggattttgccaatcttcaggagatgaagccttatctaaatcagtgcctgtcacagtggatgatgatgatgacgacaatgatcctgagaatagaattgccaagaagatgcttttagaagaaattaaagccaatctttcctctgatgaggatggatcttcagatgatgagccagaagaagggaaaaaaagaactggaaaactggaaactctaaaacgcagagtgcctctcctcctccaaaagaacgcagttcctcaccagcaacggaacaaagctggatggagaatgatttgacgagctgagagaagaaggttcagacgatcaattactctgagctacgggaggacattcaaaccaaggcaagaagttgaaacttgaaaaattgaagatgttatagataccatacagagagtgttaaggaatgatgggtgaaaacaaggtcagaatagtgaaatgggagctcgggcgatggtcatgggaaggttcctgcgatgaatgttgtgtggg

SEQ ID NO: 362100 - DNA, 3417 bp, Homo sapiens
ctgagcctcggcccaacaaaatggcggcggcagcggtgtcgctttgtttccgcggctcctgcggcggtggcagtggtagcggcctttgagctgtggggaggttccagcagcagctacagtgacgactaagactccagtgcatttctatcgtaaccgggcgcgggggagcgcagatcggcgcccagcaatcacagaagccgacaaggcgttcaagcgaaaacatgaccgctgagcccatgagtgaaagcaagttgaatacattggtgcagaagcttcatgacttccttgcacactcatcagaagaatctgaagaaacaagttctcctccacgacttgcaatgaatcaaaacacagataaaatcagtggttctggaagtaactctgatatgatggaaaacagcaaggaagagggaactagctcttcagaaaaatccaagtcttcaggatcgtcacgatcaaagaggaaaccttcaattgtaacaaagtatgtagaatcagatgatgaaaaacctttggatgatgaaactgtaaatgaagatgcgtctaatgaaaattcagaaaatgatattactatgcagagcttgccaaaaggtacagtgattgtacagccagagccagtgctgaatgaagacaaagatgattttaaagggcctgaatttagaagcagaagtaaaatgaaaactgaaaatctcaaaaaacgcggagaagatgggcttcatgggattgtgagctgcactgcttgtggacaacaggtcaatcattttcaaaaagattccatttatagacacccttcattgcaagttcttatttgtaagaattgctttaagtattacatgagtgatgatattagccgtgactcagatggaatggatgaacaatgtaggtggtgtgcggaaggtggaaacttgatttgttgtgacttttgccataatgctttctgcaagaaatgcattctacgcaaccttggtcgaaaggagttgtccacaataatggatgaaaacaaccaatggtattgctacatttgtcacccagagcctttgttggacttggtcactgcatgtaacagcgtatttgagaatttagaacagttgttgcagcaaaataagaagaagataaaagttgacagtgaaaagagtaataaagtatatgaacatacatccagattttctccaaagaagactagttcaaattgtaatggagaagaaaagaaattagatgattcctgttctggctctgtaacctactcttattccgcactaattgtgcccaaagagatgattaagaaggcaaaaaaactgattgagaccacagccaacatgaactccagttatgttaaatttttaaagcaggcaacagataattcagaaatcagttctgctacaaaattacgtcagcttaaggcttttaagtctgtgttggctgatattaagaaggctcatcttgcattggaagaagacttaaattccgagtttcgagcgatggatgctgtaaacaaagagaaaaataccaaagagcataaagtcatagatgctaagtttgaaacaaaagcacgaaaaggagaaaaaccttgtgctttggaaaagaaggatatttcaaagtcagaagctaaactttcaagaaaacaggtagatagtgagcacatgcatcagaatgttccaacagaggaacaaagaacaaataaaagtaccggtggtgaacataagaaatctgatagaaaagaagaacctcaatatgaacctgccaacacttctgaagatttagacatggatattgtgtctgttccttcctcagttccagaagacatttttgagaatcttgagactgctatggaagttcagagttcagttgatcatcaaggggatggcagcagtggaactgaacaagaagtggagagttcatctgtaaaattaaatatttcttcaaaagacaacagaggaggtattaaatcaaaaactacagctaaagtaacaaaagaattatatgttaaactcactcctgtttccctttctaattccccaattaaaggtgctgattgtcaggaagttccacaagataaagatggctataaaagttgtggtctgaaccccaagttagagaaatgtggacttggacaggaaaacagtgataatgagcatttggttgaaaatgaagtttcattacttttagaggaatctgatcttcgaagatccccacgtgtaaagactacacccttgaggcgaccgacagaaactaaccctgtaacatctaattcagatgaagaatgtaatgaaacagttaaggagaaacaaaaactatcagttccagtgagaaaaaaggataagcgtaattcttctgacagtgctatagataatcctaagcctaataaattgccaaaatctaagcaatcagagactgtggatcaaaattcagattctgatgaaatgctagcaatcctcaaagaggtgagcaggatgagtcacagttcttcttcagatactgatattaatgaaattcatacaaaccataagactttgtatgatttaaagactcaggcggggaaagatgataaaggaaaaaggaaacgaaaaagttctacatctggctcagattttgatactaaaaagggcaaatcagctaagagctctataatttctaaaaagaaacgacaaacccagtctgagtcttctaattatgactcagaattagaaaaagagataaagagcatgagtaaaattggtgctgccagaaccaccaaaaaaagaattccaaatacaaaagattttgactcttctgaagatgagaaacacagcaaaaaaggaatggataatcaagggcacaaaaatttgaagacctcacaagaaggatcatctgatgatgctgaaagaaaacaagagagagagactttctcttcagcagaaggcacagttgataaagacacgaccatcatggaattaagagatcgacttcctaagaagcagcaagcaagtgcttccactgatggtgtcgataagctttctgggaaagagcagagttttacttctttggaagttagaaaagttgctgaaactaaagaaaagagcaagcatctcaaaaccaaaacatgtaaaaaagtacaggatggcttatctgatattgcagagaaattcctaaagaaagaccagagcgatgaaacttctgaagatgataaaaagcagagcaaaaagggaactgaagaaaaaaagaaaccttcagactttaagaaaaaagtaattaaaatggaacaacagtatgaatcttcatctgatggcactgaaaagttacctgagcgagaagaaatttgtcattttcctaagggcataaaacaaattaagaatggaaactggcactgtgctggaataaagatgagacattttttttctttgtttttgattaggctttcctccagttgcaattgttaga

SEQ ID NO: 362101 - DNA, 516 bp, Homo sapiens
ctgagcctcggcccaacaaaatggcggcggcagcggtgtcgctttgtttccgcggctcctgcggcggtggcagtggtagcggcctttgagctgtggggaggttccagcagcagctacagtgacgactaagactccagtgcatttctatcgtaaccgggcgcgggggagcgcagatcggcgcccagcaatcacagaagccgacaaggcgttcaagcgaaaacatgaccgctgagcccatgagtgaaagcaagttgaatacattggtgcagaagcttcatgacttccttgcacactcatcagaagaatctgaagaaacaagttctcctccacgacttgcaatgaatcaaaacacagataaaatcagtggttctggaagtaactctgatatgatggaaaacagcaaggaagagggaactagctcttcagaaaaatccaagtcttcaggatcgtcacgatcaaagaggaaaccttcaattgtaaacaaaaatgactaaataaaaagtatatattcacagt

SEQ ID NO: 362102 - DNA, 369 bp, Homo sapiens
agtctctctctgtggccaccactgctccaggcccatggcaggtactgcctggctactgctgatgttcactcaaagcccaggccctcttcagtcagcttgtgttttgcaggtaatttggaactctgggaaacatctccaaacctcttccacgtctgcaaaatcttgcctttgcggggatggagactggacaaagtgtacaaggaagctccctgcattctttcttacatctgcatgtgaatctacaattatctcaaaaattttccaaagaaaacattccaaggactccgggcttggaactccaagaagagcgactgaatgaggcccttccagcccagctgaatacaactgggtacaaataaaaaatggcgg

SEQ ID NO: 362103 - DNA, 6084 bp, Homo sapiens
gggggtgggggtgccctgctgccccatatatacagcccctgagaccaggtctggctccacagctctgtcctgctctgtgtctttccctgctgctctcaggtcccctgcaggccttggcccctttcctcatctgtagacacacttgagtagcccaggcacagccatgggagattcggagatggcagtctttggggctgccgccccctacctgcgcaagtcagagaaggagcggctagaagcgcagaccaggccttttgacctcaagaaggatgtcttcgtgcctgatgacaaacaggagtttgtcaaggccaagatcgtgtctcgagagggtggcaaagtcactgccgagactgagtatggcaagacagtgaccgtgaaggaggaccaggtgatgcagcagaacccacccaagttcgacaaaatcgaggacatggccatgctgaccttcctgcatgagcccgcggtgctctacaacctcaaggatcgctacggctcctggatgatctacacctactcgggcctcttctgtgtcaccgtcaacccttacaagtggctgccggtgtacactcctgaggtggtggctgcctaccggggcaagaagaggagcgaggccccgccccacatcttctccatctccgacaacgcctatcagtacatgctgacagacagagaaaaccagtccatcctgatcaccggagaatccggagcagggaagacagtcaacaccaagagggtcatccagtactttgctgttattgcagccattggggaccgcagcaagaaggaccagagcccgggcaagggcaccctggaggaccagatcatccaggccaaccctgctctggaggcctttggcaatgccaagaccgtccggaacgacaactcctcccgcttcgggaaattcattcgaattcattttggggcaacaggaaagttggcatctgcagacatagagacctatcttctggaaaaatccagagttattttccagctgaaagcagagagagattatcacattttctaccaaatcctgtctaacaaaaagcctgagctgctggacatgctgctgatcaccaacaacccctacgattatgcattcatctcccaaggagagaccaccgtggcctccattgatgacgctgaggagctcatggccactgataacgcttttgatgtgctgggcttcacttcagaggagaaaaactccatgtataagctgacaggcgccatcatgcactttggaaacatgaagttcaagctgaagcagcgggaggagcaggcggagccagacggcactgaagaggctgacaagtctgcctacctcatggggctgaactcagccgacctgctcaaggggctgtgccaccctcgggtgaaagtgggcaatgagtacgtcaccaaggggcagaatgtccagcaggtgatatatgccactggggcactggccaaggcagtgtatgagaggatgttcaactggatggtgacgcgcatcaatgccaccctggagaccaagcagccacgccagtacttcataggagtcctggacatcgctggcttcgagatcttcgatttcaacagctttgagcagctctgcatcaacttcaccaacgagaagctgcagcagttcttcaaccaccacatgtttgtgctggagcaggaggagtacaagaaggagggcatcgagtggacattcattgactttggcatggacctgcaggcctgcattgacctcatcgagaagcccatgggcatcatgtccatcctggaagaggagtgcatgttccccaaggccaccgacatgaccttcaaggccaagctgtttgacaaccacctgggcaaatccgccaacttccagaagccacgcaatatcaaggggaagcctgaagcccacttctccctgatccactatgccggcatcgtggactacaacatcattggctggctgcagaagaacaaggatcctctcaatgagactgtcgtgggcttgtatcagaagtcttccctcaagctgctcagcaccctgtttgccaactatgctggggctgatgcgcctattgagaagggcaaaggcaaggccaagaaaggctcgtcctttcagactgtgtcagctctgcacagggaaaatctgaacaagctgatgaccaacttgcgctccacccatccccactttgtacgttgtatcatccctaatgagacaaagtctccaggggtgatggacaaccccctggtcatgcaccagctgcgctgcaatggtgtgctggagggcatccgcatctgcaggaaaggcttccccaaccgcatcctctacggggacttccggcagaggtatcgcatcctgaacccagcggccatccctgagggacagttcattgatagcaggaagggggcagagaagctgctcagctccctggacattgatcacaaccagtacaagtttggcacaccaaggtgttcttcaaggccgggctgctggggctgctggaggaaatgagggacgagaggctgagccgcatcatcacgcgtatccaggcccagtcccgaggtgtgctcgccagaatggagtacaaaaagctgctggaacgtagagactccctgctggtaatccagtggaacattcgggccttcatgggggtcaagaattggccctggatgaagctctacttcaagatcaagccgctgctgaagagtgcagaaagagagaaggagatggcctccatgaaggaggagttcacacgcctcaaagaggcgctagagaagtccgaggctcgccgcaaggagctggaggagaagatggtgtccctgctgcaggagaagaatgacctgcagctccaagtgcaggcggaacaagacaacctggcagatgctgaggagcgctgtgatcagctgatcaaaaacaagattcagctggaggccaaggtgaaggagatgaacgagaggctggaggatgaggaggagatgaatgctgagctcactgccaagaagcgcaagctggaagatgagtgctcagagctcaaaagggacatcgatgatctggagctgacactggccaaagtggagaaggagaaacacgcaacagagaacaaggtgaaaaacctgacagaggagatggctgggctggatgagatcattgccaagctgaccaaggagaagaaagctctgcaagaggcccaccaacaggctctggatgaccttcaggccgaggaggacaaggtcaacaccctgactaaggccaaagtcaagctggagcagcaagtggatgatctggaaggatccctggagcaagagaagaaggtgcgcatggacctggagcgagcgaagcggaagctggagggcgacctgaagctgacccaggagagcatcatggacctggagaatgacaagcagcagctggatgagcggctgaaaaaaaaagactttgagctgaatgctctcaacgcaaggattgaggatgaacaggccctcggcagccagctgcagaagaagctcaaggagcttcaggcacgcatcgaggagctggaggaggagctggaggccgagcgcaccgccagggctaaggtggagaagctgcgctcagacctgtctcgggagctggaggagatcagcgagcggctggaagaggccggcggggccacgtccgtgcagatcgagatgaacaagaagcgcgaggccgagttccagaagatgcggcgggacctggaggaggccacgctgcagcacgaggccactgccgcggccctgcgcaagaagcacgccgacagcgtggccgagctgggcgagcagatcgacaacctgcagcgggtgaagcagaagctggagaaggagaagagcgagttcaagctggagctggatgacgtcacctccaacatggagcagatcatcaaggccaaggctaacctggagaagatgtgccggaccttggaagaccagatgaatgagcaccggagcaaggcggaggagacccagcgttctgtcaacgacctcaccagccagcgggccaagttgcaaaccgagaatggtgagctgtcccggcagctggatgagaaggaggcactgatctcccagctgacccgaggcaagctcacctacacccagcagctggaggacctcaagaggcagctggaggaggaggttaaggcgaagaacgccctggcccacgcactgcagtcggcccggcatgactgcgacctgctgcgggagcagtacgaggaggagacggaggccaaggccgagctgcagcgcgtcctttccaaggccaactcggaggtggcccagtggaggaccaagtatgagacggacgccattcagcggactgaggagctcgaggaggccaagaagaagctggcccagcggctgcaggaagctgaggaggccgtggaggctgttaatgccaagtgctcctcgctggagaagaccaagcaccggctacagaatgagatcgaggacttgatggtggacgtagagcgctccaatgctgctgctgcagccctggacaagaagcagaggaacttcgacaagatcctggccgagtggaagcagaagtatgaggagtcgcagtcggagctggagtcctcgcagaaggaggctcgctccctcagcacagagctcttcaaactcaagaacgcctatgaggagtccctggaacatctggagaccttcaagcgggagaacaaaaacctgcaggaggagatctccgacttgactgagcagttgggttccagcggaaagactatccatgagctggagaaggtccgaaagcagctggaggccgagaagatggagctgcagtcagccctggaggaggccgaggcctccctggagcacgaggagggcaagatcctccgggcccagctggagttcaaccagatcaaggcagagatcgagcggaagctggcagagaaggacgaggagatggaacaggccaagcgcaaccacctgcgggtggtggactcgctgcagacctccctggacgcagagacacgcagccgcaacgaggccctgagggtgaagaagaagatggaaggagacctcaatgagatggagatccagctcagccacgccaaccgcatggccgccgaggcccagaagcaagtcaagagcctccagagcttgttgaaggacacccagattcagctggacgatgcagtccgtgccaacgacgacctgaaggagaacatcgccatcgtggagcggcgcaacaacctgctgcaggctgagctggaggagttgcgtgccgtggtggagcagacagagcggtcccggaagctggcggagcaggagctgattgagactagtgagcgggtgcagctgctgcattcccagaacaccagcctcatcaaccagaagaagaagatggatgctgacctgtcccagctccagactgaagtggaggaggcagtgcaggagtgcaggaatgctgaggagaaggccaagaaggccatcacggatgccgccatgatggcagaggagctgaagaaggagcaggacaccagcgcccacctggagcgcatgaagaagaacatggaacagaccattaaggacctgcagcaccggctggacgaagccgagcagatcgccctcaagggcggcaagaagcagctgcagaagctggaagcgcgggtgcgggagctggagaatgagctggaggccgagcagaagcgcaacgcagagtcggtgaagggcatgaggaagagcgagcggcgcatcaaggagctcacctaccagacggaggaggacaggaaaaacctgctgcggctgcaggacctggtagacaagctgcagctaaaggtcaaggcctacaagcgccaggccgaggaggcggaggagcaagccaacaccaacctgtccaagttccgcaaggtgcagcacgagctggatgaggcagaggagcgggcggacatcgccgagtcccaggtcaacaagctgcgggccaagagccgtgacattggcacgaagggcttgaatgaggagtagctttgccacatcttgatctgctcagccctggaggtgccagcaaagccccatgctggagcctgtgtaacagctccttgggaggaagcagaataaagcaattttccttgaagccga

SEQ ID NO: 362104 - DNA, 4078 bp, Homo sapiens
acctccccacactgatgcttcttttgttgactctccttcctgcagctattgagaagggcaaaggcaaggccaagaaaggctcgtcctttcagactgtgtcagctctgcacagggaaaatctgaacaagctgatgaccaacttgcgctccacccatccccactttgtacgttgtatcatccctaatgagacaaagtctccaggggtgatggacaaccccctggtcatgcaccagctgcgctgcaatggtgtgctggagggcatccgcatctgcaggaaaggcttccccaaccgcatcctctacggggacttccggcagaggtatcgcatcctgaacccagcggccatccctgagggacagttcattgatagcaggaagggggcagagaagctgctcagctccctggacattgatcacaaccagtacaagtttggcacaccaaggtgttcttcaaggccgggctgctggggctgctggaggaaatgagggacgagaggctgagccgcatcatcacgcgtatccaggcccagtcccgaggtgtgctcgccagaatggagtacaaaaagctgctggaacgtagagactccctgctggtaatccagtggaacattcgggccttcatgggggtcaagaattggccctggatgaagctctacttcaagatcaagccgctgctgaagagtgcagaaagagagaaggagatggcctccatgaaggaggagttcacacgcctcaaagaggcgctagagaagtccgaggctcgccgcaaggagctggaggagaagatggtgtccctgctgcaggagaagaatgacctgcagctccaagtgcaggcggaacaagacaacctggcagatgctgaggagcgctgtgatcagctgatcaaaaacaagattcagctggaggccaaggtgaaggagatgaacgagaggctggaggatgaggaggagatgaatgctgagctcactgccaagaagcgcaagctggaagatgagtgctcagagctcaaaagggacatcgatgatctggagctgacactggccaaagtggagaaggagaaacacgcaacagagaacaaggtgaaaaacctgacagaggagatggctgggctggatgagatcattgccaagctgaccaaggagaagaaagctctgcaagaggcccaccaacaggctctggatgaccttcaggccgaggaggacaaggtcaacaccctgactaaggccaaagtcaagctggagcagcaagtggatgatctggaaggatccctggagcaagagaagaaggtgcgcatggacctggagcgagcgaagcggaagctggagggcgacctgaagctgacccaggagagcatcatggacctggagaatgacaagcagcagctggatgagcggctgaaaaaaaaagactttgagctgaatgctctcaacgcaaggattgaggatgaacaggccctcggcagccagctgcagaagaagctcaaggagcttcaggcacgcatcgaggagctggaggaggagctggaggccgagcgcaccgccagggctaaggtggagaagctgcgctcagacctgtctcgggagctggaggagatcagcgagcggctggaagaggccggcggggccacgtccgtgcagatcgagatgaacaagaagcgcgaggccgagttccagaagatgcggcgggacctggaggaggccacgctgcagcacgaggccactgccgcggccctgcgcaagaagcacgccgacagcgtggccgagctgggcgagcagatcgacaacctgcagcgggtgaagcagaagctggagaaggagaagagcgagttcaagctggagctggatgacgtcacctccaacatggagcagatcatcaaggccaaggctaacctggagaagatgtgccggaccttggaagaccagatgaatgagcaccggagcaaggcggaggagacccagcgttctgtcaacgacctcaccagccagcgggccaagttgcaaaccgagaatggtgagctgtcccggcagctggatgagaaggaggcactgatctcccagctgacccgaggcaagctcacctacacccagcagctggaggacctcaagaggcagctggaggaggaggttaaggcgaagaacgccctggcccacgcactgcagtcggcccggcatgactgcgacctgctgcgggagcagtacgaggaggagacggaggccaaggccgagctgcagcgcgtcctttccaaggccaactcggaggtggcccagtggaggaccaagtatgagacggacgccattcagcggactgaggagctcgaggaggccaagaagaagctggcccagcggctgcaggaagctgaggaggccgtggaggctgttaatgccaagtgctcctcgctggagaagaccaagcaccggctacagaatgagatcgaggacttgatggtggacgtagagcgctccaatgctgctgctgcagccctggacaagaagcagaggaacttcgacaagatcctggccgagtggaagcagaagtatgaggagtcgcagtcggagctggagtcctcgcagaaggaggctcgctccctcagcacagagctcttcaaactcaagaacgcctatgaggagtccctggaacatctggagaccttcaagcgggagaacaaaaacctgcaggaggagatctccgacttgactgagcagttgggttccagcggaaagactatccatgagctggagaaggtccgaaagcagctggaggccgagaagatggagctgcagtcagccctggaggaggccgaggcctccctggagcacgaggagggcaagatcctccgggcccagctggagttcaaccagatcaaggcagagatcgagcggaagctggcagagaaggacgaggagatggaacaggccaagcgcaaccacctgcgggtggtggactcgctgcagacctccctggacgcagagacacgcagccgcaacgaggccctgagggtgaagaagaagatggaaggagacctcaatgagatggagatccagctcagccacgccaaccgcatggccgccgaggcccagaagcaagtcaagagcctccagagcttgttgaaggacacccagattcagctggacgatgcagtccgtgccaacgacgacctgaaggagaacatcgccatcgtggagcggcgcaacaacctgctgcaggctgagctggaggagttgcgtgccgtggtggagcagacagagcggtcccggaagctggcggagcaggagctgattgagactagtgagcgggtgcagctgctgcattcccagaacaccagcctcatcaaccagaagaagaagatggatgctgacctgtcccagctccagactgaagtggaggaggcagtgcaggagtgcaggaatgctgaggagaaggccaagaaggccatcacggatgccgccatgatggcagaggagctgaagaaggagcaggacaccagcgcccacctggagcgcatgaagaagaacatggaacagaccattaaggacctgcagcaccggctggacgaagccgagcagatcgccctcaagggcggcaagaagcagctgcagaagctggaagcgcgggtgcgggagctggagaatgagctggaggccgagcagaagcgcaacgcagagtcggtgaagggcatgaggaagagcgagcggcgcatcaaggagctcacctaccagacggaggaggacaggaaaaacctgctgcggctgcaggacctggtagacaagctgcagctaaaggtcaaggcctacaagcgccaggccgaggaggcggaggagcaagccaacaccaacctgtccaagttccgcaaggtgcagcacgagctggatgaggcagaggagcgggcggacatcgccgagtcccaggtcaacaagctgcgggccaagagccgtgacattggcacgaagggcttgaatgaggagtagctttgccacatcttgatctgctcagccctggaggtgccagcaaagccccatgctggagcctgtgtaacagctccttgggaggaagcagaataaagcaattttccttgaagccga

SEQ ID NO: 362105 - DNA, 6025 bp, Homo sapiens
gggggtgggggtgccctgctgccccatatatacagcccctgagaccaggtctggctccacagctctgtcctgctctgtgtctttccctgctgctctcaggtcccctgcaggccttggcccctttcctcatctgtagacacacttgagtagcccaggcacagccatgggagattcggagatggcagtctttggggctgccgccccctacctgcgcaagtcagagaaggagcggctagaagcgcagaccaggccttttgacctcaagaaggatgtcttcgtgcctgatgacaaacaggagtttgtcaaggccaagatcgtgtctcgagagggtggcaaagtcactgccgagactgagtatggcaagacagtgaccgtgaaggaggaccaggtgatgcagcagaacccacccaagttcgacaaaatcgaggacatggccatgctgaccttcctgcatgagcccgcggtgctctacaacctcaaggatcgctacggctcctggatgatctacacctactcgggcctcttctgtgtcaccgtcaacccttacaagtggctgccggtgtacactcctgaggtggtggctgcctaccggggcaagaagaggagcgaggccccgccccacatcttctccatctccgacaacgcctatcagtacatgctgacagacagagaaaaccagtccatcctgatcaccggagaatccggagcagggaagacagtcaacaccaagagggtcatccagtactttgctgttattgcagccattggggaccgcagcaagaaggaccagagcccgggcaagggcaccctggaggaccagatcatccaggccaaccctgctctggaggcctttggcaatgccaagaccgtccggaacgacaactcctcccgcttcgggaaattcattcgaattcattttggggcaacaggaaagttggcatctgcagacatagagacctatcttctggaaaaatccagagttattttccagctgaaagcagagagagattatcacattttctaccaaatcctgtctaacaaaaagcctgagctgctggacatgctgctgatcaccaacaacccctacgattatgcattcatctcccaaggagagaccaccgtggcctccattgatgacgctgaggagctcatggccactgataacgcttttgatgtgctgggcttcacttcagaggagaaaaactccatgtataagctgacaggcgccatcatgcactttggaaacatgaagttcaagctgaagcagcgggaggagcaggcggagccagacggcactgaagaggctgacaagtctgcctacctcatggggctgaactcagccgacctgctcaaggggctgtgccaccctcgggtgaaagtgggcaatgagtacgtcaccaaggggcagaatgtccagcaggtgatatatgccactggggcactggccaaggcagtgtatgagaggatgttcaactggatggtgacgcgcatcaatgccaccctggagaccaagcagccacgccagtacttcataggagtcctggacatcgctggcttcgagatcttcgatttcaacagctttgagcagctctgcatcaacttcaccaacgagaagctgcagcagttcttcaaccaccacatgtttgtgctggagcaggaggagtacaagaaggagggcatcgagtggacattcattgactttggcatggacctgcaggcctgcattgacctcatcgagaagcccatgggcatcatgtccatcctggaagaggagtgcatgttccccaaggccaccgacatgaccttcaaggccaagctgtttgacaaccacctgggcaaatccgccaacttccagaagccacgcaatatcaaggggaagcctgaagcccacttctccctgatccactatgccggcatcgtggactacaacatcattggctggctgcagaagaacaaggatcctctcaatgagactgtcgtgggcttgtatcagaagtcttccctcaagctgctcagcaccctgtttgccaactatgctggggctgatgcgcctattgagaagggcaaaggcaaggccaagaaaggctcgtcctttcagactgtgtcagctctgcacagggaaaatctgaacaagctgatgaccaacttgcgctccacccatccccactttgtacgttgtatcatccctaatgagacaaagtctccaggggtgatggacaaccccctggtcatgcaccagctgcgctgcaatggtgtgctggagggcatccgcatctgcaggaaaggcttccccaaccgcatcctctacggggacttccggcagaggtatcgcatcctgaacccagcggccatccctgagggacagttcattgatagcaggaagggggcagagaagctgctcagctccctggacattgatcacaaccagtacaagtttggcacaccaaggtgttcttcaaggccgggctgctggggctgctggaggaaatgagggacgagaggctgagccgcatcatcacgcgtatccaggcccagtcccgaggtgtgctcgccagaatggagtacaaaaagctgctggaacgtagagactccctgctggtaatccagtggaacattcgggccttcatgggggtcaagaattggccctggatgaagctctacttcaagatcaagccgctgctgaagagtgcagaaagagagaaggagatggcctccatgaaggaggagttcacacgcctcaaagaggcgctagagaagtccgaggctcgccgcaaggagctggaggagaagatggtgtccctgctgcaggagaagaatgacctgcagctccaagtgcaggcggaacaagacaacctggcagatgctgaggagcgctgtgatcagctgatcaaaaacaagattcagctggaggccaaggtgaaggagatgaacgagaggctggaggatgaggaggagatgaatgctgagctcactgccaagaagcgcaagctggaagatgagtgctcagagctcaaaagggacatcgatgatctggagctgacactggccaaagtggagaaggagaaacacgcaacagagaacaaggtgaaaaacctgacagaggagatggctgggctggatgagatcattgccaagctgaccaaggagaagaaagctctgcaagaggcccaccaacaggctctggatgaccttcaggccgaggaggacaaggtcaacaccctgactaaggccaaagtcaagctggagcagcaagtggatgatctggaaggatccctggagcaagagaagaaggtgcgcatggacctggagcgagcgaagcggaagctggagggcgacctgaagctgacccaggagagcatcatggacctggagaatgacaagcagcagctggatgagcggctgaaaaaaaaagactttgagctgaatgctctcaacgcaaggattgaggatgaacaggccctcggcagccagctgcagaagaagctcaaggagcttcaggcacgcatcgaggagctggaggaggagctggaggccgagcgcaccgccagggctaaggtggagaagctgcgctcagacctgtctcgggagctggaggagatcagcgagcggctggaagaggccggcggggccacgtccgtgcagatcgagatgaacaagaagcgcgaggccgagttccagaagatgcggcgggacctggaggaggccacgctgcagcacgaggccactgccgcggccctgcgcaagaagcacgccgacagcgtggccgagctgggcgagcagatcgacaacctgcagcgggtgaagcagaagctggagaaggagaagagcgagttcaagctggagctggatgacgtcacctccaacatggagcagatcatcaaggccaaggctaacctggagaagatgtgccggaccttggaagaccagatgaatgagcaccggagcaaggcggaggagacccagcgttctgtcaacgacctcaccagccagcgggccaagttgcaaaccgagaatggtgagctgtcccggcagctggatgagaaggaggcactgatctcccagctgacccgaggcaagctcacctacacccagcagctggaggacctcaagaggcagctggaggaggaggttaaggcgaagaacgccctggcccacgcactgcagtcggcccggcatgactgcgacctgctgcgggagcagtacgaggaggagacggaggccaaggccgagctgcagcgcgtcctttccaaggccaactcggaggtggcccagtggaggaccaagtatgagacggacgccattcagcggactgaggagctcgaggaggccaagaagaagctggcccagcggctgcaggaagctgaggaggccgtggaggctgttaatgccaagtgctcctcgctggagaagaccaagcaccggctacagaatgagatcgaggacttgatggtggacgtagagcgctccaatgctgctgctgcagccctggacaagaagcagaggaacttcgacaagatcctggccgagtggaagcagaagtatgaggagtcgcagtcggagctggagtcctcgcagaaggaggctcgctccctcagcacagagctcttcaaactcaagaacgcctatgaggagtccctggaacatctggagaccttcaagcgggagaacaaaaacctgcaggaggagatctccgacttgactgagcagttgggttccagcggaaagactatccatgagctggagaaggtccgaaagcagctggaggccgagaagatggagctgcagtcagccctggaggaggccgaggcctccctggagcacgaggagggcaagatcctccgggcccagctggaaacaggccaagcgcaaccacctgcgggtggtggactcgctgcagacctccctggacgcagagacacgcagccgcaacgaggccctgagggtgaagaagaagatggaaggagacctcaatgagatggagatccagctcagccacgccaaccgcatggccgccgaggcccagaagcaagtcaagagcctccagagcttgttgaaggacacccagattcagctggacgatgcagtccgtgccaacgacgacctgaaggagaacatcgccatcgtggagcggcgcaacaacctgctgcaggctgagctggaggagttgcgtgccgtggtggagcagacagagcggtcccggaagctggcggagcaggagctgattgagactagtgagcgggtgcagctgctgcattcccagaacaccagcctcatcaaccagaagaagaagatggatgctgacctgtcccagctccagactgaagtggaggaggcagtgcaggagtgcaggaatgctgaggagaaggccaagaaggccatcacggatgccgccatgatggcagaggagctgaagaaggagcaggacaccagcgcccacctggagcgcatgaagaagaacatggaacagaccattaaggacctgcagcaccggctggacgaagccgagcagatcgccctcaagggcggcaagaagcagctgcagaagctggaagcgcgggtgcgggagctggagaatgagctggaggccgagcagaagcgcaacgcagagtcggtgaagggcatgaggaagagcgagcggcgcatcaaggagctcacctaccagacggaggaggacaggaaaaacctgctgcggctgcaggacctggtagacaagctgcagctaaaggtcaaggcctacaagcgccaggccgaggaggcggaggagcaagccaacaccaacctgtccaagttccgcaaggtgcagcacgagctggatgaggcagaggagcgggcggacatcgccgagtcccaggtcaacaagctgcgggccaagagccgtgacattggcacgaagggcttgaatgaggagtagctttgccacatcttgatctgctcagccctggaggtgccagcaaagccccatgctggagcctgtgtaacagctccttgggaggaagcagaataaagcaattttccttgaagccga

SEQ ID NO: 362106 - DNA, 5941 bp, Homo sapiens
gggggtgggggtgccctgctgccccatatatacagcccctgagaccaggtctggctccacagctctgtcctgctctgtgtctttccctgctgctctcaggtcccctgcaggccttggcccctttcctcatctgtagacacacttgagtagcccaggcacagccatgggagattcggagatggcagtctttggggctgccgccccctacctgcgcaagtcagagaaggagcggctagaagcgcagaccaggccttttgacctcaagaaggatgtcttcgtgcctgatgacaaacaggagtttgtcaaggccaagatcgtgtctcgagagggtggcaaagtcactgccgagactgagtatggcaagacagtgaccgtgaaggaggaccaggtgatgcagcagaacccacccaagttcgacaaaatcgaggacatggccatgctgaccttcctgcatgagcccgcggtgctctacaacctcaaggatcgctacggctcctggatgatctacacctactcgggcctcttctgtgtcaccgtcaacccttacaagtggctgccggtgtacactcctgaggtggtggctgcctaccggggcaagaagaggagcgaggccccgccccacatcttctccatctccgacaacgcctatcagtacatgctgacagacagagaaaaccagtccatcctgatcaccggagaatccggagcagggaagacagtcaacaccaagagggtcatccagtactttgctgttattgcagccattggggaccgcagcaagaaggaccagagcccgggcaagggcaccctggaggaccagatcatccaggccaaccctgctctggaggcctttggcaatgccaagaccgtccggaacgacaactcctcccgcttcgggaaattcattcgaattcattttggggcaacaggaaagttggcatctgcagacatagagacctatcttctggaaaaatccagagttattttccagctgaaagcagagagagattatcacattttctaccaaatcctgtctaacaaaaagcctgagctgctggacatgctgctgatcaccaacaacccctacgattatgcattcatctcccaaggagagaccaccgtggcctccattgatgacgctgaggagctcatggccactgataacgcttttgatgtgctgggcttcacttcagaggagaaaaactccatgtataagctgacaggcgccatcatgcactttggaaacatgaagttcaagctgaagcagcgggaggagcaggcggagccagacggcactgaagaggctgacaagtctgcctacctcatggggctgaactcagccgacctgctcaaggggctgtgccaccctcgggtgaaagtgggcaatgagtacgtcaccaaggggcagaatgtccagcaggtgatatatgccactggggcactggccaaggcagtgtatgagaggatgttcaactggatggtgacgcgcatcaatgccaccctggagaccaagcagccacgccagtacttcataggagtcctggacatcgctggcttcgagatcttcgatttcaacagctttgagcagctctgcatcaacttcaccaacgagaagctgcagcagttcttcaaccaccacatgtttgtgctggagcaggaggagtacaagaaggagggcatcgagtggacattcattgactttggcatggacctgcaggcctgcattgacctcatcgagaagcccatgggcatcatgtccatcctggaagaggagtgcatgttccccaaggccaccgacatgaccttcaaggccaagctgtttgacaaccacctgggcaaatccgccaacttccagaagccacgcaatatcaaggggaagcctgaagcccacttctccctgatccactatgccggcatcgtggactacaacatcattggctggctgcagaagaacaaggatcctctcaatgagactgtcgtgggcttgtatcagaagtcttccctcaagctgctcagcaccctgtttgccaactatgctggggctgatgcgcctattgagaagggcaaaggcaaggccaagaaaggctcgtcctttcagactgtgtcagctctgcacagggaaaatctgaacaagctgatgaccaacttgcgctccacccatccccactttgtacgttgtatcatccctaatgagacaaagtctccaggggtgatggacaaccccctggtcatgcaccagctgcgctgcaatggtgtgctggagggcatccgcatctgcaggaaaggcttccccaaccgcatcctctacggggacttccggcagaggtatcgcatcctgaacccagcggccatccctgagggacagttcattgatagcaggaagggggcagagaagctgctcagctccctggacattgatcacaaccagtacaagtttggcacaccaaggtgttcttcaaggccgggctgctggggctgctggaggaaatgagggacgagaggctgagccgcatcatcacgcgtatccaggcccagtcccgaggtgtgctcgccagaatggagtacaaaaagctgctggaacgtagagactccctgctggtaatccagtggaacattcgggccttcatgggggtcaagaattggccctggatgaagctctacttcaagatcaagccgctgctgaagagtgcagaaagagagaaggagatggcctccatgaaggaggagttcacacgcctcaaagaggcgctagagaagtccgaggctcgccgcaaggagctggaggagaagatggtgtccctgctgcaggagaagaatgacctgcagctccaagtgcaggcggaacaagacaacctggcagatgctgaggagcgctgtgatcagctgatcaaaaacaagattcagctggaggccaaggtgaaggagatgaacgagaggctggaggatgaggaggagatgaatgctgagctcactgccaagaagcgcaagctggaagatgagtgctcagagctcaaaagggacatcgatgatctggagctgacactggccaaagtggagaaggagaaacacgcaacagagaacaaggtgaaaaacctgacagaggagatggctgggctggatgagatcattgccaagctgaccaaggagaagaaagctctgcaagaggcccaccaacaggctctggatgaccttcaggccgaggaggacaaggtcaacaccctgactaaggccaaagtcaagctggagcagcaagtggatgatctggaaggatccctggagcaagagaagaaggtgcgcatggacctggagcgagcgaagcggaagctggagggcgacctgaagctgacccaggagagcatcatggacctggagaatgacaagcagcagctggatgagcggctgaaaaaaaaagactttgagctgaatgctctcaacgcaaggattgaggatgaacaggccctcggcagccagctgcagaagaagctcaaggagcttcaggcacgcatcgaggagctggaggaggagctggaggccgagcgcaccgccagggctaaggtggagaagctgcgctcagacctgtctcgggagctggaggagatcagcgagcggctggaagaggccggcggggccacgtccgtgcagatcgagatgaacaagaagcgcgaggccgagttccagaagatgcggcgggacctggaggaggccacgctgcagcacgaggccactgccgcggccctgcgcaagaagcacgccgacagcgtggccgagctgggcgagcagatcgacaacctgcagcgggtgaagcagaagctggagaaggagaagagcgagttcaagctggagctggatgacgtcacctccaacatggagcagatcatcaaggccaaggctaacctggagaagatgtgccggaccttggaagaccagatgaatgagcaccggagcaaggcggaggagacccagcgttctgtcaacgacctcaccagccagcgggccaagttgcaaaccgagaatggtgagctgtcccggcagctggatgagaaggaggcactgatctcccagctgacccgaggcaagctcacctacacccagcagctggaggacctcaagaggcagctggaggaggaggttaaggcgaagaacgccctggcccacgcactgcagtcggcccggcatgactgcgacctgctgcgggagcagtacgaggaggagacggaggccaaggccgagctgcagcgcgtcctttccaaggccaactcggaggtggcccagtggaggaccaagtatgagacggacgccattcagcggactgaggagctcgaggaggccaagaagaagctggcccagcggctgcaggaagctgaggaggccgtggaggctgttaatgccaagtgctcctcgctggagaagaccaagcaccggctacagaatgagatcgaggacttgatggtggacgtagagcgctccaatgctgctgctgcagccctggacaagaagcagaggaacttcgacaagatcctggccgagtggaagcagaagtatgaggagtcgcagtcggagctggagtcctcgcagaaggaggctcgctccctcagcacagagctcttcaaactcaagaacgcctatgaggagtccctggaacatctggagaccttcaagcgggagaacaaaaacctgcaggaggagatctccgacttgactgagcagttgggttccagcggaaagactatccatgagctggagaaggtccgaaagcagctggaggccgagaagatggagctgcagtcagccctggaggaggccgaggcctccctggagcacgaggagggcaagatcctccgggcccagctggagttcaaccagatcaaggcagagatcgagcggaagctggcagagaaggacgaggagatgggccaaccgcatggccgccgaggcccagaagcaagtcaagagcctccagagcttgttgaaggacacccagattcagctggacgatgcagtccgtgccaacgacgacctgaaggagaacatcgccatcgtggagcggcgcaacaacctgctgcaggctgagctggaggagttgcgtgccgtggtggagcagacagagcggtcccggaagctggcggagcaggagctgattgagactagtgagcgggtgcagctgctgcattcccagaacaccagcctcatcaaccagaagaagaagatggatgctgacctgtcccagctccagactgaagtggaggaggcagtgcaggagtgcaggaatgctgaggagaaggccaagaaggccatcacggatgccgccatgatggcagaggagctgaagaaggagcaggacaccagcgcccacctggagcgcatgaagaagaacatggaacagaccattaaggacctgcagcaccggctggacgaagccgagcagatcgccctcaagggcggcaagaagcagctgcagaagctggaagcgcgggtgcgggagctggagaatgagctggaggccgagcagaagcgcaacgcagagtcggtgaagggcatgaggaagagcgagcggcgcatcaaggagctcacctaccagacggaggaggacaggaaaaacctgctgcggctgcaggacctggtagacaagctgcagctaaaggtcaaggcctacaagcgccaggccgaggaggcggaggagcaagccaacaccaacctgtccaagttccgcaaggtgcagcacgagctggatgaggcagaggagcgggcggacatcgccgagtcccaggtcaacaagctgcgggccaagagccgtgacattggcacgaagggcttgaatgaggagtagctttgccacatcttgatctgctcagccctggaggtgccagcaaagccccatgctggagcctgtgtaacagctccttgggaggaagcagaataaagcaattttccttgaagccga

SEQ ID NO: 362107 - DNA, 4917 bp, Homo sapiens
gggggtgggggtgccctgctgccccatatatacagcccctgagaccaggtctggctccacagctctgtcctgctctgtgtctttccctgctgctctcaggtcccctgcaggccttggcccctttcctcatctgtagacacacttgagtagcccaggcacagccatgggagattcggagatggcagtctttggggctgccgccccctacctgcgcaagtcagagaaggagcggctagaagcgcagaccaggccttttgacctcaagaaggatgtcttcgtgcctgatgacaaacaggagtttgtcaaggccaagatcgtgtctcgagagggtggcaaagtcactgccgagactgagtatggcaagacagtgaccgtgaaggaggaccaggtgatgcagcagaacccacccaagttcgacaaaatcgaggacatggccatgctgaccttcctgcatgagcccgcggtgctctacaacctcaaggatcgctacggctcctggatgatctacacctactcgggcctcttctgtgtcaccgtcaacccttacaagtggctgccggtgtacactcctgaggtggtggctgcctaccggggcaagaagaggagcgaggccccgccccacatcttctccatctccgacaacgcctatcagtacatgctgacagacagagaaaaccagtccatcctgatcaccggagaatccggagcagggaagacagtcaacaccaagagggtcatccagtactttgctgttattgcagccattggggaccgcagcaagaaggaccagagcccgggcaagggcaccctggaggaccagatcatccaggccaaccctgctctggaggcctttggcaatgccaagaccgtccggaacgacaactcctcccgcttcgggaaattcattcgaattcattttggggcaacaggaaagttggcatctgcagacatagagacctatcttctggaaaaatccagagttattttccagctgaaagcagagagagattatcacattttctaccaaatcctgtctaacaaaaagcctgagctgctggacatgctgctgatcaccaacaacccctacgattatgcattcatctcccaaggagagaccaccgtggcctccattgatgacgctgaggagctcatggccactgataacgcttttgatgtgctgggcttcacttcagaggagaaaaactccatgtataagctgacaggcgccatcatgcactttggaaacatgaagttcaagctgaagcagcgggaggagcaggcggagccagacggcactgaagaggctgacaagtctgcctacctcatggggctgaactcagccgacctgctcaaggggctgtgccaccctcgggtgaaagtgggcaatgagtacgtcaccaaggggcagaatgtccagcaggtgatatatgccactggggcactggccaaggcagtgtatgagaggatgttcaactggatggtgacgcgcatcaatgccaccctggagaccaagcagccacgccagtacttcataggagtcctggacatcgctggcttcgagatcttcgatttcaacagctttgagcagctctgcatcaacttcaccaacgagaagctgcagcagttcttcaaccaccacatgtttgtgctggagcaggaggagtacaagaaggagggcatcgagtggacattcattgactttggcatggacctgcaggcctgcattgacctcatcgagaagcccatgggcatcatgtccatcctggaagaggagtgcatgttccccaaggccaccgacatgaccttcaaggccaagctgtttgacaaccacctgggcaaatccgccaacttccagaagccacgcaatatcaaggggaagcctgaagcccacttctccctgatccactatgccggcatcgtggactacaacatcattggctggctgcagaagaacaaggatcctctcaatgagactgtcgtgggcttgtatcagaagtcttccctcaagctgctcagcaccctgtttgccaactatgctggggctgatgcgcctattgagaagggcaaaggcaaggccaagaaaggctcgtcctttcagactgtgtcagctctgcacagggaaaatctgaacaagctgatgaccaacttgcgctccacccatccccactttgtacgttgtatcatccctaatgagacaaagtctccaggggtgatggacaaccccctggtcatgcaccagctgcgctgcaatggtgtgctggagggcatccgcatctgcaggaaaggcttccccaaccgcatcctctacggggacttccggcagaggtatcgcatcctgaacccagcggccatccctgagggacagttcattgatagcaggaagggggcagagaagctgctcagctccctggacattgatcacaaccagtacaagtttggcacaccaaggtgttcttcaaggccgggctgctggggctgctggaggaaatgagggacgagaggctgagccgcatcatcacgcgtatccaggcccagtcccgaggtgtgctcgccagaatggagtacaaaaagctgctggaacgtagagactccctgctggtaatccagtggaacattcgggccttcatgggggtcaagaattggccctggatgaagctctacttcaagatcaagccgctgctgaagagtgcagaaagagagaaggagatggcctccatgaaggaggagttcacacgcctcaaagaggcgctagagaagtccgaggctcgccgcaaggagctggaggagaagatggtgtccctgctgcaggagaagaatgacctgcagctccaagtgcaggcggaacaagacaacctggcagatgctgaggagcgctgtgatcagctgatcaaaaacaagattcagctggaggccaaggtgaaggagatgaacgagaggctggaggatgaggaggagatgaatgctgagctcactgccaagaagcgcaagctggaagatgagtgctcagagctcaaaagggacatcgatgatctggagctgacactggccaaagtggagaaggagaaacacgcaacagagaacaaggtgaaaaacctgacagaggagatggctgggctggatgagatcattgccaagctgaccaaggagaagaaagctctgcaagaggcccaccaacaggctctggatgaccttcaggccgaggaggacaaggtcaacaccctgactaaggccaaagtcaagctggagcagcaagtggatgatctggaaggatccctggagcaagagaagaaggtgcgcatggacctggagcgagcgaagcggaagctggagggcgacctgaagctgacccaggagagcatcatggacctggagaatgacaagcagcagctggatgagcggctgaaaaaaaaagactttgagctgaatgctctcaacgcaaggattgaggatgaacaggccctcggcagccagctgcagaagaagctcaaggagcttcaggcacgcatcgaggagctggaggaggagctggaggccgagcgcaccgccagggctaaggtggagaagctgcgctcagacctgtctcgggagctggaggagatcagcgagcggctggaagaggccggcggggccacgtccgtgcagatcgagatgaacaagaagcgcgaggccgagttccagaagatgcggcgggacctggaggaggccacgctgcagcacgaggccactgccgcggccctgcgcaagaagcacgccgacagcgtggccgagctgggcgagcagatcgacaacctgcagcgggtgaagcagaagctggagaaggagaagagcgagttcaagctggagctggatgacgtcacctccaacatggagcagatcatcaaggccaaggccaaccgcatggccgccgaggcccagaagcaagtcaagagcctccagagcttgttgaaggacacccagattcagctggacgatgcagtccgtgccaacgacgacctgaaggagaacatcgccatcgtggagcggcgcaacaacctgctgcaggctgagctggaggagttgcgtgccgtggtggagcagacagagcggtcccggaagctggcggagcaggagctgattgagactagtgagcgggtgcagctgctgcattcccagaacaccagcctcatcaaccagaagaagaagatggatgctgacctgtcccagctccagactgaagtggaggaggcagtgcaggagtgcaggaatgctgaggagaaggccaagaaggccatcacggatgccgccatgatggcagaggagctgaagaaggagcaggacaccagcgcccacctggagcgcatgaagaagaacatggaacagaccattaaggacctgcagcaccggctggacgaagccgagcagatcgccctcaagggcggcaagaagcagctgcagaagctggaagcgcgggtgcgggagctggagaatgagctggaggccgagcagaagcgcaacgcagagtcggtgaagggcatgaggaagagcgagcggcgcatcaaggagctcacctaccagacggaggaggacaggaaaaacctgctgcggctgcaggacctggtagacaagctgcagctaaaggtcaaggcctacaagcgccaggccgaggaggcggaggagcaagccaacaccaacctgtccaagttccgcaaggtgcagcacgagctggatgaggcagaggagcgggcggacatcgccgagtcccaggtcaacaagctgcgggccaagagccgtgacattggcacgaagggcttgaatgaggagtagctttgccacatcttgatctgctcagccctggaggtgccagcaaagccccatgctggagcctgtgtaacagctccttgggaggaagcagaataaagcaattttccttgaagccga

SEQ ID NO: 362108 - DNA, 6300 bp, Homo sapiens
gggggtgggggtgccctgctgccccatatatacagcccctgagaccaggtctggctccacagctctgtcctgctctgtgtctttccctgctgctctcaggtcccctgcaggccttggcccctttcctcatctgtagacacacttgagtagcccaggcacagccatgggagattcggagatggcagtctttggggctgccgccccctacctgcgcaagtcagagaaggagcggctagaagcgcagaccaggccttttgacctcaagaaggatgtcttcgtgcctgatgacaaacaggagtttgtcaaggccaagatcgtgtctcgagagggtggcaaagtcactgccgagactgagtatggcaagacagtgaccgtgaaggaggaccaggtgatgcagcagaacccacccaagttcgacaaaatcgaggacatggccatgctgaccttcctgcatgagcccgcggtgctctacaacctcaaggatcgctacggctcctggatgatctacacctactcgggcctcttctgtgtcaccgtcaacccttacaagtggctgccggtgtacactcctgaggtggtggctgcctaccggggcaagaagaggagcgaggccccgccccacatcttctccatctccgacaacgcctatcagtacatgctgacagacagagaaaaccagtccatcctgatcaccggagaatccggagcagggaagacagtcaacaccaagagggtcatccagtactttgctgttattgcagccattggggaccgcagcaagaaggaccagagcccgggcaagggcaccctggaggaccagatcatccaggccaaccctgctctggaggcctttggcaatgccaagaccgtccggaacgacaactcctcccgcttcgggaaattcattcgaattcattttggggcaacaggaaagttggcatctgcagacatagagacctatcttctggaaaaatccagagttattttccagctgaaagcagagagagattatcacattttctaccaaatcctgtctaacaaaaagcctgagctgctggacatgctgctgatcaccaacaacccctacgattatgcattcatctcccaaggagagaccaccgtggcctccattgatgacgctgaggagctcatggccactgataacgcttttgatgtgctgggcttcacttcagaggagaaaaactccatgtataagctgacaggcgccatcatgcactttggaaacatgaagttcaagctgaagcagcgggaggagcaggcggagccagacggcactgaagaggctgacaagtctgcctacctcatggggctgaactcagccgacctgctcaaggggctgtgccaccctcgggtgaaagtgggcaatgagtacgtcaccaaggggcagaatgtccagcaggtgatatatgccactggggcactggccaaggcagtgtatgagaggatgttcaactggatggtgacgcgcatcaatgccaccctggagaccaagcagccacgccagtacttcataggagtcctggacatcgctggcttcgagatcttcgatttcaacagctttgagcagctctgcatcaacttcaccaacgagaagctgcagcagttcttcaaccaccacatgtttgtgctggagcaggaggagtacaagaaggagggcatcgagtggacattcattgactttggcatggacctgcaggcctgcattgacctcatcgagaagcccatgggcatcatgtccatcctggaagaggagtgcatgttccccaaggccaccgacatgaccttcaaggccaagctgtttgacaaccacctgggcaaatccgccaacttccagaagccacgcaatatcaaggggaagcctgaagcccacttctccctgatccactatgccggcatcgtggactacaacatcattggctggctgcagaagaacaaggatcctctcaatgagactgtcgtgggcttgtatcagaagtcttccctcaagctgctcagcaccctgtttgccaactatgctggggctgatgcgcctattgagaagggcaaaggcaaggccaagaaaggctcgtcctttcagactgtgtcagctctgcacagggaaaatctgaacaagctgatgaccaacttgcgctccacccatccccactttgtacgttgtatcatccctaatgagacaaagtctccaggggtgatggacaaccccctggtcatgcaccagctgcgctgcaatggtgtgctggagggcatccgcatctgcaggaaaggcttccccaaccgcatcctctacggggacttccggcagaggtatcgcatcctgaacccagcggccatccctgagggacagttcattgatagcaggaagggggcagagaagctgctcagctccctggacattgatcacaaccagtacaagtttggcacaccaaggtgttcttcaaggccgggctgctggggctgctggaggaaatgagggacgagaggctgagccgcatcatcacgcgtatccaggcccagtcccgaggtgtgctcgccagaatggagtacaaaaagctgctggaacgtagagactccctgctggtaatccagtggaacattcgggccttcatgggggtcaagaattggccctggatgaagctctacttcaagatcaagccgctgctgaagagtgcagaaagagagaaggagatggcctccatgaaggaggagttcacacgcctcaaagaggcgctagagaagtccgaggctcgccgcaaggagctggaggagaagatggtgtccctgctgcaggagaagaatgacctgcagctccaagtgcaggcggaacaagacaacctggcagatgctgaggagcgctgtgatcagctgatcaaaaacaagattcagctggaggccaaggtgaaggagatgaacgagaggctggaggatgaggaggagatgaatgctgagctcactgccaagaagcgcaagctggaagatgagtgctcagagctcaaaagggacatcgatgatctggagctgacactggccaaagtggagaaggagaaacacgcaacagagaacaaggtgaaaaacctgacagaggagatggctgggctggatgagatcattgccaagctgaccaaggagaagaaagctctgcaagaggcccaccaacaggctctggatgaccttcaggccgaggaggacaaggtcaacaccctgactaaggccaaagtcaagctggagcagcaagtggatgatctggaaggatccctggagcaagagaagaaggtgcgcatggacctggagcgagcgaagcggaagctggagggcgacctgaagctgacccaggagagcatcatggacctggagaatgacaagcagcagctggatgagcggctgaaaaaaaaagactttgagctgaatgctctcaacgcaaggattgaggatgaacaggccctcggcagccagctgcagaagaagctcaaggagcttcaggcacgcatcgaggagctggaggaggagctggaggccgagcgcaccgccagggctaaggtggagaagctgcgctcagacctgtctcgggagctggaggagatcagcgagcggctggaagaggccggcggggccacgtccgtgcagatcgagatgaacaagaagcgcgaggccgagttccagaagatgcggcgggacctggaggaggccacgctgcagcacgaggccactgccgcggccctgcgcaagaagcacgccgacagcgtggccgagctgggcgagcagatcgacaacctgcagcgggtgaagcagaagctggagaaggagaagagcgagttcaagctggagctggatgacgtcacctccaacatggagcagatcatcaaggccaaggctaacctggagaagatgtgccggaccttggaagaccagatgaatgagcaccggagcaaggcggaggagacccagcgttctgtcaacgacctcaccagccagcgggccaagttgcaaaccgagaatggtgagctgtcccggcagctggatgagaaggaggcactgatctcccagctgacccgaggcaagctcacctacacccagcagctggaggacctcaagaggcagctggaggaggaggttaaggcgaagaacgccctggcccacgcactgcagtcggcccggcatgactgcgacctgctgcgggagcagtacgaggaggagacggaggccaaggccgagctgcagcgcgtcctttccaaggccaactcggaggtggcccagtggaggaccaagtatgagacggacgccattcagcggactgaggagctcgaggaggccaagaagaagctggcccagcggctgcaggaagctgaggaggccgtggaggctgttaatgccaagtgctcctcgctggagaagaccaagcaccggctacagaatgagatcgaggacttgatggtggacgtagagcgctccaatgctgctgctgcagccctggacaagaagcagaggaacttcgacaagatcctggccgagtggaagcagaagtatgaggagtcgcagtcggagctggagtcctcgcagaaggaggctcgctccctcagcacagagctcttcaaactcaagaacgcctatgaggagtccctggaacatctggagaccttcaagcgggagaacaaaaacctgcaggaggagatctccgacttgactgagcagttgggttccagcggaaagactatccatgagctggagaaggtccgaaagcagctggaggccgagaagatggagctgcagtcagccctggaggaggccgaggcctccctggagcacgaggagggcaagatcctccgggcccagctggagttcaaccagatcaaggcagagatcgagcggaagctggcagagaaggacgaggagatggaacaggccaagcgcaaccacctgcgggtggtggactcgctgcagacctccctggacgcagagacacgcagccgcaacgaggccctgagggtgaagaagaagatggaaggagacctcaatgagatggagatccagctcagccacgccaaccgcatggccgccgaggcccagaagcaagtcaagagcctccagagcttgttgaaggacacccagattcagctggacgatgcagtccgtgccaacgacgacctgaaggagaacatcgccatcgtggagcggcgcaacaacctgctgcaggctgagctggaggagttgcgtgccgtggtggagcagacagagcggtcccggaagctggcggagcaggagctgattgagactagtgagcgggtgcagctgctgcattcccagaacaccagcctcatcaaccagaagaagaagatggatgctgacctgtcccagctccagactgaagtggaggaggcagtgcaggagtgcaggaatgctgaggagaaggccaagaaggccatcacggatgccgccatgatggcagaggagctgaagaaggagcaggacaccagcgcccacctggagcgcatgaagaagaacatggaacagaccattaaggacctgcagcaccggctggacgaagccgagcagatcgccctcaagggcggcaagaagcagctgcagaagctggaagcgcgggtgcgggagctggagaatgagctggaggccgagcagaagcgcaacgcagagtcggtgaagggcatgaggaagagcgagcggcgcatcaaggagctcacctaccagacggaggaggacaggaaaaacctgctgcggctgcaggacctggtagacaagctgcagctaaaggtcaaggcctacaagcgccaggccgaggaggcggaggagcaagccaacaccaacctgtccaagttccgcaaggtgcagcacgagctggatgaggcagaggagcgggcggacatcgccgagtcccaggtcaacaagctgcgggccaagagccgtgacattggcacgaagggcttgaatgaggagtagctttgccacatcttgatctgctcagccctggaggtgccagcaaagccccatgctggagcctgtgtaacagctccttgggaggaagcagaataaagcaattttccttgaagccgaaaaaaaaaaaaaacctcgactaacaaaacaagaggcacaaaaaaaaaaaaaacacaaacaaacaaacaacatttgtctttgtggcggccgtcggcgccccccagaacaagtttcgttgacgaaccactcggagggggggcagggggcccgaagatccatcggaacacgtggggtaaggggggtcacacgacaggagcacctgggcacacatggggc

SEQ ID NO: 362109 - DNA, 756 bp, Homo sapiens
catgctgaatcaccagggggtcccacatggctgtcccaactccatcaagctggagtccgagaggtggcaggcaggcgggcaggggcttaggagaaggccaagaaggccatcacggatgccgccatgatggcagaggagctgaagaaggagcaggacaccagcgcccacctggagcgcatgaagaagaacatggaacagaccattaaggacctgcagcaccggctggacgaagccgagcagatcgccctcaagggcggcaagaagcagctgcagaagctggaagcgcgggtgcgggagctggagaatgagctggaggccgagcagaagcgcaacgcagagtcggtgaagggcatgaggaagagcgagcggcgcatcaaggagctcacctaccagacggaggaggacaggaaaaacctgctgcggctgcaggacctggtagacaagctgcagctaaaggtcaaggcctacaagcgccaggccgaggaggcggaggagcaagccaacaccaacctgtccaagttccgcaaggtgcagcacgagctggatgaggcagaggagcgggcggacatcgccgagtcccaggtcaacaagctgcgggccaagagccgtgacattggcacgaagggcttgaatgaggagtagctttgccacatcttgatctgctcagccctggaggtgccagcaaagccccatgctggagcctgtgtaacagctccttgggaggaagcagaataaagcaattttccttgaagccga

SEQ ID NO: 362110 - DNA, 3888 bp, Homo sapiens
gggggtgggggtgccctgctgccccatatatacagcccctgagaccaggtctggctccacagctctgtcctgctctgtgtctttccctgctgctctcaggtcccctgcaggccttggcccctttcctcatctgtagacacacttgagtagcccaggcacagccatgggagattcggagatggcagtctttggggctgccgccccctacctgcgcaagtcagagaaggagcggctagaagcgcagaccaggccttttgacctcaagaaggatgtcttcgtgcctgatgacaaacaggagtttgtcaaggccaagatcgtgtctcgagagggtggcaaagtcactgccgagactgagtatggcaagacagtgaccgtgaaggaggaccaggtgatgcagcagaacccacccaagttcgacaaaatcgaggacatggccatgctgaccttcctgcatgagcccgcggtgctctacaacctcaaggatcgctacggctcctggatgatctacacctactcgggcctcttctgtgtcaccgtcaacccttacaagtggctgccggtgtacactcctgaggtggtggctgcctaccggggcaagaagaggagcgaggccccgccccacatcttctccatctccgacaacgcctatcagtacatgctgacagacagagaaaaccagtccatcctgatcaccggagaatccggagcagggaagacagtcaacaccaagagggtcatccagtactttgctgttattgcagccattggggaccgcagcaagaaggaccagagcccgggcaagggcaccctggaggaccagatcatccaggccaaccctgctctggaggcctttggcaatgccaagaccgtccggaacgacaactcctcccgcttcgggaaattcattcgaattcattttggggcaacaggaaagttggcatctgcagacatagagacctatcttctggaaaaatccagagttattttccagctgaaagcagagagagattatcacattttctaccaaatcctgtctaacaaaaagcctgagctgctggacatgctgctgatcaccaacaacccctacgattatgcattcatctcccaaggagagaccaccgtggcctccattgatgacgctgaggagctcatggccactgataacgcttttgatgtgctgggcttcacttcagaggagaaaaactccatgtataagctgacaggcgccatcatgcactttggaaacatgaagttcaagctgaagcagcgggaggagcaggcggagccagacggcactgaagaggctgacaagtctgcctacctcatggggctgaactcagccgacctgctcaaggggctgtgccaccctcgggtgaaagtgggcaatgagtacgtcaccaaggggcagaatgtccagcaggtgatatatgccactggggcactggccaaggcagtgtatgagaggatgttcaactggatggtgacgcgcatcaatgccaccctggagaccaagcagccacgccagtacttcataggagtcctggacatcgctggcttcgagatcttcgatttcaacagctttgagcagctctgcatcaacttcaccaacgagaagctgcagcagttcttcaaccaccacatgtttgtgctggagcaggaggagtacaagaaggagggcatcgagtggacattcattgactttggcatggacctgcaggcctgcattgacctcatcgagaagcccatgggcatcatgtccatcctggaagaggagtgcatgttccccaaggccaccgacatgaccttcaaggccaagctgtttgacaaccacctgggcaaatccgccaacttccagaagccacgcaatatcaaggggaagcctgaagcccacttctccctgatccactatgccggcatcgtggactacaacatcattggctggctgcagaagaacaaggatcctctcaatgagactgtcgtgggcttgtatcagaagtcttccctcaagctgctcagcaccctgtttgccaactatgctggggctgatgcgcctattgagaagggcaaaggcaaggccaagaaaggctcgtcctttcagactgtgtcagctctgcacagggaaaatctgaacaagctgatgaccaacttgcgctccacccatccccactttgtacgttgtatcatccctaatgagacaaagtctccaggggtgatggacaaccccctggtcatgcaccagctgcgctgcaatggtgtgctggagggcatccgcatctgcaggaaaggcttccccaaccgcatcctctacggggacttccggcagaggtatcgcatcctgaacccagcggccatccctgagggacagttcattgatagcaggaagggggcagagaagctgctcagctccctggacattgatcacaaccagtacaagtttggcacaccaaggtgttcttcaaggccgggctgctggggctgctggaggaaatgagggacgagaggctgagccgcatcatcacgcgtatccaggcccagtcccgaggtgtgctcgccagaatggagtacaaaaagctgctggaacgtagagactccctgctggtaatccagtggaacattcgggccttcatgggggtcaagaattggccctggatgaagctctacttcaagatcaagccgctgctgaagagtgcagaaagagagaaggagatggcctccatgaaggaggagttcacacgcctcaaagaggcgctagagaagtccgaggctcgccgcaaggagctggaggagaagatggtgtccctgctgcaggagaagaatgacctgcagctccaagtgcaggcggaacaagacaacctggcagatgctgaggagcgctgtgatcagctgatcaaaaacaagattcagctggaggccaaggtgaaggagatgaacgagaggctggaggatgaggaggagatgaatgctgagctcactgccaagaagcgcaagctggaagatgagtgctcagagctcaaaagggacatcgatgatctggagctgacactggccaaagtggagaaggagaaacacgcaacagagaacaaggtgaaaaacctgacagaggagatggctgggctggatgagatcattgccaagctgaccaaggagaagaaagctctgcaagaggcccaccaacaggctctggatgaccttcaggccgaggaggacaaggtcaacaccctgactaaggccaaagtcaagctggagcagcaagtggatgatctggaaggatccctggagcaagagaagaaggtgcgcatggacctggagcgagcgaagcggaagctggagggcgacctgaagctgacccaggagagcatcatggacctggagaatgacaagcagcagctggatgagcggctgaaaaaaaaagactttgagctgaatgctctcaacgcaaggattgaggatgaacaggccctcggcagccagctgcagaagaagctcaaggagcttcagcggcgcatcaaggagctcacctaccagacggaggaggacaggaaaaacctgctgcggctgcaggacctggtagacaagctgcagctaaaggtcaaggcctacaagcgccaggccgaggaggcggaggagcaagccaacaccaacctgtccaagttccgcaaggtgcagcacgagctggatgaggcagaggagcgggcggacatcgccgagtcccaggtcaacaagctgcgggccaagagccgtgacattggcacgaagggcttgaatgaggagtagctttgccacatcttgatctgctcagccctggaggtgccagcaaagccccatgctggagcctgtgtaacagctccttgggaggaagcagaataaagcaattttccttgaagccga

SEQ ID NO: 362111 - DNA, 6042 bp, Homo sapiens
gggggtgggggtgccctgctgccccatatatacagcccctgagaccaggtctggctccacagctctgtcctgctctgtgtctttccctgctgctctcaggtcccctgcaggccttggcccctttcctcatctgtagacacacttgagtagcccaggcacagccatgggagattcggagatggcagtctttggggctgccgccccctacctgcgcaagtcagagaaggagcggctagaagcgcagaccaggccttttgacctcaagaaggatgtcttcgtgcctgatgacaaacaggagtttgtcaaggccaagatcgtgtctcgagagggtggcaaagtcactgccgagactgagtatggcaagacagtgaccgtgaaggaggaccaggtgatgcagcagaacccacccaagttcgacaaaatcgaggacatggccatgctgaccttcctgcatgagcccgcggtgctctacaacctcaaggatcgctacggctcctggatgatctacacctactcgggcctcttctgtgtcaccgtcaacccttacaagtggctgccggtgtacactcctgaggtggtggctgcctaccggggcaagaagaggagcgaggccccgccccacatcttctccatctccgacaacgcctatcagtacatgctgacagacagagaaaaccagtccatcctgatcaccggagaatccggagcagggaagacagtcaacaccaagagggtcatccagtactttgctgttattgcagccattggggaccgcagcaagaaggaccagagcccgggcaagggcaccctggaggaccagatcatccaggccaaccctgctctggaggcctttggcaatgccaagaccgtccggaacgacaactcctcccgcttcgggaaattcattcgaattcattttggggcaacaggaaagttggcatctgcagacatagagacctatcttctggaaaaatccagagttattttccagctgaaagcagagagagattatcacattttctaccaaatcctgtctaacaaaaagcctgagctgctggacatgctgctgatcaccaacaacccctacgattatgcattcatctcccaaggagagaccaccgtggcctccattgatgacgctgaggagctcatggccactgataacgcttttgatgtgctgggcttcacttcagaggagaaaaactccatgtataagctgacaggcgccatcatgcactttggaaacatgaagttcaagctgaagcagcgggaggagcaggcggagccagacggcactgaagaggctgacaagtctgcctacctcatggggctgaactcagccgacctgctcaaggggctgtgccaccctcgggtgaaagtgggcaatgagtacgtcaccaaggggcagaatgtccagcaggtgatatatgccactggggcactggccaaggcagtgtatgagaggatgttcaactggatggtgacgcgcatcaatgccaccctggagaccaagcagccacgccagtacttcataggagtcctggacatcgctggcttcgagatcttcgatttcaacagctttgagcagctctgcatcaacttcaccaacgagaagctgcagcagttcttcaaccaccacatgtttgtgctggagcaggaggagtacaagaaggagggcatcgagtggacattcattgactttggcatggacctgcaggcctgcattgacctcatcgagaagcccatgggcatcatgtccatcctggaagaggagtgcatgttccccaaggccaccgacatgaccttcaaggccaagctgtttgacaaccacctgggcaaatccgccaacttccagaagccacgcaatatcaaggggaagcctgaagcccacttctccctgatccactatgccggcatcgtggactacaacatcattggctggctgcagaagaacaaggatcctctcaatgagactgtcgtgggcttgtatcagaagtcttccctcaagctgctcagcaccctgtttgccaactatgctggggctgatgcgcctattgagaagggcaaaggcaaggccaagaaaggctcgtcctttcagactgtgtcagctctgcacagggaaaatctgaacaagctgatgaccaacttgcgctccacccatccccactttgtacgttgtatcatccctaatgagacaaagtctccaggggtgatggacaaccccctggtcatgcaccagctgcgctgcaatggtgtgctggagggcatccgcatctgcaggaaaggcttccccaaccgcatcctctacggggacttccggcagaggtatcgcatcctgaacccagcggccatccctgagggacagttcattgatagcaggaagggggcagagaagctgctcagctccctggacattgatcacaaccagtacaagtttggcacaccaaggtgttcttcaaggccgggctgctggggctgctggaggaaatgagggacgagaggctgagccgcatcatcacgcgtatccaggcccagtcccgaggtgtgctcgccagaatggagtacaaaaagctgctggaacgtagagactccctgctggtaatccagtggaacattcgggccttcatgggggtcaagaattggccctggatgaagctctacttcaagatcaagccgctgctgaagagtgcagaaagagagaaggagatggcctccatgaaggaggagttcacacgcctcaaagaggcgctagagaagtccgaggctcgccgcaaggagctggaggagaagatggtgtccctgctgcaggagaagaatgacctgcagctccaagtgcaggcggaacaagacaacctggcagatgctgaggagcgctgtgatcagctgatcaaaaacaagattcagctggaggccaaggtgaaggagatgaacgagaggctggaggatgaggaggagatgaatgctgagctcactgccaagaagcgcaagctggaagatgagtgctcagagctcaaaagggacatcgatgatctggagctgacactggccaaagtggagaaggagaaacacgcaacagagaacaaggtgaaaaacctgacagaggagatggctgggctggatgagatcattgccaagctgaccaaggagaagaaagctctgcaagaggcccaccaacaggctctggatgaccttcaggccgaggaggacaaggtcaacaccctgactaaggccaaagtcaagctggagcagcaagtggatgatctggaaggatccctggagcaagagaagaaggtgcgcatggacctggagcgagcgaagcggaagctggagggcgacctgaagctgacccaggagagcatcatggacctggagaatgacaagcagcagctggatgagcggctgaaaaaaaaagactttgagctgaatgctctcaacgcaaggattgaggatgaacaggccctcggcagccagctgcagaagaagctcaaggagcttcaggcacgcatcgaggagctggaggaggagctggaggccgagcgcaccgccagggctaaggtggagaagctgcgctcagacctgtctcgggagctggaggagatcagcgagcggctggaagaggccggcggggccacgtccgtgcagatcgagatgaacaagaagcgcgaggccgagttccagaagatgcggcgggacctggaggaggccacgctgcagcacgaggccactgccgcggccctgcgcaagaagcacgccgacagcgtggccgagctgggcgagcagatcgacaacctgcagcgggtgaagcagaagctggagaaggagaagagcgagttcaagctggagctggatgacgtcacctccaacatggagcagatcatcaaggccaaggctaacctggagaagatgtgccggaccttggaagaccagatgaatgagcaccggagcaaggcggaggagacccagcgttctgtcaacgacctcaccagccagcgggccaagttgcaaaccgagaatggtgagctgtcccggcagctggatgagaaggaggcactgatctcccagctgacccgaggcaagctcacctacacccagcagctggaggacctcaagaggcagctggaggaggaggttaaggcgaagaacgccctggcccacgcactgcagtcggcccggcatgactgcgacctgctgcgggagcagtacgaggaggagacggaggccaaggccgagctgcagcgcgtcctttccaaggccaactcggaggtggcccagtggaggaccaagtatgagacggacgccattcagcggactgaggagctcgaggaggccaagaagaagctggcccagcggctgcaggaagctgaggaggccgtggaggctgttaatgccaagtgctcctcgctggagaagaccaagcaccggctacagaatgagatcgaggacttgatggtggacgtagagcgctccaatgctgctgctgcagccctggacaagaagcagaggaacttcgacaagatcctggccgagtggaagcagaagtatgaggagtcgcagtcggagctggagtcctcgcagaaggaggctcgctccctcagcacagagctcttcaaactcaagaacgcctatgaggagtccctggaacatctggagaccttcaagcgggagaacaaaaacctgcaggaggagatctccgacttgactgagcagttgggttccagcggaaagactatccatgagctggagaaggtccgaaagcagctggaggccgagaagatggagctgcagtcagccctggaggaggccgaggcctccctggagcacgaggagggcaagatcctccgggcccagctggagttcaaccagatcaaggcagagatcgagcggaagctggcagagaaggacgaggagatggaacaggccaagcgcaaccacctgcgggtggtggactcgctgcagacctccctggacgcagagacacgcagccgcaacgaggccctgagggtgaagaagaagatggaaggagacctcaatgagatggagatccagctcagccacgccaaccgcatggccgccgaggcccagaagcaagtcaagagcctccagagcttgttgaaggacacccagattcagctggacgatgcagtccgtgccaacgacgacctgaaggagaacatcgccatcgtggagcggcgcaacaacctgctgcaggctgagctggaggagttgcgtgccgtggtggagcagacagagcggtcccggaagctggcggagcaggagctgattgagactagtgagcgggtgcagctgctgcattcccagaacaccagcctcatcaaccagaagaagaagatggatgctgacctgtcccagctccagactgaagtggaggaggcagtgcaggagtgcaggaatgctgaggagaaggccaagaaggccatcacggatgccgccatgatggcagaggagctgaagaaggagcaggacaccagcgcccacctggagcgcatgaagaagaacatggaacagaccattaaggacctgcagcaccggctggacgaagccgagcagatcgccctcaagggcggcaagaagcagctgcagaagctggaagcgcgggtgcgggagctggagaatgagctggaggccgagcagaagcgcaacgcagagtcggtgaagggcatgaggaagagcgagcggcgcatcaaggagctcacctaccagacggaggaggacaggaaaaacctgctgcggctgcaggacctggtagacaagctgcagctaaaggtcaaggcctacaagcgccaggccgaggaggcggaggagcaagccaacaccaacctgtccaagttccgcaaggtgcagcacgagctggatgaggcagaggagcgggcggacatcgccgagtcccaggtcaacaagctgcgggccaagagccgtgacattggcacgaagggctttattagagtagctttccacatctgatctctcagcctgagtgcacaagcccatgctgagctgttaactcttggagagcgataagca

SEQ ID NO: 362112 - DNA, 1522 bp, Homo sapiens
gggggtgggggtgccctgctgccccatatatacagcccctgagaccaggtctggctccacagctctgtcctgctctgtgtctttccctgctgctctcaggtcccctgcaggccttggcccctttcctcatctgtagacacacttgagtagcccaggcacagccatgggagattcggagatggcagtctttggggctgccgccccctacctgcgcaagtcagagaaggagcggctagaagcgcagaccaggccttttgacctcaagaaggatgtcttcgtgcctgatgacaaacaggagtttgtcaaggccaagatcgtgtctcgagagggtggcaaagtcactgccgagactgagtatggcaagacagtgaccgtgaaggaggaccaggtgatgcagcagaacccacccaagttcgacaaaatcgaggacatggccatgctgaccttcctgcatgagcccgcggtgctctacaacctcaaggatcgctacggctcctggatgatctacacctactcgggcctcttctgtgtcaccgtcaacccttacaagtggctgccggtgtacactcctgaggtggtggctgcctaccggggcaagaagaggagcgaggccccgccccacatcttctccatctccgacaacgcctatcagtacatgctgacagacagagaaaaccagtccatcctgatcaccggagaatccggagcagggaagacagtcaacaccaagagggtcatccagtactttgctgttattgcagccattggggaccgcagcaagaaggaccagagcccgggcaagggcaccctggaggaccagatcatccaggccaaccctgctctggaggcctttggcaatgccaagaccgtccggaacgacaactcctcccgcttcgggaaattcattcgaattcattttggggcaacaggaaagttggcatctgcagacatagagacctatcttctggaaaaatccagagttattttccagctgaaagcagagagagattatcacattttctaccaaatcctgtctaacaaaaagcctgagctgctggacatgctgctgatcaccaacaacccctacgattatgcattcatctcccaaggagagaccaccgtggcctccattgatgacgctgaggagctcatggccactgataacgcttttgatgtgctgggcttcacttcagaggacctggtagacaagctgcagctaaaggtcaaggcctacaagcgccaggccgaggaggcggaggagcaagccaacaccaacctgtccaagttccgcaaggtgcagcacgagctggatgaggcagaggagcgggcggacatcgccgagtcccaggtcaacaagctgcgggccaagagccgtgacattggcacgaagggcttgaatgaggagtagctttgccacatcttgatctgctcagccctggaggtgccagcaaagccccatgctggagcctgtgtaacagctccttgggaggaagcagaataaagcaattttccttgaagccga

SEQ ID NO: 362113 - DNA, 3786 bp, Homo sapiens
gggggtgggggtgccctgctgccccatatatacagcccctgagaccaggtctggctccacagctctgtcctgctctgtgtctttccctgctgctctcaggtcccctgcaggccttggcccctttcctcatctgtagacacacttgagtagcccaggcacagccatgggagattcggagatggcagtctttggggctgccgccccctacctgcgcaagtcagagaaggagcggctagaagcgcagaccaggccttttgacctcaagaaggatgtcttcgtgcctgatgacaaacaggagtttgtcaaggccaagatcgtgtctcgagagggtggcaaagtcactgccgagactgagtatggcaagacagtgaccgtgaaggaggaccaggtgatgcagcagaacccacccaagttcgacaaaatcgaggacatggccatgctgaccttcctgcatgagcccgcggtgctctacaacctcaaggatcgctacggctcctggatgatctacacctactcgggcctcttctgtgtcaccgtcaacccttacaagtggctgccggtgtacactcctgaggtggtggctgcctaccggggcaagaagaggagcgaggccccgccccacatcttctccatctccgacaacgcctatcagtacatgctgacagacagagaaaaccagtccatcctgatcaccggagaatccggagcagggaagacagtcaacaccaagagggtcatccagtactttgctgttattgcagccattggggaccgcagcaagaaggaccagagcccgggcaagggcaccctggaggaccagatcatccaggccaaccctgctctggaggcctttggcaatgccaagaccgtccggaacgacaactcctcccgcttcgggaaattcattcgaattcattttggggcaacaggaaagttggcatctgcagacatagagacctatcttctggaaaaatccagagttattttccagctgaaagcagagagagattatcacattttctaccaaatcctgtctaacaaaaagcctgagctgctggacatgctgctgatcaccaacaacccctacgattatgcattcatctcccaaggagagaccaccgtggcctccattgatgacgctgaggagctcatggccactgataacgcttttgatgtgctgggcttcacttcagaggagaaaaactccatgtataagctgacaggcgccatcatgcactttggaaacatgaagttcaagctgaagcagcgggaggagcaggcggagccagacggcactgaagaggctgacaagtctgcctacctcatggggctgaactcagccgacctgctcaaggggctgtgccaccctcgggtgaaagtgggcaatgagtacgtcaccaaggggcagaatgtccagcaggtgatatatgccactggggcactggccaaggcagtgtatgagaggatgttcaactggatggtgacgcgcatcaatgccaccctggagaccaagcagccacgccagtacttcataggagtcctggacatcgctggcttcgagatcttcgatttcaacagctttgagcagctctgcatcaacttcaccaacgagaagctgcagcagttcttcaaccaccacatgtttgtgctggagcaggaggagtacaagaaggagggcatcgagtggacattcattgactttggcatggacctgcaggcctgcattgacctcatcgagaagcccatgggcatcatgtccatcctggaagaggagtgcatgttccccaaggccaccgacatgaccttcaaggccaagctgtttgacaaccacctgggcaaatccgccaacttccagaagccacgcaatatcaaggggaagcctgaagcccacttctccctgatccactatgccggcatcgtggactacaacatcattggctggctgcagaagaacaaggatcctctcaatgagactgtcgtgggcttgtatcagaagtcttccctcaagctgctcagcaccctgtttgccaactatgctggggctgatgcgcctattgagaagggcaaaggcaaggccaagaaaggctcgtcctttcagactgtgtcagctctgcacagggaaaatctgaacaagctgatgaccaacttgcgctccacccatccccactttgtacgttgtatcatccctaatgagacaaagtctccaggggtgatggacaaccccctggtcatgcaccagctgcgctgcaatggtgtgctggagggcatccgcatctgcaggaaaggcttccccaaccgcatcctctacggggacttccggcagaggtatcgcatcctgaacccagcggccatccctgagggacagttcattgatagcaggaagggggcagagaagctgctcagctccctggacattgatcacaaccagtacaagtttggcacaccaaggtgttcttcaaggccgggctgctggggctgctggaggaaatgagggacgagaggctgagccgcatcatcacgcgtatccaggcccagtcccgaggtgtgctcgccagaatggagtacaaaaagctgctggaacgtagagactccctgctggtaatccagtggaacattcgggccttcatgggggtcaagaattggccctggatgaagctctacttcaagatcaagccgctgctgaagagtgcagaaagagagaaggagatggcctccatgaaggaggagttcacacgcctcaaagaggcgctagagaagtccgaggctcgccgcaaggagctggaggagaagatggtgtccctgctgcaggagaagaatgacctgcagctccaagtgcaggcggaacaagacaacctggcagatgctgaggagcgctgtgatcagctgatcaaaaacaagattcagctggaggccaaggtgaaggagatgaacgagaggctggaggatgaggaggagatgaatgctgagctcactgccaagaagcgcaagctggaagatgagtgctcagagctcaaaagggacatcgatgatctggagctgacactggccaaagtggagaaggagaaacacgcaacagagaacaaggtgaaaaacctgacagaggagatggctgggctggatgagatcattgccaagctgaccaaggagaagaaagctctgcaagaggcccaccaacaggctctggatgaccttcaggccgaggaggacaaggtcaacaccctgactaaggccaaagtcaagctggagcagcaagtggatgatctggaaggatccctggagcaagagaagaaggtgcgcatggacctggagcgagcgaagcggaagctggagggcgacctgaagctgacccaggagagcatcatggacctggagaatgacaagcagcagctggatgagcggctgaaaaaaaaagactttgagctgaatgctctcaacgcaaggattgaggatgaacaggccctcggcagccagctgcagaagaagctcaaggagcttcaggcacgcatcgaggagctggaggaggagctggaggccgagcgcaccgccagggctaaggtggagaagctgcgctcagacctgtctcgggagcgggcggacatcgccgagtcccaggtcaacaagctgcgggccaagagccgtgacattggcacgaagggcttgaatgaggagtagctttgccacatcttgatctgctcagccctggaggtgccagcaaagccccatgctggagcctgtgtaacagctccttgggaggaagcagaataaagcaattttccttgaagccga

SEQ ID NO: 362114 - DNA, 3569 bp, Homo sapiens
gggggtgggggtgccctgctgccccatatatacagcccctgagaccaggtctggctccacagctctgtcctgctctgtgtctttccctgctgctctcaggtcccctgcaggccttggcccctttcctcatctgtagacacacttgagtagcccaggcacagccatgggagattcggagatggcagtctttggggctgccgccccctacctgcgcaagtcagagaaggagcggctagaagcgcagaccaggccttttgacctcaagaaggatgtcttcgtgcctgatgacaaacaggagtttgtcaaggccaagatcgtgtctcgagagggtggcaaagtcactgccgagactgagtatggcaagacagtgaccgtgaaggaggaccaggtgatgcagcagaacccacccaagttcgacaaaatcgaggacatggccatgctgaccttcctgcatgagcccgcggtgctctacaacctcaaggatcgctacggctcctggatgatctacacctactcgggcctcttctgtgtcaccgtcaacccttacaagtggctgccggtgtacactcctgaggtggtggctgcctaccggggcaagaagaggagcgaggccccgccccacatcttctccatctccgacaacgcctatcagtacatgctgacagacagagaaaaccagtccatcctgatcaccggagaatccggagcagggaagacagtcaacaccaagagggtcatccagtactttgctgttattgcagccattggggaccgcagcaagaaggaccagagcccgggcaagggcaccctggaggaccagatcatccaggccaaccctgctctggaggcctttggcaatgccaagaccgtccggaacgacaactcctcccgcttcgggaaattcattcgaattcattttggggcaacaggaaagttggcatctgcagacatagagacctatcttctggaaaaatccagagttattttccagctgaaagcagagagagattatcacattttctaccaaatcctgtctaacaaaaagcctgagctgctggacatgctgctgatcaccaacaacccctacgattatgcattcatctcccaaggagagaccaccgtggcctccattgatgacgctgaggagctcatggccactgataacgcttttgatgtgctgggcttcacttcagaggagaaaaactccatgtataagctgacaggcgccatcatgcactttggaaacatgaagttcaagctgaagcagcgggaggagcaggcggagccagacggcactgaagaggctgacaagtctgcctacctcatggggctgaactcagccgacctgctcaaggggctgtgccaccctcgggtgaaagtgggcaatgagtacgtcaccaaggggcagaatgtccagcaggtgatatatgccactggggcactggccaaggcagtgtatgagaggatgttcaactggatggtgacgcgcatcaatgccaccctggagaccaagcagccacgccagtacttcataggagtcctggacatcgctggcttcgagatcttcgatttcaacagctttgagcagctctgcatcaacttcaccaacgagaagctgcagcagttcttcaaccaccacatgtttgtgctggagcaggaggagtacaagaaggagggcatcgagtggacattcattgactttggcatggacctgcaggcctgcattgacctcatcgagaagcccatgggcatcatgtccatcctggaagaggagtgcatgttccccaaggccaccgacatgaccttcaaggccaagctgtttgacaaccacctgggcaaatccgccaacttccagaagccacgcaatatcaaggggaagcctgaagcccacttctccctgatccactatgccggcatcgtggactacaacatcattggctggctgcagaagaacaaggatcctctcaatgagactgtcgtgggcttgtatcagaagtcttccctcaagctgctcagcaccctgtttgccaactatgctggggctgatgcgcctattgagaagggcaaaggcaaggccaagaaaggctcgtcctttcagactgtgtcagctctgcacagggaaaatctgaacaagctgatgaccaacttgcgctccacccatccccactttgtacgttgtatcatccctaatgagacaaagtctccaggggtgatggacaaccccctggtcatgcaccagctgcgctgcaatggtgtgctggagggcatccgcatctgcaggaaaggcttccccaaccgcatcctctacggggacttccggcagaggtatcgcatcctgaacccagcggccatccctgagggacagttcattgatagcaggaagggggcagagaagctgctcagctccctggacattgatcacaaccagtacaagtttggcacaccaaggtgttcttcaaggccgggctgctggggctgctggaggaaatgagggacgagaggctgagccgcatcatcacgcgtatccaggcccagtcccgaggtgtgctcgccagaatggagtacaaaaagctgctggaacgtagagactccctgctggtaatccagtggaacattcgggccttcatgggggtcaagaattggccctggatgaagctctacttcaagatcaagccgctgctgaagagtgcagaaagagagaaggagatggcctccatgaaggaggagttcacacgcctcaaagaggcgctagagaagtccgaggctcgccgcaaggagctggaggagaagatggtgtccctgctgcaggagaagaatgacctgcagctccaagtgcaggcggaacaagacaacctggcagatgctgaggagcgctgtgatcagctgatcaaaaacaagattcagctggaggccaaggtgaaggagatgaacgagaggctggaggatgaggaggagatgaatgctgagctcactgccaagaagcgcaagctggaagatgagtgctcagagctcaaaagggacatcgatgatctggagctgacactggccaaagtggagaaggagaaacacgcaacagagaacaaggtgaaaaacctgacagaggagatggctgggctggatgagatcattgccaagctgaccaaggagaagaaagctctgcaagaggcccaccaacaggctctggatgaccttcaggccgaggaggacaaggtcaacaccctgactaaggccaaagtcaagctggagcagcaagtggatgatctggaaggatccctggagcaagagaagaaggtgcgcatggacctggagcgagcgaagcggaagctggagggcgacctgaagctgacccaggagagcatcatggacctggagaatgacaagcagcagctggatgagcggctgaaaaaaaaagactttgagctgaatgctctcaacgcaaggattgaggatgaacaggccctcggcagccagctgcagaagaagctcaaggagcttcagcacgcatcggggggctggggggggtccaccaaaccccattctgggcctttttaaacctccttggggggagc

SEQ ID NO: 362115 - DNA, 3282 bp, Homo sapiens
gggggtgggggtgccctgctgccccatatatacagcccctgagaccaggtctggctccacagctctgtcctgctctgtgtctttccctgctgctctcaggtcccctgcaggccttggcccctttcctcatctgtagacacacttgagtagcccaggcacagccatgggagattcggagatggcagtctttggggctgccgccccctacctgcgcaagtcagagaaggagcggctagaagcgcagaccaggccttttgacctcaagaaggatgtcttcgtgcctgatgacaaacaggagtttgtcaaggccaagatcgtgtctcgagagggtggcaaagtcactgccgagactgagtatggcaagacagtgaccgtgaaggaggaccaggtgatgcagcagaacccacccaagttcgacaaaatcgaggacatggccatgctgaccttcctgcatgagcccgcggtgctctacaacctcaaggatcgctacggctcctggatgatctacacctactcgggcctcttctgtgtcaccgtcaacccttacaagtggctgccggtgtacactcctgaggtggtggctgcctaccggggcaagaagaggagcgaggccccgccccacatcttctccatctccgacaacgcctatcagtacatgctgacagacagagaaaaccagtccatcctgatcaccggagaatccggagcagggaagacagtcaacaccaagagggtcatccagtactttgctgttattgcagccattggggaccgcagcaagaaggaccagagcccgggcaagggcaccctggaggaccagatcatccaggccaaccctgctctggaggcctttggcaatgccaagaccgtccggaacgacaactcctcccgcttcgggaaattcattcgaattcattttggggcaacaggaaagttggcatctgcagacatagagacctatcttctggaaaaatccagagttattttccagctgaaagcagagagagattatcacattttctaccaaatcctgtctaacaaaaagcctgagctgctggacatgctgctgatcaccaacaacccctacgattatgcattcatctcccaaggagagaccaccgtggcctccattgatgacgctgaggagctcatggccactgataacgcttttgatgtgctgggcttcacttcagaggagaaaaactccatgtataagctgacaggcgccatcatgcactttggaaacatgaagttcaagctgaagcagcgggaggagcaggcggagccagacggcactgaagaggctgacaagtctgcctacctcatggggctgaactcagccgacctgctcaaggggctgtgccaccctcgggtgaaagtgggcaatgagtacgtcaccaaggggcagaatgtccagcaggtgatatatgccactggggcactggccaaggcagtgtatgagaggatgttcaactggatggtgacgcgcatcaatgccaccctggagaccaagcagccacgccagtacttcataggagtcctggacatcgctggcttcgagatcttcgatttcaacagctttgagcagctctgcatcaacttcaccaacgagaagctgcagcagttcttcaaccaccacatgtttgtgctggagcaggaggagtacaagaaggagggcatcgagtggacattcattgactttggcatggacctgcaggcctgcattgacctcatcgagaagcccatgggcatcatgtccatcctggaagaggagtgcatgttccccaaggccaccgacatgaccttcaaggccaagctgtttgacaaccacctgggcaaatccgccaacttccagaagccacgcaatatcaaggggaagcctgaagcccacttctccctgatccactatgccggcatcgtggactacaacatcattggctggctgcagaagaacaaggatcctctcaatgagactgtcgtgggcttgtatcagaagtcttccctcaagctgctcagcaccctgtttgccaactatgctggggctgatgcgcctattgagaagggcaaaggcaaggccaagaaaggctcgtcctttcagactgtgtcagctctgcacagggaaaatctgaacaagctgatgaccaacttgcgctccacccatccccactttgtacgttgtatcatccctaatgagacaaagtctccaggggtgatggacaaccccctggtcatgcaccagctgcgctgcaatggtgtgctggagggcatccgcatctgcaggaaaggcttccccaaccgcatcctctacggggacttccggcagaggtatcgcatcctgaacccagcggccatccctgagggacagttcattgatagcaggaagggggcagagaagctgctcagctccctggacattgatcacaaccagtacaagtttggcacaccaaggtgttcttcaaggccgggctgctggggctgctggaggaaatgagggacgagaggctgagccgcatcatcacgcgtatccaggcccagtcccgaggtgtgctcgccagaatggagtacaaaaagctgctggaacgtagagactccctgctggtaatccagtggaacattcgggccttcatgggggtcaagaattggccctggatgaagctctacttcaagatcaagccgctgctgaagagtgcagaaagagagaaggagatggcctccatgaaggaggagttcacacgcctcaaagaggcgctagagaagtccgaggctcgccgcaaggagctggaggagaagatggtgtccctgctgcaggagaagaatgacctgcagctccaagtgcaggcggaacaagacaacctggcagatgctgaggagcgctgtgatcagctgatcaaaaacaagattcagctggaggccaaggtgaaggagatgaacgagaggctggaggatgaggaggagatgaatgctgagctcactgccaagaagcgcaagctggaagatgagtgctcagagctcaaaagggacatcgatgatctggagctgacactggccaaagtggagaaggagaaacacgcaacagagaacaaggtgaaaaacctgacagaggagatgggtggcctcccctcccttttagctggcctacatattgcctcataaaaaaggctgaattctatttggtagtcatttcatggattagctgactttgagtaggtagacttctctattaaagagtaagtcttggaatatgcagctaaaagtccagagactaacctcagaatcttatct

SEQ ID NO: 362116 - DNA, 2061 bp, Homo sapiens
gggggtgggggtgccctgctgccccatatatacagcccctgagaccaggtctggctccacagctctgtcctgctctgtgtctttccctgctgctctcaggtcccctgcaggccttggcccctttcctcatctgtagacacacttgagtagcccaggcacagccatgggagattcggagatggcagtctttggggctgccgccccctacctgcgcaagtcagagaaggagcggctagaagcgcagaccaggccttttgacctcaagaaggatgtcttcgtgcctgatgacaaacaggagtttgtcaaggccaagatcgtgtctcgagagggtggcaaagtcactgccgagactgagtatggcaagacagtgaccgtgaaggaggaccaggtgatgcagcagaacccacccaagttcgacaaaatcgaggacatggccatgctgaccttcctgcatgagcccgcggtgctctacaacctcaaggatcgctacggctcctggatgatctacacctactcgggcctcttctgtgtcaccgtcaacccttacaagtggctgccggtgtacactcctgaggtggtggctgcctaccggggcaagaagaggagcgaggccccgccccacatcttctccatctccgacaacgcctatcagtacatgctgacagacagagaaaaccagtccatcctgatcaccggagaatccggagcagggaagacagtcaacaccaagagggtcatccagtactttgctgttattgcagccattggggaccgcagcaagaaggaccagagcccgggcaagggcaccctggaggaccagatcatccaggccaaccctgctctggaggcctttggcaatgccaagaccgtccggaacgacaactcctcccgcttcgggaaattcattcgaattcattttggggcaacaggaaagttggcatctgcagacatagagacctatcttctggaaaaatccagagttattttccagctgaaagcagagagagattatcacattttctaccaaatcctgtctaacaaaaagcctgagctgctggacatgctgctgatcaccaacaacccctacgattatgcattcatctcccaaggagagaccaccgtggcctccattgatgacgctgaggagctcatggccactgataacgcttttgatgtgctgggcttcacttcagaggagaaaaactccatgtataagctgacaggcgccatcatgcactttggaaacatgaagttcaagctgaagcagcgggaggagcaggcggagccagacggcactgaagaggctgacaagtctgcctacctcatggggctgaactcagccgacctgctcaaggggctgtgccaccctcgggtgaaagtgggcaatgagtacgtcaccaaggggcagaatgtccagcaggtgatatatgccactggggcactggccaaggcagtgtatgagaggatgttcaactggatggtgacgcgcatcaatgccaccctggagaccaagcagccacgccagtacttcataggagtcctggacatcgctggcttcgagatcttcgatttcaacagctttgagcagctctgcatcaacttcaccaacgagaagctgcagcagttcttcaaccaccacatgtttgtgctggagcaggaggagtacaagaaggagggcgaggagcaagccaacaccaacctgtccaagttccgcaaggtgcagcacgagctggatgaggcagaggagcgggcggacatcgccgagtcccaggtcaacaagctgcgggccaagagccgtgacattggcacgaagggtgggtccctcttttgggctttgctagtcacccccacagcaggcatacccagacagagcaccctcaaacccgggatgcttccttttcatttattccacacacttgagccacatggccccagaggccaaggtaatgcagttctctgtgatttcaaggattcttccagctctaactttttttttttttttttttgagacggtgtctcactctagcctgggtgacagagcaagactccatctcaaaaaaa

SEQ ID NO: 362117 - DNA, 1346 bp, Homo sapiens
gggggtgggggtgccctgctgccccatatatacagcccctgagaccaggtctggctccacagctctgtcctgctctgtgtctttccctgctgctctcaggtcccctgcaggccttggcccctttcctcatctgtagacacacttgagtagcccaggcacagccatgggagattcggagatggcagtctttggggctgccgccccctacctgcgcaagtcagagaaggagcggctagaagcgcagaccaggccttttgacctcaagaaggatgtcttcgtgcctgatgacaaacaggagtttgtcaaggccaagatcgtgtctcgagagggtggcaaagtcactgccgagactgagtatggcaagacagtgaccgtgaaggaggaccaggtgatgcagcagaacccacccaagttcgacaaaatcgaggacatggccatgctgaccttcctgcatgagcccgcggtgctctacaacctcaaggatcgctacggctcctggatgatctacacctactcgggcctcttctgtgtcaccgtcaacccttacaagtggctgccggtgtacactcctgaggtggtggctgcctaccggggcaagaagaggagcgaggccccgccccacatcttctccatctccgacaacgcctatcagtacatgctgacagacagagaaaaccagtccatcctgatcaccggagaatccggagcagggaagacagtcaacaccaagagggtcatccagtactttgctgttattgcagccattggggaccgcagcaagaaggaccagagcccgggcaagggcaccctggaggaccagatcatccaggccaaccctgctctggaggcctttggcaatgccaagaccgtccggaacgacaactcctcccgcttcgggaaattcattcgaattcattttggggcaacaggaaagttggcatctgcagacatagagacctatcttctggaaaaatccagagttattttccagctgaaagcagagagagattatcacattttctaccaaatcctgtctaacaaaaagcctgagctgctggacatgctgctgatcaccaacaacccctacgattatgcattcatctcccaaggagagaccaccgtggcctccattgatgacgctgaggagctcatggccactgataacgcttttgatgtgctgggcttcacttcagaggtaatacacaaacatttttacttgaaaagagttgagataatggcccaatgtgaggagtggattgcggatatccagcagtacagcagttataagcgggtaggcaggactatgtctcaccatgcagcagctctcaagcgtcacactgctcagc

SEQ ID NO: 362118 - DNA, 532 bp, Homo sapiens
acaaccccctggtcatgcaccagctgcgctgcaatggtgtgctggagggcatccgcatctgcaggaaaggcttccccaaccgcatcctctacggggacttccggcagaggtgggtatgagggtgcaccagagctcatagaacagggggagccaggctgccctgatgggaatgggatctgcaggtgaccctggaattctatgggcagagcagatcactgcagagcatgggtgactctggacacttccctcctcaggtatcgcatcctgaacccagcggccatccctgagggacagttcattgatagcaggaagggggcagagaagctgctcagctccctggacattgatcacaaccagtacaagtttggcacaccaagacaccaaggtgaggaaaggagactaattaattaaaggaagacatctcttttccattgactcctctgatgcttttcctgttgtaatcatcttagcaaaatctcttacctgtatgctacccctcccagtggaacatctagcaccactcccctcatcc

SEQ ID NO: 362119 - DNA, 2022 bp, Homo sapiens
ctgctgggtgtaggtgagcttgcctcgggtcagctggaggacctcaagaggcagctggaggaggaggttaaggcgaagaacgccctggcccacgcactgcagtcggcccggcatgactgcgacctgctgcgggagcagtacgaggaggagacggaggccaaggccgagctgcagcgcgtcctttccaaggccaactcggaggtggcccagtggaggaccaagtatgagacggacgccattcagcggactgaggagctcgaggaggccaagaagaagctggcccagcggctgcaggaagctgaggaggccgtggaggctgttaatgccaagtgctcctcgctggagaagaccaagcaccggctacagaatgagatcgaggacttgatggtggacgtagagcgctccaatgctgctgctgcagccctggacaagaagcagaggaacttcgacaagatcctggccgagtggaagcagaagtatgaggagtcgcagtcggagctggagtcctcgcagaaggaggctcgctccctcagcacagagctcttcaaactcaagaacgcctatgaggagtccctggaacatctggagaccttcaagcgggagaacaaaaacctgcaggaggagatctccgacttgactgagcagttgggttccagcggaaagactatccatgagctggagaaggtccgaaagcagctggaggccgagaagatggagctgcagtcagccctggaggaggccgaggcctccctggagcacgaggagggcaagatcctccgggcccagctggagttcaaccagatcaaggcagagatcgagcggaagctggcagagaaggacgaggagatggaacaggccaagcgcaaccacctgcgggtggtggactcgctgcagacctccctggacgcagagacacgcagccgcaacgaggccctgagggtgaagaagaagatggaaggagacctcaatgagatggagatccagctcagccacgccaaccgcatggccgccgaggcccagaagcaagtcaagagcctccagagcttgttgaaggacacccagattcagctggacgatgcagtccgtgccaacgacgacctgaaggagaacatcgccatcgtggagcggcgcaacaacctgctgcaggctgagctggaggagttgcgtgccgtggtggagcagacagagcggtcccggaagctggcggagcaggagctgattgagactagtgagcgggtgcagctgctgcattcccagaacaccagcctcatcaaccagaagaagaagatggatgctgacctgtcccagctccagactgaagtggaggaggcagtgcaggagtgcaggaatgctgaggagaaggccaagaaggccatcacggatgccgccatgatggcagaggagctgaagaaggagcaggacaccagcgcccacctggagcgcatgaagaagaacatggaacagaccattaaggacctgcagcaccggctggacgaagccgagcagatcgccctcaagggcggcaagaagcagctgcagaagctggaagcgcgggtgcgggagctggagaatgagctggaggccgagcagaagcgcaacgcagagtcggtgaagggcatgaggaagagcgagcggcgcatcaaggagctcacctaccagacggaggaggacaggaaaaacctgctgcggctgcaggacctggtagacaagctgcagctaaaggtcaaggcctacaagcgccaggccgaggaggcggaggagcaagccaacaccaacctgtccaagttccgcaaggtgcagcacgagctggatgaggcagaggagcgggcggacatcgccgagtcccaggtcaacaagctgcgggccaagagccgtgacattggcacgaagggcttgaatgaggagtagctttgccacatcttgatctgctcagccctggaggtgccagcaaagccccatgctggagcctgtgtaacagctccttgggaggaagcagaataaagcaattttccttgaagccga

SEQ ID NO: 362120 - DNA, 3419 bp, Homo sapiens
  misc_feature (29)..(29): n is a, c, g, or t
tatgactcccgagattctcaggagcatgncaggtgaagggctcctcccatgaatggatggagattaaggagtgtgtgttattcatgcttaattcaccagtgcttagctgagtacctggcataaaatagttactgtggtggcccaagtaataacccccaccgccaccaattgctcatgtcctatgttacacagcaccattacataggaagggggaattaagagtgcagataaaattaatgttgctcatcagctgaccttaaaaccagattatgctggaggatgaggaggagatgaatgctgagctcactgccaagaagcgcaagctggaagatgagtgctcagagctcaaaagggacatcgatgatctggagctgacactggccaaagtggagaaggagaaacacgcaacagagaacaaggtgaaaaacctgacagaggagatggctgggctggatgagatcattgccaagctgaccaaggagaagaaagctctgcaagaggcccaccaacaggctctggatgaccttcaggccgaggaggacaaggtcaacaccctgactaaggccaaagtcaagctggagcagcaagtggatgatctggaaggatccctggagcaagagaagaaggtgcgcatggacctggagcgagcgaagcggaagctggagggcgacctgaagctgacccaggagagcatcatggacctggagaatgacaagcagcagctggatgagcggctgaaaaaaaaagactttgagctgaatgctctcaacgcaaggattgaggatgaacaggccctcggcagccagctgcagaagaagctcaaggagcttcaggcacgcatcgaggagctggaggaggagctggaggccgagcgcaccgccagggctaaggtggagaagctgcgctcagacctgtctcgggagctggaggagatcagcgagcggctggaagaggccggcggggccacgtccgtgcagatcgagatgaacaagaagcgcgaggccgagttccagaagatgcggcgggacctggaggaggccacgctgcagcacgaggccactgccgcggccctgcgcaagaagcacgccgacagcgtggccgagctgggcgagcagatcgacaacctgcagcgggtgaagcagaagctggagaaggagaagagcgagttcaagctggagctggatgacgtcacctccaacatggagcagatcatcaaggccaaggctaacctggagaagatgtgccggaccttggaagaccagatgaatgagcaccggagcaaggcggaggagacccagcgttctgtcaacgacctcaccagccagcgggccaagttgcaaaccgagaatggtgagctgtcccggcagctggatgagaaggaggcactgatctcccagctgacccgaggcaagctcacctacacccagcagctggaggacctcaagaggcagctggaggaggaggttaaggcgaagaacgccctggcccacgcactgcagtcggcccggcatgactgcgacctgctgcgggagcagtacgaggaggagacggaggccaaggccgagctgcagcgcgtcctttccaaggccaactcggaggtggcccagtggaggaccaagtatgagacggacgccattcagcggactgaggagctcgaggaggccaagaagaagctggcccagcggctgcaggaagctgaggaggccgtggaggctgttaatgccaagtgctcctcgctggagaagaccaagcaccggctacagaatgagatcgaggacttgatggtggacgtagagcgctccaatgctgctgctgcagccctggacaagaagcagaggaacttcgacaagatcctggccgagtggaagcagaagtatgaggagtcgcagtcggagctggagtcctcgcagaaggaggctcgctccctcagcacagagctcttcaaactcaagaacgcctatgaggagtccctggaacatctggagaccttcaagcgggagaacaaaaacctgcaggaggagatctccgacttgactgagcagttgggttccagcggaaagactatccatgagctggagaaggtccgaaagcagctggaggccgagaagatggagctgcagtcagccctggaggaggccgaggcctccctggagcacgaggagggcaagatcctccgggcccagctggagttcaaccagatcaaggcagagatcgagcggaagctggcagagaaggacgaggagatggaacaggccaagcgcaaccacctgcgggtggtggactcgctgcagacctccctggacgcagagacacgcagccgcaacgaggccctgagggtgaagaagaagatggaaggagacctcaatgagatggagatccagctcagccacgccaaccgcatggccgccgaggcccagaagcaagtcaagagcctccagagcttgttgaaggacacccagattcagctggacgatgcagtccgtgccaacgacgacctgaaggagaacatcgccatcgtggagcggcgcaacaacctgctgcaggctgagctggaggagttgcgtgccgtggtggagcagacagagcggtcccggaagctggcggagcaggagctgattgagactagtgagcgggtgcagctgctgcattcccagaacaccagcctcatcaaccagaagaagaagatggatgctgacctgtcccagctccagactgaagtggaggaggcagtgcaggagtgcaggaatgctgaggagaaggccaagaaggccatcacggatgccgccatgatggcagaggagctgaagaaggagcaggacaccagcgcccacctggagcgcatgaagaagaacatggaacagaccattaaggacctgcagcaccggctggacgaagccgagcagatcgccctcaagggcggcaagaagcagctgcagaagctggaagcgcgggtgcgggagctggagaatgagctggaggccgagcagaagcgcaacgcagagtcggtgaagggcatgaggaagagcgagcggcgcatcaaggagctcacctaccagacggaggaggacaggaaaaacctgctgcggctgcaggacctggtagacaagctgcagctaaaggtcaaggcctacaagcgccaggccgaggaggcggaggagcaagccaacaccaacctgtccaagttccgcaaggtgcagcacgagctggatgaggcagaggagcgggcggacatcgccgagtcccaggtcaacaagctgcgggccaagagccgtgacattggcacgaagggcttgaatgaggagtagctttgccacatcttgatctgctcagccctggaggtgccagcaaagccccatgctggagcctgtgtaacagctccttgggaggaagcagaataaagcaattttccttgaagccga

SEQ ID NO: 362121 - DNA, 5947 bp, Homo sapiens
gggggtgggggtgccctgctgccccatatatacagcccctgagaccaggtctggctccacagctctgtcctgctctgtgtctttccctgctgctctcaggtcccctgcaggccttggcccctttcctcatctgtagacacacttgagtagcccaggcacagccatgggagattcggagatggcagtctttggggctgccgccccctacctgcgcaagtcagagaaggagcggctagaagcgcagaccaggccttttgacctcaagaaggatgtcttcgtgcctgatgacaaacaggagtttgtcaaggccaagatcgtgtctcgagagggtggcaaagtcactgccgagactgagtatggcaagacagtgaccgtgaaggaggaccaggtgatgcagcagaacccacccaagttcgacaaaatcgaggacatggccatgctgaccttcctgcatgagcccgcggtgctctacaacctcaaggatcgctacggctcctggatgatctacacctactcgggcctcttctgtgtcaccgtcaacccttacaagtggctgccggtgtacactcctgaggtggtggctgcctaccggggcaagaagaggagcgaggccccgccccacatcttctccatctccgacaacgcctatcagtacatgctgacagacagagaaaaccagtccatcctgatcaccggagaatccggagcagggaagacagtcaacaccaagagggtcatccagtactttgctgttattgcagccattggggaccgcagcaagaaggaccagagcccgggcaagggcaccctggaggaccagatcatccaggccaaccctgctctggaggcctttggcaatgccaagaccgtccggaacgacaactcctcccgcttcgggaaattcattcgaattcattttggggcaacaggaaagttggcatctgcagacatagagacctatcttctggaaaaatccagagttattttccagctgaaagcagagagagattatcacattttctaccaaatcctgtctaacaaaaagcctgagctgctggacatgctgctgatcaccaacaacccctacgattatgcattcatctcccaaggagagaccaccgtggcctccattgatgacgctgaggagctcatggccactgataacgcttttgatgtgctgggcttcacttcagaggagaaaaactccatgtataagctgacaggcgccatcatgcactttggaaacatgaagttcaagctgaagcagcgggaggagcaggcggagccagacggcactgaagaggctgacaagtctgcctacctcatggggctgaactcagccgacctgctcaaggggctgtgccaccctcgggtgaaagtgggcaatgagtacgtcaccaaggggcagaatgtccagcaggtgatatatgccactggggcactggccaaggcagtgtatgagaggatgttcaactggatggtgacgcgcatcaatgccaccctggagaccaagcagccacgccagtacttcataggagtcctggacatcgctggcttcgagatcttcgatttcaacagctttgagcagctctgcatcaacttcaccaacgagaagctgcagcagttcttcaaccaccacatgtttgtgctggagcaggaggagtacaagaaggagggcatcgagtggacattcattgactttggcatggacctgcaggcctgcattgacctcatcgagaagcccatgggcatcatgtccatcctggaagaggagtgcatgttccccaaggccaccgacatgaccttcaaggccaagctgtttgacaaccacctgggcaaatccgccaacttccagaagccacgcaatatcaaggggaagcctgaagcccacttctccctgatccactatgccggcatcgtggactacaacatcattggctggctgcagaagaacaaggatcctctcaatgagactgtcgtgggcttgtatcagaagtcttccctcaagctgctcagcaccctgtttgccaactatgctggggctgatgcgcctattgagaagggcaaaggcaaggccaagaaaggctcgtcctttcagactgtgtcagctctgcacagggaaaatctgaacaagctgatgaccaacttgcgctccacccatccccactttgtacgttgtatcatccctaatgagacaaagtctccaggggtgatggacaaccccctggtcatgcaccagctgcgctgcaatggtgtgctggagggcatccgcatctgcaggaaaggcttccccaaccgcatcctctacggggacttccggcagaggtatcgcatcctgaacccagcggccatccctgagggacagttcattgatagcaggaagggggcagagaagctgctcagctccctggacattgatcacaaccagtacaagtttggcacaccaaggtgttcttcaaggccgggctgctggggctgctggaggaaatgagggacgagaggctgagccgcatcatcacgcgtatccaggcccagtcccgaggtgtgctcgccagaatggagtacaaaaagctgctggaacgtagagactccctgctggtaatccagtggaacattcgggccttcatgggggtcaagaattggccctggatgaagctctacttcaagatcaagccgctgctgaagagtgcagaaagagagaaggagatggcctccatgaaggaggagttcacacgcctcaaagaggcgctagagaagtccgaggctcgccgcaaggagctggaggagaagatggtgtccctgctgcaggagaagaatgacctgcagctccaagtgcaggcggaacaagacaacctggcagatgctgaggagcgctgtgatcagctgatcaaaaacaagattcagctggaggccaaggtgaaggagatgaacgagaggctggaggatgaggaggagatgaatgctgagctcactgccaagaagcgcaagctggaagatgagtgctcagagctcaaaagggacatcgatgatctggagctgacactggccaaagtggagaaggagaaacacgcaacagagaacaaggtgaaaaacctgacagaggagatggctgggctggatgagatcattgccaagctgaccaaggagaagaaagctctgcaagaggcccaccaacaggctctggatgaccttcaggccgaggaggacaaggtcaacaccctgactaaggccaaagtcaagctggagcagcaagtggatgatctggaaggatccctggagcaagagaagaaggtgcgcatggacctggagcgagcgaagcggaagctggagggcgacctgaagctgacccaggagagcatcatggacctggagaatgacaagcagcagctggatgagcggctgaaaaaaaaagactttgagctgaatgctctcaacgcaaggattgaggatgaacaggccctcggcagccagctgcagaagaagctcaaggagcttcaggcacgcatcgaggagctggaggaggagctggaggccgagcgcaccgccagggctaaggtggagaagctgcgctcagacctgtctcgggagctggaggagatcagcgagcggctggaagaggccggcggggccacgtccgtgcagatcgagatgaacaagaagcgcgaggccgagttccagaagatgcggcgggacctggaggaggccacgctgcagcacgaggccactgccgcggccctgcgcaagaagcacgccgacagcgtggccgagctgggcgagcagatcgacaacctgcagcgggtgaagcagaagctggagaaggagaagagcgagttcaagctggagctggatgacgtcacctccaacatggagcagatcatcaaggccaaggctaacctggagaagatgtgccggaccttggaagaccagatgaatgagcaccggagcaaggcggaggagacccagcgttctgtcaacgacctcaccagccagcgggccaagttgcaaaccgagaatggtgagctgtcccggcagctggatgagaaggaggcactgatctcccagctgacccgaggcaagctcacctacacccagcagctggaggacctcaagaggcagctggaggaggaggttaaggcgaagaacgccctggcccacgcactgcagtcggcccggcatgactgcgacctgctgcgggagcagtacgaggaggagacggaggccaaggccgagctgcagcgcgtcctttccaaggccaactcggaggtggcccagtggaggaccaagtatgagacggacgccattcagcggactgaggagctcgaggaggccaagaagaagctggcccagcggctgcaggaagctgaggaggccgtggaggctgttaatgccaagtgctcctcgctggagaagaccaagcaccggctacagaatgagatcgaggacttgatggtggacgtagagcgctccaatgctgctgctgcagccctggacaagaagcagaggaacttcgacaagatcctggccgagtggaagcagaagtatgaggagtcgcagtcggagctggagtcctcgcagaaggaggctcgctccctcagcacagagctcttcaaactcaagaacgcctatgaggagtccctggaacatctggagaccttcaagcgggagaacaaaaacctgcaggaggagatctccgacttgactgagcagttgggttccagcggaaagactatccatgagctggagaaggtccgaaagcagctggaggccgagaagatggagctgcagtcagccctggaggaggccgaggcctccctggagcacgaggagggcaagatcctccgggcccagctggagttcaaccagatcaaggcagagatcgagcggaagctggcagagaaggacgaggagatggaacaggccaagcgcaaccacctgcgggtggtggactcgctgcagacctccctggacgcagagacacgacacccagattcagctggacgatgcagtccgtgccaacgacgacctgaaggagaacatcgccatcgtggagcggcgcaacaacctgctgcaggctgagctggaggagttgcgtgccgtggtggagcagacagagcggtcccggaagctggcggagcaggagctgattgagactagtgagcgggtgcagctgctgcattcccagaacaccagcctcatcaaccagaagaagaagatggatgctgacctgtcccagctccagactgaagtggaggaggcagtgcaggagtgcaggaatgctgaggagaaggccaagaaggccatcacggatgccgccatgatggcagaggagctgaagaaggagcaggacaccagcgcccacctggagcgcatgaagaagaacatggaacagaccattaaggacctgcagcaccggctggacgaagccgagcagatcgccctcaagggcggcaagaagcagctgcagaagctggaagcgcgggtgcgggagctggagaatgagctggaggccgagcagaagcgcaacgcagagtcggtgaagggcatgaggaagagcgagcggcgcatcaaggagctcacctaccagacggaggaggacaggaaaaacctgctgcggctgcaggacctggtagacaagctgcagctaaaggtcaaggcctacaagcgccaggccgaggaggcggaggagcaagccaacaccaacctgtccaagttccgcaaggtgcagcacgagctggatgaggcagaggagcgggcggacatcgccgagtcccaggtcaacaagctgcgggccaagagccgtgacattggcacgaagggcttgaatgaggagtagctttgccacatcttgatctgctcagccctggaggtgccagcaaagccccatgctggagcctgtgtaacagctccttgggaggaagcagaataaagcaattttccttgaagccga

SEQ ID NO: 362122 - DNA, 1596 bp, Homo sapiens
tgaagagtgagccttgtccccgggcagatcctggccgagtggaagcagaagtatgaggagtcgcagtcggagctggagtcctcgcagaaggaggctcgctccctcagcacagagctcttcaaactcaagaacgcctatgaggagtccctggaacatctggagaccttcaagcgggagaacaaaaacctgcaggaggagatctccgacttgactgagcagttgggttccagcggaaagactatccatgagctggagaaggtccgaaagcagctggaggccgagaagatggagctgcagtcagccctggaggaggccgaggcctccctggagcacgaggagggcaagatcctccgggcccagctggagttcaaccagatcaaggcagagatcgagcggaagctggcagagaaggacgaggagatggaacaggccaagcgcaaccacctgcgggtggtggactcgctgcagacctccctggacgcagagacacgcagccgcaacgaggccctgagggtgaagaagaagatggaaggagacctcaatgagatggagatccagctcagccacgccaaccgcatggccgccgaggcccagaagcaagtcaagagcctccagagcttgttgaaggacacccagattcagctggacgatgcagtccgtgccaacgacgacctgaaggagaacatcgccatcgtggagcggcgcaacaacctgctgcaggctgagctggaggagttgcgtgccgtggtggagcagacagagcggtcccggaagctggcggagcaggagctgattgagactagtgagcgggtgcagctgctgcattcccagaacaccagcctcatcaaccagaagaagaagatggatgctgacctgtcccagctccagactgaagtggaggaggcagtgcaggagtgcaggaatgctgaggagaaggccaagaaggccatcacggatgccgccatgatggcagaggagctgaagaaggagcaggacaccagcgcccacctggagcgcatgaagaagaacatggaacagaccattaaggacctgcagcaccggctggacgaagccgagcagatcgccctcaagggcggcaagaagcagctgcagaagctggaagcgcgggtgcgggagctggagaatgagctggaggccgagcagaagcgcaacgcagagtcggtgaagggcatgaggaagagcgagcggcgcatcaaggagctcacctaccagacggaggaggacaggaaaaacctgctgcggctgcaggacctggtagacaagctgcagctaaaggtcaaggcctacaagcgccaggccgaggaggcggaggagcaagccaacaccaacctgtccaagttccgcaaggtgcagcacgagctggatgaggcagaggagcgggcggacatcgccgagtcccaggtcaacaagctgcgggccaagagccgtgacattggcacgaagggcttgaatgaggagtagctttgccacatcttgatctgctcagccctggaggtgccagcaaagccccatgctggagcctgtgtaacagctccttgggaggaagcagaataaagcaattttccttgaagccga

SEQ ID NO: 362123 - DNA, 4770 bp, Homo sapiens
gggggtgggggtgccctgctgccccatatatacagcccctgagaccaggtctggctccacagctctgtcctgctctgtgtctttccctgctgctctcaggtcccctgcaggccttggcccctttcctcatctgtagacacacttgagtagcccaggcacagccatgggagattcggagatggcagtctttggggctgccgccccctacctgcgcaagtcagagaaggagcggctagaagcgcagaccaggccttttgacctcaagaaggatgtcttcgtgcctgatgacaaacaggagtttgtcaaggccaagatcgtgtctcgagagggtggcaaagtcactgccgagactgagtatggcaagacagtgaccgtgaaggaggaccaggtgatgcagcagaacccacccaagttcgacaaaatcgaggacatggccatgctgaccttcctgcatgagcccgcggtgctctacaacctcaaggatcgctacggctcctggatgatctacacctactcgggcctcttctgtgtcaccgtcaacccttacaagtggctgccggtgtacactcctgaggtggtggctgcctaccggggcaagaagaggagcgaggccccgccccacatcttctccatctccgacaacgcctatcagtacatgctgacagacagagaaaaccagtccatcctgatcaccggagaatccggagcagggaagacagtcaacaccaagagggtcatccagtactttgctgttattgcagccattggggaccgcagcaagaaggaccagagcccgggcaagggcaccctggaggaccagatcatccaggccaaccctgctctggaggcctttggcaatgccaagaccgtccggaacgacaactcctcccgcttcgggaaattcattcgaattcattttggggcaacaggaaagttggcatctgcagacatagagacctatcttctggaaaaatccagagttattttccagctgaaagcagagagagattatcacattttctaccaaatcctgtctaacaaaaagcctgagctgctggacatgctgctgatcaccaacaacccctacgattatgcattcatctcccaaggagagaccaccgtggcctccattgatgacgctgaggagctcatggccactgataacgcttttgatgtgctgggcttcacttcagaggagaaaaactccatgtataagctgacaggcgccatcatgcactttggaaacatgaagttcaagctgaagcagcgggaggagcaggcggagccagacggcactgaagaggctgacaagtctgcctacctcatggggctgaactcagccgacctgctcaaggggctgtgccaccctcgggtgaaagtgggcaatgagtacgtcaccaaggggcagaatgtccagcaggtgatatatgccactggggcactggccaaggcagtgtatgagaggatgttcaactggatggtgacgcgcatcaatgccaccctggagaccaagcagccacgccagtacttcataggagtcctggacatcgctggcttcgagatcttcgatttcaacagctttgagcagctctgcatcaacttcaccaacgagaagctgcagcagttcttcaaccaccacatgtttgtgctggagcaggaggagtacaagaaggagggcatcgagtggacattcattgactttggcatggacctgcaggcctgcattgacctcatcgagaagcccatgggcatcatgtccatcctggaagaggagtgcatgttccccaaggccaccgacatgaccttcaaggccaagctgtttgacaaccacctgggcaaatccgccaacttccagaagccacgcaatatcaaggggaagcctgaagcccacttctccctgatccactatgccggcatcgtggactacaacatcattggctggctgcagaagaacaaggatcctctcaatgagactgtcgtgggcttgtatcagaagtcttccctcaagctgctcagcaccctgtttgccaactatgctggggctgatgcgcctattgagaagggcaaaggcaaggccaagaaaggctcgtcctttcagactgtgtcagctctgcacagggaaaatctgaacaagctgatgaccaacttgcgctccacccatccccactttgtacgttgtatcatccctaatgagacaaagtctccaggggtgatggacaaccccctggtcatgcaccagctgcgctgcaatggtgtgctggagggcatccgcatctgcaggaaaggcttccccaaccgcatcctctacggggacttccggcagaggtatcgcatcctgaacccagcggccatccctgagggacagttcattgatagcaggaagggggcagagaagctgctcagctccctggacattgatcacaaccagtacaagtttggcacaccaaggtgttcttcaaggccgggctgctggggctgctggaggaaatgagggacgagaggctgagccgcatcatcacgcgtatccaggcccagtcccgaggtgtgctcgccagaatggagtacaaaaagctgctggaacgtagagactccctgctggtaatccagtggaacattcgggccttcatgggggtcaagaattggccctggatgaagctctacttcaagatcaagccgctgctgaagagtgcagaaagagagaaggagatggcctccatgaaggaggagttcacacgcctcaaagaggcgctagagaagtccgaggctcgccgcaaggagctggaggagaagatggtgtccctgctgcaggagaagaatgacctgcagctccaagtgcaggcggaacaagacaacctggcagatgctgaggagcgctgtgatcagctgatcaaaaacaagattcagctggaggccaaggtgaaggagatgaacgagaggctggaggatgaggaggagatgaatgctgagctcactgccaagaagcgcaagctggaagatgagtgctcagagctcaaaagggacatcgatgatctggagctgacactggccaaagtggagaaggagaaacacgcaacagagaacaaggtgaaaaacctgacagaggagatggctgggctggatgagatcattgccaagctgaccaaggagaagaaagctctgcaagaggcccaccaacaggctctggatgaccttcaggccgaggaggacaaggtcaacaccctgactaaggccaaagtcaagctggagcagcaagtggatgatctggaaggatccctggagcaagagaagaaggtgcgcatggacctggagcgagcgaagcggaagctggagggcgacctgaagctgacccaggagagcatcatggacctggagaatgacaagcagcagctggatgagcggctgaaaaaaaaagactttgagctgaatgctctcaacgcaaggattgaggatgaacaggccctcggcagccagctgcagaagaagctcaaggagcttcaggcacgcatcgaggagctggaggaggagctggaggccgagcgcaccgccagggctaaggtggagaagctgcgctcagacctgtctcgggagctggaggagatcagcgagcggctggaagaggccggcggggccacgtccgtgcagacctccctggacgcagagacacgcagccgcaacgaggccctgagggtgaagaagaagatggaaggagacctcaatgagatggagatccagctcagccacgccaaccgcatggccgccgaggcccagaagcaagtcaagagcctccagagcttgttgaaggacacccagattcagctggacgatgcagtccgtgccaacgacgacctgaaggagaacatcgccatcgtggagcggcgcaacaacctgctgcaggctgagctggaggagttgcgtgccgtggtggagcagacagagcggtcccggaagctggcggagcaggagctgattgagactagtgagcgggtgcagctgctgcattcccagaacaccagcctcatcaaccagaagaagaagatggatgctgacctgtcccagctccagactgaagtggaggaggcagtgcaggagtgcaggaatgctgaggagaaggccaagaaggccatcacggatgccgccatgatggcagaggagctgaagaaggagcaggacaccagcgcccacctggagcgcatgaagaagaacatggaacagaccattaaggacctgcagcaccggctggacgaagccgagcagatcgccctcaagggcggcaagaagcagctgcagaagctggaagcgcgggtgcgggagctggagaatgagctggaggccgagcagaagcgcaacgcagagtcggtgaagggcatgaggaagagcgagcggcgcatcaaggagctcacctaccagacggaggaggacaggaaaaacctgctgcggctgcaggacctggtagacaagctgcagctaaaggtcaaggcctacaagcgccaggccgaggaggcggaggagcaagccaacaccaacctgtccaagttccgcaaggtgcagcacgagctggatgaggcagaggagcgggcggacatcgccgagtcccaggtcaacaagctgcgggccaagagccgtgacattggcacgaagggcttgaatgaggagtagctttgccacatcttgatctgctcagccctggaggtgccagcaaagccccatgctggagcctgtgtaacagctccttgggaggaagcagaataaagcaattttccttgaagccga

SEQ ID NO: 362124 - DNA, 4410 bp, Homo sapiens
gggggtgggggtgccctgctgccccatatatacagcccctgagaccaggtctggctccacagctctgtcctgctctgtgtctttccctgctgctctcaggtcccctgcaggccttggcccctttcctcatctgtagacacacttgagtagcccaggcacagccatgggagattcggagatggcagtctttggggctgccgccccctacctgcgcaagtcagagaaggagcggctagaagcgcagaccaggccttttgacctcaagaaggatgtcttcgtgcctgatgacaaacaggagtttgtcaaggccaagatcgtgtctcgagagggtggcaaagtcactgccgagactgagtatggcaagacagtgaccgtgaaggaggaccaggtgatgcagcagaacccacccaagttcgacaaaatcgaggacatggccatgctgaccttcctgcatgagcccgcggtgctctacaacctcaaggatcgctacggctcctggatgatctacacctactcgggcctcttctgtgtcaccgtcaacccttacaagtggctgccggtgtacactcctgaggtggtggctgcctaccggggcaagaagaggagcgaggccccgccccacatcttctccatctccgacaacgcctatcagtacatgctgacagacagagaaaaccagtccatcctgatcaccggagaatccggagcagggaagacagtcaacaccaagagggtcatccagtactttgctgttattgcagccattggggaccgcagcaagaaggaccagagcccgggcaagggcaccctggaggaccagatcatccaggccaaccctgctctggaggcctttggcaatgccaagaccgtccggaacgacaactcctcccgcttcgggaaattcattcgaattcattttggggcaacaggaaagttggcatctgcagacatagagacctatcttctggaaaaatccagagttattttccagctgaaagcagagagagattatcacattttctaccaaatcctgtctaacaaaaagcctgagctgctggacatgctgctgatcaccaacaacccctacgattatgcattcatctcccaaggagagaccaccgtggcctccattgatgacgctgaggagctcatggccactgataacgcttttgatgtgctgggcttcacttcagaggagaaaaactccatgtataagctgacaggcgccatcatgcactttggaaacatgaagttcaagctgaagcagcgggaggagcaggcggagccagacggcactgaagaggctgacaagtctgcctacctcatggggctgaactcagccgacctgctcaaggggctgtgccaccctcgggtgaaagtgggcaatgagtacgtcaccaaggggcagaatgtccagcaggtgatatatgccactggggcactggccaaggcagtgtatgagaggatgttcaactggatggtgacgcgcatcaatgccaccctggagaccaagcagccacgccagtacttcataggagtcctggacatcgctggcttcgagatcttcgatttcaacagctttgagcagctctgcatcaacttcaccaacgagaagctgcagcagttcttcaaccaccacatgtttgtgctggagcaggaggagtacaagaaggagggcatcgagtggacattcattgactttggcatggacctgcaggcctgcattgacctcatcgagaagcccatgggcatcatgtccatcctggaagaggagtgcatgttccccaaggccaccgacatgaccttcaaggccaagctgtttgacaaccacctgggcaaatccgccaacttccagaagccacgcaatatcaaggggaagcctgaagcccacttctccctgatccactatgccggcatcgtggactacaacatcattggctggctgcagaagaacaaggatcctctcaatgagactgtcgtgggcttgtatcagaagtcttccctcaagctgctcagcaccctgtttgccaactatgctggggctgatgcgcctattgagaagggcaaaggcaaggccaagaaaggctcgtcctttcagactgtgtcagctctgcacagggaaaatctgaacaagctgatgaccaacttgcgctccacccatccccactttgtacgttgtatcatccctaatgagacaaagtctccaggggtgatggacaaccccctggtcatgcaccagctgcgctgcaatggtgtgctggagggcatccgcatctgcaggaaaggcttccccaaccgcatcctctacggggacttccggcagaggtatcgcatcctgaacccagcggccatccctgagggacagttcattgatagcaggaagggggcagagaagctgctcagctccctggacattgatcacaaccagtacaagtttggcacaccaaggtgttcttcaaggccgggctgctggggctgctggaggaaatgagggacgagaggctgagccgcatcatcacgcgtatccaggcccagtcccgaggtgtgctcgccagaatggagtacaaaaagctgctggaacgtagagactccctgctggtaatccagtggaacattcgggccttcatgggggtcaagaattggccctggatgaagctctacttcaagatcaagccgctgctgaagagtgcagaaagagagaaggagatggcctccatgaaggaggagttcacacgcctcaaagaggcgctagagaagtccgaggctcgccgcaaggagctggaggagaagatggtgtccctgctgcaggagaagaatgacctgcagctccaagtgcaggcggaacaagacaacctggcagatgctgaggagcgctgtgatcagctgatcaaaaacaagattcagctggaggccaaggtgaaggagatgaacgagaggctggaggatgaggaggagatgaatgctgagctcactgccaagaagcgcaagctggaagatgagtgctcagagctcaaaagggacatcgatgatctggagctgacactggccaaagtggagaaggagaaacacgcaacagagaacaaggtgaaaaacctgacagaggagatggctgggctggatgagatcattgccaagctgaccaaggagaagaaagctctgcaagaggcccaccaacaggctctggatgaccttcaggccgaggaggacaaggtcaacaccctgactaaggccaaagtcaagctggagcagcaagtggatgatctggaaggatccctggagcaagagaagaaggtgcgcatggacctggagcgagcgaagcggaagctggagggcgacctgaagctgacccaggagagcatcatggacctggagaatgacaagcagcagctggatgagcggctgaaaaaaaaagactttgagctgaatgctctcaacgcaaggattgaggatgaacaggccctcggcagccagctgcagaagaagctcaaggagcttcaggcacgcatcgaggagctggaggaggagctggaggccgagcgcaccgccagggctaaggtggagaagctgcgctcagacctgtctcgggagctggcggagcaggagctgattgagactagtgagcgggtgcagctgctgcattcccagaacaccagcctcatcaaccagaagaagaagatggatgctgacctgtcccagctccagactgaagtggaggaggcagtgcaggagtgcaggaatgctgaggagaaggccaagaaggccatcacggatgccgccatgatggcagaggagctgaagaaggagcaggacaccagcgcccacctggagcgcatgaagaagaacatggaacagaccattaaggacctgcagcaccggctggacgaagccgagcagatcgccctcaagggcggcaagaagcagctgcagaagctggaagcgcgggtgcgggagctggagaatgagctggaggccgagcagaagcgcaacgcagagtcggtgaagggcatgaggaagagcgagcggcgcatcaaggagctcacctaccagacggaggaggacaggaaaaacctgctgcggctgcaggacctggtagacaagctgcagctaaaggtcaaggcctacaagcgccaggccgaggaggcggaggagcaagccaacaccaacctgtccaagttccgcaaggtgcagcacgagctggatgaggcagaggagcgggcggacatcgccgagtcccaggtcaacaagctgcgggccaagagccgtgacattggcacgaagggcttgaatgaggagtagctttgccacatcttgatctgctcagccctggaggtgccagcaaagccccatgctggagcctgtgtaacagctccttgggaggaagcagaataaagcaattttccttgaagccga

SEQ ID NO: 362125 - DNA, 3971 bp, Homo sapiens
gggggtgggggtgccctgctgccccatatatacagcccctgagaccaggtctggctccacagctctgtcctgctctgtgtctttccctgctgctctcaggtcccctgcaggccttggcccctttcctcatctgtagacacacttgagtagcccaggcacagccatgggagattcggagatggcagtctttggggctgccgccccctacctgcgcaagtcagagaaggagcggctagaagcgcagaccaggccttttgacctcaagaaggatgtcttcgtgcctgatgacaaacaggagtttgtcaaggccaagatcgtgtctcgagagggtggcaaagtcactgccgagactgagtatggcaagacagtgaccgtgaaggaggaccaggtgatgcagcagaacccacccaagttcgacaaaatcgaggacatggccatgctgaccttcctgcatgagcccgcggtgctctacaacctcaaggatcgctacggctcctggatgatctacacctactcgggcctcttctgtgtcaccgtcaacccttacaagtggctgccggtgtacactcctgaggtggtggctgcctaccggggcaagaagaggagcgaggccccgccccacatcttctccatctccgacaacgcctatcagtacatgctgacagacagagaaaaccagtccatcctgatcaccggagaatccggagcagggaagacagtcaacaccaagagggtcatccagtactttgctgttattgcagccattggggaccgcagcaagaaggaccagagcccgggcaagggcaccctggaggaccagatcatccaggccaaccctgctctggaggcctttggcaatgccaagaccgtccggaacgacaactcctcccgcttcgggaaattcattcgaattcattttggggcaacaggaaagttggcatctgcagacatagagacctatcttctggaaaaatccagagttattttccagctgaaagcagagagagattatcacattttctaccaaatcctgtctaacaaaaagcctgagctgctggacatgctgctgatcaccaacaacccctacgattatgcattcatctcccaaggagagaccaccgtggcctccattgatgacgctgaggagctcatggccactgataacgcttttgatgtgctgggcttcacttcagaggagaaaaactccatgtataagctgacaggcgccatcatgcactttggaaacatgaagttcaagctgaagcagcgggaggagcaggcggagccagacggcactgaagaggctgacaagtctgcctacctcatggggctgaactcagccgacctgctcaaggggctgtgccaccctcgggtgaaagtgggcaatgagtacgtcaccaaggggcagaatgtccagcaggtgatatatgccactggggcactggccaaggcagtgtatgagaggatgttcaactggatggtgacgcgcatcaatgccaccctggagaccaagcagccacgccagtacttcataggagtcctggacatcgctggcttcgagatcttcgatttcaacagctttgagcagctctgcatcaacttcaccaacgagaagctgcagcagttcttcaaccaccacatgtttgtgctggagcaggaggagtacaagaaggagggcatcgagtggacattcattgactttggcatggacctgcaggcctgcattgacctcatcgagaagcccatgggcatcatgtccatcctggaagaggagtgcatgttccccaaggccaccgacatgaccttcaaggccaagctgtttgacaaccacctgggcaaatccgccaacttccagaagccacgcaatatcaaggggaagcctgaagcccacttctccctgatccactatgccggcatcgtggactacaacatcattggctggctgcagaagaacaaggatcctctcaatgagactgtcgtgggcttgtatcagaagtcttccctcaagctgctcagcaccctgtttgccaactatgctggggctgatgcgcctattgagaagggcaaaggcaaggccaagaaaggctcgtcctttcagactgtgtcagctctgcacagggaaaatctgaacaagctgatgaccaacttgcgctccacccatccccactttgtacgttgtatcatccctaatgagacaaagtctccaggggtgatggacaaccccctggtcatgcaccagctgcgctgcaatggtgtgctggagggcatccgcatctgcaggaaaggcttccccaaccgcatcctctacggggacttccggcagaggtatcgcatcctgaacccagcggccatccctgagggacagttcattgatagcaggaagggggcagagaagctgctcagctccctggacattgatcacaaccagtacaagtttggcacaccaaggtgttcttcaaggccgggctgctggggctgctggaggaaatgagggacgagaggctgagccgcatcatcacgcgtatccaggcccagtcccgaggtgtgctcgccagaatggagtacaaaaagctgctggaacgtagagactccctgctggtaatccagtggaacattcgggccttcatgggggtcaagaattggccctggatgaagctctacttcaagatcaagccgctgctgaagagtgcagaaagagagaaggagatggcctccatgaaggaggagttcacacgcctcaaagaggcgctagagaagtccgaggctcgccgcaaggagctggaggagaagatggtgtccctgctgcaggagaagaatgacctgcagctccaagtgcaggcggaacaagacaacctggcagatgctgaggagcgctgtgatcagctgatcaaaaacaagattcagctggaggccaaggtgaaggagatgaacgagaggctggaggatgaggaggagatgaatgctgagctcactgccaagaagcgcaagctggaagatgagtgctcagagctcaaaagggacatcgatgatctggagctgacactggccaaagtggagaaggagaaacacgcaacagagaacaaggtgaaaaacctgacagaggagatggctgggctggatgagatcattgccaagctgaccaaggagaagaaagctctgcaagaggcccaccaacaggctctggatgaccttcaggccgaggaggacaaggtcaacaccctgactaaggccaaagtcaagctggagcagcaagtggatgatctggaaggatccctggagcaagagaagaaggtgcgcatggacctggagcgagcgaagcggaagctggagggcgacctgaagctgacccaggagagcatcatggacctggagaatgacaagcagcagctggatgagcggctgaaaaaaaaagactttgagctgaatgctctcaacgcaaggattgaggatgaacaggccctcggcagccagctgcagaagaagctcaaggagcttcagcgcgggtgcgggagctggagaatgagctggaggccgagcagaagcgcaacgcagagtcggtgaagggcatgaggaagagcgagcggcgcatcaaggagctcacctaccagacggaggaggacaggaaaaacctgctgcggctgcaggacctggtagacaagctgcagctaaaggtcaaggcctacaagcgccaggccgaggaggcggaggagcaagccaacaccaacctgtccaagttccgcaaggtgcagcacgagctggatgaggcagaggagcgggcggacatcgccgagtcccaggtcaacaagctgcgggccaagagccgtgacattggcacgaagggcttgaatgaggagtagctttgccacatcttgatctgctcagccctggaggtgccagcaaagccccatgctggagcctgtgtaacagctccttgggaggaagcagaataaagcaattttccttgaagccga

SEQ ID NO: 362126 - DNA, 6160 bp, Homo sapiens
gggggtgggggtgccctgctgccccatatatacagcccctgagaccaggtctggctccacagctctgtcctgctctgtgtctttccctgctgctctcaggtcccctgcaggccttggcccctttcctcatctgtagacacacttgagtagcccaggcacagccatgggagattcggagatggcagtctttggggctgccgccccctacctgcgcaagtcagagaaggagcggctagaagcgcagaccaggccttttgacctcaagaaggatgtcttcgtgcctgatgacaaacaggagtttgtcaaggccaagatcgtgtctcgagagggtggcaaagtcactgccgagactgagtatggcaagacagtgaccgtgaaggaggaccaggtgatgcagcagaacccacccaagttcgacaaaatcgaggacatggccatgctgaccttcctgcatgagcccgcggtgctctacaacctcaaggatcgctacggctcctggatgatctacacctactcgggcctcttctgtgtcaccgtcaacccttacaagtggctgccggtgtacactcctgaggtggtggctgcctaccggggcaagaagaggagcgaggccccgccccacatcttctccatctccgacaacgcctatcagtacatgctgacagacagagaaaaccagtccatcctgatcaccggagaatccggagcagggaagacagtcaacaccaagagggtcatccagtactttgctgttattgcagccattggggaccgcagcaagaaggaccagagcccgggcaagggcaccctggaggaccagatcatccaggccaaccctgctctggaggcctttggcaatgccaagaccgtccggaacgacaactcctcccgcttcgggaaattcattcgaattcattttggggcaacaggaaagttggcatctgcagacatagagacctatcttctggaaaaatccagagttattttccagctgaaagcagagagagattatcacattttctaccaaatcctgtctaacaaaaagcctgagctgctggacatgctgctgatcaccaacaacccctacgattatgcattcatctcccaaggagagaccaccgtggcctccattgatgacgctgaggagctcatggccactgataacgcttttgatgtgctgggcttcacttcagaggagaaaaactccatgtataagctgacaggcgccatcatgcactttggaaacatgaagttcaagctgaagcagcgggaggagcaggcggagccagacggcactgaagaggctgacaagtctgcctacctcatggggctgaactcagccgacctgctcaaggggctgtgccaccctcgggtgaaagtgggcaatgagtacgtcaccaaggggcagaatgtccagcaggtgatatatgccactggggcactggccaaggcagtgtatgagaggatgttcaactggatggtgacgcgcatcaatgccaccctggagaccaagcagccacgccagtacttcataggagtcctggacatcgctggcttcgagatcttcgatttcaacagctttgagcagctctgcatcaacttcaccaacgagaagctgcagcagttcttcaaccaccacatgtttgtgctggagcaggaggagtacaagaaggagggcatcgagtggacattcattgactttggcatggacctgcaggcctgcattgacctcatcgagaagcccatgggcatcatgtccatcctggaagaggagtgcatgttccccaaggccaccgacatgaccttcaaggccaagctgtttgacaaccacctgggcaaatccgccaacttccagaagccacgcaatatcaaggggaagcctgaagcccacttctccctgatccactatgccggcatcgtggactacaacatcattggctggctgcagaagaacaaggatcctctcaatgagactgtcgtgggcttgtatcagaagtcttccctcaagctgctcagcaccctgtttgccaactatgctggggctgatgcgcctattgagaagggcaaaggcaaggccaagaaaggctcgtcctttcagactgtgtcagctctgcacagggaaaatctgaacaagctgatgaccaacttgcgctccacccatccccactttgtacgttgtatcatccctaatgagacaaagtctccaggggtgatggacaaccccctggtcatgcaccagctgcgctgcaatggtgtgctggagggcatccgcatctgcaggaaaggcttccccaaccgcatcctctacggggacttccggcagaggtatcgcatcctgaacccagcggccatccctgagggacagttcattgatagcaggaagggggcagagaagctgctcagctccctggacattgatcacaaccagtacaagtttggcacaccaaggtgttcttcaaggccgggctgctggggctgctggaggaaatgagggacgagaggctgagccgcatcatcacgcgtatccaggcccagtcccgaggtgtgctcgccagaatggagtacaaaaagctgctggaacgtagagactccctgctggtaatccagtggaacattcgggccttcatgggggtcaagaattggccctggatgaagctctacttcaagatcaagccgctgctgaagagtgcagaaagagagaaggagatggcctccatgaaggaggagttcacacgcctcaaagaggcgctagagaagtccgaggctcgccgcaaggagctggaggagaagatggtgtccctgctgcaggagaagaatgacctgcagctccaagtgcaggcggaacaagacaacctggcagatgctgaggagcgctgtgatcagctgatcaaaaacaagattcagctggaggccaaggtgaaggagatgaacgagaggctggaggatgaggaggagatgaatgctgagctcactgccaagaagcgcaagctggaagatgagtgctcagagctcaaaagggacatcgatgatctggagctgacactggccaaagtggagaaggagaaacacgcaacagagaacaaggtgaaaaacctgacagaggagatggctgggctggatgagatcattgccaagctgaccaaggagaagaaagctctgcaagaggcccaccaacaggctctggatgaccttcaggccgaggaggacaaggtcaacaccctgactaaggccaaagtcaagctggagcagcaagtggatgatctggaaggatccctggagcaagagaagaaggtgcgcatggacctggagcgagcgaagcggaagctggagggcgacctgaagctgacccaggagagcatcatggacctggagaatgacaagcagcagctggatgagcggctgaaaaaaaaagactttgagctgaatgctctcaacgcaaggattgaggatgaacaggccctcggcagccagctgcagaagaagctcaaggagcttcaggcacgcatcgaggagctggaggaggagctggaggccgagcgcaccgccagggctaaggtggagaagctgcgctcagacctgtctcgggagctggaggagatcagcgagcggctggaagaggccggcggggccacgtccgtgcagatcgagatgaacaagaagcgcgaggccgagttccagaagatgcggcgggacctggaggaggccacgctgcagcacgaggccactgccgcggccctgcgcaagaagcacgccgacagcgtggccgagctgggcgagcagatcgacaacctgcagcgggtgaagcagaagctggagaaggagaagagcgagttcaagctggagctggatgacgtcacctccaacatggagcagatcatcaaggccaaggctaacctggagaagatgtgccggaccttggaagaccagatgaatgagcaccggagcaaggcggaggagacccagcgttctgtcaacgacctcaccagccagcgggccaagttgcaaaccgagaatggtgagctgtcccggcagctggatgagaaggaggcactgatctcccagctgacccgaggcaagctcacctacacccagcagctggaggacctcaagaggcagctggaggaggaggttaaggcgaagaacgccctggcccacgcactgcagtcggcccggcatgactgcgacctgctgcgggagcagtacgaggaggagacggaggccaaggccgagctgcagcgcgtcctttccaaggccaactcggaggtggcccagtggaggaccaagtatgagacggacgccattcagcggactgaggagctcgaggaggccaagaagaagctggcccagcggctgcaggaagctgaggaggccgtggaggctgttaatgccaagtgctcctcgctggagaagaccaagcaccggctacagaatgagatcgaggacttgatggtggacgtagagcgctccaatgctgctgctgcagccctggacaagaagcagaggaacttcgacaagatcctggccgagtggaagcagaagtatgaggagtcgcagtcggagctggagtcctcgcagaaggaggctcgctccctcagcacagagctcttcaaactcaagaacgcctatgaggagtccctggaacatctggagaccttcaagcgggagaacaaaaacctgcaggaggagatctccgacttgactgagcagttgggttccagcggaaagactatccatgagctggagaaggtccgaaagcagctggaggccgagaagatggagctgcagtcagccctggaggaggccgaggcctccctggagcacgaggagggcaagatcctccgggcccagctggagttcaaccagatcaaggcagagatcgagcggaagctggcagagaaggacgaggagatggaacaggccaagcgcaaccacctgcgggtggtggactcgctgcagacctccctggacgcagagacacgcagccgcaacgaggccctgagggtgaagaagaagatggaaggagacctcaatgagatggagatccagctcagccacgccaaccgcatggccgccgaggcccagaagcaagtcaagagcctccagagcttgttgaaggacacccagattcagctggacgatgcagtccgtgccaacgacgacctgaaggagaacatcgccatcgtggagcggcgcaacaacctgctgcaggctgagctggaggagttgcgtgccgtggtggagcagacagagcggtcccggaagctggcggagcaggagctgattgagactagtgagcgggtgcagctgctgcattcccagaacaccagcctcatcaaccagaagaagaagatggatgctgacctgtcccagctccagactgaagtggaggaggcagtgcaggagtgcaggaatgctgaggagaaggccaagaaggccatcacggatgccgccatgatggcagaggagctgaagaaggagcaggacaccagcgcccacctggagcgcatgaagaagaacatggaacagaccattaaggacctgcagcaccggctggacgaagccgagcagatcgccctcaagggcggcaagaagcagctgcagaagctggaagcgcgggtgcgggagctggagaatgagctggaggccgagcagaagcgcaacgcagagtcggtgaagggcatgaggaagagcgagcggcgcatcaaggagctcacctaccagacggaggaggacaggaaaaacctgctgcggctgcaggacctggtagacaagctgcagctaaaggtcaaggcctacaagcgccaggccgaggaggcggaggagcaagccaacaccaacctgtccaagttccgcaaggtgcagcacgagctggatgaggcagaggagcgggcggacatcgccgagtcccaggtcaacaagctgcgggccaagagccgtgacattggcacgaagagatgcggtttcaccatgttggccaggctggtcttgaactcctgaccttgtgatccactcgcctcagcctcccaaaggcttgaatgaggagtagctttgccacatcttgatctgctcagccctggaggtgccagcaaagccccatgctggagcctgtgtaacagctccttgggaggaagcagaataaagcaattttccttgaagccga

SEQ ID NO: 362127 - DNA, 5413 bp, Homo sapiens
gggggtgggggtgccctgctgccccatatatacagcccctgagaccaggtctggctccacagctctgtcctgctctgtgtctttccctgctgctctcaggtcccctgcaggccttggcccctttcctcatctgtagacacacttgagtagcccaggcacagccatgggagattcggagatggcagtctttggggctgccgccccctacctgcgcaagtcagagaaggagcggctagaagcgcagaccaggccttttgacctcaagaaggatgtcttcgtgcctgatgacaaacaggagtttgtcaaggccaagatcgtgtctcgagagggtggcaaagtcactgccgagactgagtatggcaagacagtgaccgtgaaggaggaccaggtgatgcagcagaacccacccaagttcgacaaaatcgaggacatggccatgctgaccttcctgcatgagcccgcggtgctctacaacctcaaggatcgctacggctcctggatgatctacacctactcgggcctcttctgtgtcaccgtcaacccttacaagtggctgccggtgtacactcctgaggtggtggctgcctaccggggcaagaagaggagcgaggccccgccccacatcttctccatctccgacaacgcctatcagtacatgctgacagacagagaaaaccagtccatcctgatcaccggagaatccggagcagggaagacagtcaacaccaagagggtcatccagtactttgctgttattgcagccattggggaccgcagcaagaaggaccagagcccgggcaagggcaccctggaggaccagatcatccaggccaaccctgctctggaggcctttggcaatgccaagaccgtccggaacgacaactcctcccgcttcgggaaattcattcgaattcattttggggcaacaggaaagttggcatctgcagacatagagacctatcttctggaaaaatccagagttattttccagctgaaagcagagagagattatcacattttctaccaaatcctgtctaacaaaaagcctgagctgctggacatgctgctgatcaccaacaacccctacgattatgcattcatctcccaaggagagaccaccgtggcctccattgatgacgctgaggagctcatggccactgataacgcttttgatgtgctgggcttcacttcagaggagaaaaactccatgtataagctgacaggcgccatcatgcactttggaaacatgaagttcaagctgaagcagcgggaggagcaggcggagccagacggcactgaagaggctgacaagtctgcctacctcatggggctgaactcagccgacctgctcaaggggctgtgccaccctcgggtgaaagtgggcaatgagtacgtcaccaaggggcagaatgtccagcaggtgatatatgccactggggcactggccaaggcagtgtatgagaggatgttcaactggatggtgacgcgcatcaatgccaccctggagaccaagcagccacgccagtacttcataggagtcctggacatcgctggcttcgagatcttcgatttcaacagctttgagcagctctgcatcaacttcaccaacgagaagctgcagcagttcttcaaccaccacatgtttgtgctggagcaggaggagtacaagaaggagggcatcgagtggacattcattgactttggcatggacctgcaggcctgcattgacctcatcgagaagcccatgggcatcatgtccatcctggaagaggagtgcatgttccccaaggccaccgacatgaccttcaaggccaagctgtttgacaaccacctgggcaaatccgccaacttccagaagccacgcaatatcaaggggaagcctgaagcccacttctccctgatccactatgccggcatcgtggactacaacatcattggctggctgcagaagaacaaggatcctctcaatgagactgtcgtgggcttgtatcagaagtcttccctcaagctgctcagcaccctgtttgccaactatgctggggctgatgcgcctattgagaagggcaaaggcaaggccaagaaaggctcgtcctttcagactgtgtcagctctgcacagggaaaatctgaacaagctgatgaccaacttgcgctccacccatccccactttgtacgttgtatcatccctaatgagacaaagtctccaggggtgatggacaaccccctggtcatgcaccagctgcgctgcaatggtgtgctggagggcatccgcatctgcaggaaaggcttccccaaccgcatcctctacggggacttccggcagaggtatcgcatcctgaacccagcggccatccctgagggacagttcattgatagcaggaagggggcagagaagctgctcagctccctggacattgatcacaaccagtacaagtttggcacaccaaggtgttcttcaaggccgggctgctggggctgctggaggaaatgagggacgagaggctgagccgcatcatcacgcgtatccaggcccagtcccgaggtgtgctcgccagaatggagtacaaaaagctgctggaacgtagagactccctgctggtaatccagtggaacattcgggccttcatgggggtcaagaattggccctggatgaagctctacttcaagatcaagccgctgctgaagagtgcagaaagagagaaggagatggcctccatgaaggaggagttcacacgcctcaaagaggcgctagagaagtccgaggctcgccgcaaggagctggaggagaagatggtgtccctgctgcaggagaagaatgacctgcagctccaagtgcaggcggaacaagacaacctggcagatgctgaggagcgctgtgatcagctgatcaaaaacaagattcagctggaggccaaggtgaaggagatgaacgagaggctggaggatgaggaggagatgaatgctgagctcactgccaagaagcgcaagctggaagatgagtgctcagagctcaaaagggacatcgatgatctggagctgacactggccaaagtggagaaggagaaacacgcaacagagaacaaggtgaaaaacctgacagaggagatggctgggctggatgagatcattgccaagctgaccaaggagaagaaagctctgcaagaggcccaccaacaggctctggatgaccttcaggccgaggaggacaaggtcaacaccctgactaaggccaaagtcaagctggagcagcaagtggatgatctggaaggatccctggagcaagagaagaaggtgcgcatggacctggagcgagcgaagcggaagctggagggcgacctgaagctgacccaggagagcatcatggacctggagaatgacaagcagcagctggatgagcggctgaaaaaaaaagactttgagctgaatgctctcaacgcaaggattgaggatgaacaggccctcggcagccagctgcagaagaagctcaaggagcttcaggcacgcatcgaggagctggaggaggagctggaggccgagcgcaccgccagggctaaggtggagaagctgcgctcagacctgtctcgggagctggaggagatcagcgagcggctggaagaggccggcggggccacgtccgtgcagatcgagatgaacaagaagcgcgaggccgagttccagaagatgcggcgggacctggaggaggccacgctgcagcacgaggccactgccgcggccctgcgcaagaagcacgccgacagcgtggccgagctgggcgagcagatcgacaacctgcagcgggtgaagcagaagctggagaaggagaagagcgagttcaagctggagctggatgacgtcacctccaacatggagcagatcatcaaggccaaggctaacctggagaagatgtgccggaccttggaagaccagatgaatgagcaccggagcaaggcggaggagacccagcgttctgtcaacgacctcaccagccagcgggccaagttgcaaaccgagaatggtgagctgtcccggcagctggatgagaaggaggcactgatctcccagctgacccgaggcaagctcacctacacccagcagctggaggacctcaagaggcagctggaggaggaggttaaggcgaagaacgccctggcccacgcactgcagtcggcccggcatgactgcgacctgctgcgggagcagtacgaggaggagacggaggccaaggccgagctgcagcgcgtcctttccaaggccaactcggaggtggcccagtggaggaccaagtatgagacggacgccattcagcggactgaggagctcgaggaggccaagaagaagctggcccagcggctgcaggaagctgaggaggccgtggaggctgttaatgccaagtgctcctcgctggagaagaccaagcaccggctacagaatgagatcgaggacttgatggtggacgtagagcgctccaatgctgctgctgcagccctggacaagaagcagaggaacttcgacaagatcctggccgagtggaagcagaagtatgaggagtcgcagtcggagctggagtcctcgcagaaggaggctcgctccctcagcacagagctcttcaaactcaagaacgcctatgaggagtccctggaacatctggagaccttcaagcgggagaacaaaaacctgcaggaggagatctccgacttgactgagcagttgggttccagcggaaagactatccatgagctggagaaggtccgaaagcagctggaggccgagaagatggagctgcagtcagccctggaggaggccgaggcctccctggagcacgaggagggcaagatcctccgggcccagctggagttcaaccagatcaaggcagagatcgagcggaagctggcagagaaggacgaggagatggaacaggccaagcgcaaccacctgcgggtggtggactcgctgcagacctccctggacgcagagacacgcagccgcaacgaggccctgagggtgaagaagaagatggaaggagacctcaatgagatggagatccagctcagccacgccaaccgcatggccgccgaggcccagaagcaagtcaagagcctccagagcttgttgaaggacacccagattcagctggacgatgcagtccgtgccaacgacgacctgaaggagaacatcgccatcgtggagcggcgcaacaacctgctgcaggctgagctggaggagttgcgtgccgtggtggagcagacagagcggtcccggaagctggcggagcaggagctgattgagactagtgagcgggtgcagctgctgcattcccagaacaccagcctcatcaaccagaagaagaagatggagtcggatctgacccagctccagtcggaagtggaggaggcagtgcaggagtgcagaaacg

SEQ ID NO: 362128 - DNA, 1945 bp, Homo sapiens
gggggtgggggtgccctgctgccccatatatacagcccctgagaccaggtctggctccacagctctgtcctgctctgtgtctttccctgctgctctcaggtcccctgcaggccttggcccctttcctcatctgtagacacacttgagtagcccaggcacagccatgggagattcggagatggcagtctttggggctgccgccccctacctgcgcaagtcagagaaggagcggctagaagcgcagaccaggccttttgacctcaagaaggatgtcttcgtgcctgatgacaaacaggagtttgtcaaggccaagatcgtgtctcgagagggtggcaaagtcactgccgagactgagtatggcaagacagtgaccgtgaaggaggaccaggtgatgcagcagaacccacccaagttcgacaaaatcgaggacatggccatgctgaccttcctgcatgagcccgcggtgctctacaacctcaaggatcgctacggctcctggatgatctacacctactcgggcctcttctgtgtcaccgtcaacccttacaagtggctgccggtgtacactcctgaggtggtggctgcctaccggggcaagaagaggagcgaggccccgccccacatcttctccatctccgacaacgcctatcagtacatgctgacagacagagaaaaccagtccatcctgatcaccggagaatccggagcagggaagacagtcaacaccaagagggtcatccagtactttgctgttattgcagccattggggaccgcagcaagaaggaccagagcccgggcaagggcaccctggaggaccagatcatccaggccaaccctgctctggaggcctttggcaatgccaagaccgtccggaacgacaactcctcccgcttcgggaaattcattcgaattcattttggggcaacaggaaagttggcatctgcagacatagagacctatcttctggaaaaatccagagttattttccagctgaaagcagagagagattatcacattttctaccaaatcctgtctaacaaaaagcctgagctgctggacatgctgctgatcaccaacaacccctacgattatgcattcatctcccaaggagagaccaccgtggcctccattgatgacgctgaggagctcatggccactgataacgcttttgatgtgctgggcttcacttcagaggagaaaaactccatgtataagctgacaggcgccatcatgcactttggaaacatgaagttcaagctgaagcagcgggaggagcaggcggagccagacggcactgaagaggctgacaagtctgcctacctcatggggctgaactcagccgacctgctcaaggggctgtgccaccctcgggtgaaagtgggcaatgagtacgtcaccaaggggcagaatgtccagcaggtgatatatgccactggggcactggccaaggcagtgtatgagaggatgttcaactggatggtgacgcgcatcaatgccaccctggagaccaagcagccacgccagtacttcataggagtcctggacatcgctggcttcgagatcttcgatttcaacagctttgagcagctctgcatcaacttcaccaacgagaagctgcagcagttcttcaaccaccacatgtttgtgctggagcaggaggagtacaagaaggagggcgaggagcaagccaacaccaacctgtccaagttccgcaaggtgcagcacgagctggatgaggcagaggagcgggcggacatcgccgagtcccaggtcaacaagctgcgggccaagagccgtgacattggcacgaagggcttgaatgaggagtagctttgccacatcttgatctgctcagccctggaggtgccagcaaagccccatgctggagcctgtgtaacagctccttgggaggaagcagaataaagcaattttccttgaagccga

SEQ ID NO: 362129 - DNA, 3275 bp, Homo sapiens
gggggtgggggtgccctgctgccccatatatacagcccctgagaccaggtctggctccacagctctgtcctgctctgtgtctttccctgctgctctcaggtcccctgcaggccttggcccctttcctcatctgtagacacacttgagtagcccaggcacagccatgggagattcggagatggcagtctttggggctgccgccccctacctgcgcaagtcagagaaggagcggctagaagcgcagaccaggccttttgacctcaagaaggatgtcttcgtgcctgatgacaaacaggagtttgtcaaggccaagatcgtgtctcgagagggtggcaaagtcactgccgagactgagtatggcaagacagtgaccgtgaaggaggaccaggtgatgcagcagaacccacccaagttcgacaaaatcgaggacatggccatgctgaccttcctgcatgagcccgcggtgctctacaacctcaaggatcgctacggctcctggatgatctacacctactcgggcctcttctgtgtcaccgtcaacccttacaagtggctgccggtgtacactcctgaggtggtggctgcctaccggggcaagaagaggagcgaggccccgccccacatcttctccatctccgacaacgcctatcagtacatgctgacagacagagaaaaccagtccatcctgatcaccggagaatccggagcagggaagacagtcaacaccaagagggtcatccagtactttgctgttattgcagccattggggaccgcagcaagaaggaccagagcccgggcaagggcaccctggaggaccagatcatccaggccaaccctgctctggaggcctttggcaatgccaagaccgtccggaacgacaactcctcccgcttcgggaaattcattcgaattcattttggggcaacaggaaagttggcatctgcagacatagagacctatcttctggaaaaatccagagttattttccagctgaaagcagagagagattatcacattttctaccaaatcctgtctaacaaaaagcctgagctgctggacatgctgctgatcaccaacaacccctacgattatgcattcatctcccaaggagagaccaccgtggcctccattgatgacgctgaggagctcatggccactgataacgcttttgatgtgctgggcttcacttcagaggagaaaaactccatgtataagctgacaggcgccatcatgcactttggaaacatgaagttcaagctgaagcagcgggaggagcaggcggagccagacggcactgaagaggctgacaagtctgcctacctcatggggctgaactcagccgacctgctcaaggggctgtgccaccctcgggtgaaagtgggcaatgagtacgtcaccaaggggcagaatgtccagcaggtgatatatgccactggggcactggccaaggcagtgtatgagaggatgttcaactggatggtgacgcgcatcaatgccaccctggagaccaagcagccacgccagtacttcataggagtcctggacatcgctggcttcgagatcttcgatttcaacagctttgagcagctctgcatcaacttcaccaacgagaagctgcagcagttcttcaaccaccacatgtttgtgctggagcaggaggagtacaagaaggagggcatcgagtggacattcattgactttggcatggacctgcaggcctgcattgacctcatcgagaagcccatgggcatcatgtccatcctggaagaggagtgcatgttccccaaggccaccgacatgaccttcaaggccaagctgtttgacaaccacctgggcaaatccgccaacttccagaagccacgcaatatcaaggggaagcctgaagcccacttctccctgatccactatgccggcatcgtggactacaacatcattggctggctgcagaagaacaaggatcctctcaatgagactgtcgtgggcttgtatcagaagtcttccctcaagctgctcagcaccctgtttgccaactatgctggggctgatgcgcctattgagaagggcaaaggcaaggccaagaaaggctcgtcctttcagactgtgtcagctctgcacagggaaaatctgaacaagctgatgaccaacttgcgctccacccatccccactttgtacgttgtatcatccctaatgagacaaagtctccaggggtgatggacaaccccctggtcatgcaccagctgcgctgcaatggtgtgctggagggcatccgcatctgcaggaaaggcttccccaaccgcatcctctacggggacttccggcagaggtatcgcatcctgaacccagcggccatccctgagggacagttcattgatagcaggaagggggcagagaagctgctcagctccctggacattgatcacaaccagtacaagtttggcacaccaaggtgttcttcaaggccgggctgctggggctgctggaggaaatgagggacgagaggctgagccgcatcatcacgcgtatccaggcccagtcccgaggtgtgctcgccagaatggagtacaaaaagctgctggaacgtagagactccctgctggtaatccagtggaacattcgggccttcatgggggtcaagaattggccctggatgaagctctacttcaagatcaagccgctgctgaagagtgcagaaagagagaaggagatggcctccatgaaggaggagttcacacgcctcaaagaggcgctagagaagtccgaggctcgccgcaaggagctggaggagaagatggtgtccctgctgcaggagaagaatgacctgcagctccaagtgcaggcggaacaagacaacctggcagatgctgaggagcgctgtgatcagctgatcaaaaacaagattcagctggaggccaaggtgaaggagatgaacgagaggctggaggatgaggaggagatgaatgctgagctcactgccaagaagcgcaagctggaagatgagtgctcagagctcaaaagggacatcgatgatctggagctgacactggccaaagtggagaaggagaaacacgcaacagagaacaaggtgaaaaacctgacagaggagatggctgggctggatgagatcattgccaagctgaccaaggagaagaaagctctgcaagaggcccaccaacaggctctggatgaccttcaggccgaggagaagatggtgtcctcctgcaggagaggattgacctcagctccaagtccaggccctcaggtgggaagaaggat

SEQ ID NO: 362130 - DNA, 1334 bp, Homo sapiens
agagcgagcaggggagagcgagaccagttttaaggggaggaccggtgcgagtgaggcagccccgaggctctgctcgcccaccacccaatcctcgcctcccttctgctccaccttctctctctgccctcacctctcccccgaaaaccccctatttagccaaaggaaggaggtcaggggaacgctctcccctccccttccaaaaaacaaaaacagaaaaacccttttccaggccggggaaagcaggagggagaggggccgccgggctggccatggagctgctgtgccacgaggtggacccggtccgcagggccgtgcgggaccgcaacctgctccgagacgaccgcgtcctgcagaacctgctcaccatcgaggagcgctaccttccgcagtgctcctacttcaagtgcgtgcagaaggacatccaaccctacatgcgcagaatggtggccacctggatgctggaggtctgtgaggaacagaagtgcgaagaagaggtcttccctctggccatgaattacctggaccgtttcttggctggggtcccgactccgaagtcccatctgcaactcctgggtgctgtctgcatgttcctggcctccaaactcaaagagaccagcccgctgaccgcggagaagctgtgcatttacaccgacaactccatcaagcctcaggagctgctggagtgggaactggtggtgctggggaagttgaagtggaacctggcagctgtcactcctcatgacttcattgagcacatcttgcgcaagctgccccagcagcgggagaagctgtctctgatccgcaagcatgctcagaccttcattgctctgtgtgccaccgactttaagtttgccatgtacccaccgtcgatgatcgcaactggaagtgtgggagcagccatctgtgggctccagcaggatgaggaagtgagctcgctcacttgtgatgccctgactgagctgctggctaagatcaccaacacagacgtggattgtctcaaagcttgccaggagcagattgaggcggtgctcctcaatagcctgcagcagtaccgtcaggaccaacgtgacggatccaagtcggaggatgaactggaccaagccagcacccctacagacgtgcgggatatcgacctgtgaggatgccagttgggccgaaagagagagacgcgtccataatctggtctcttcttctttctggttgtttttgttctttgtgttttagggtgaaacttaaaaaaaaaattctgcccccacctagatcatatttaaagatcttttagaagtgagagaaaaaggtcctacgaaaacggaataataaaaagcatttggtgc

SEQ ID NO: 362131 - DNA, 6665 bp, Homo sapiens
tattatttgatctagaaattgccctccttttacccctaccatgagccctacaaacaactaacctgccactaatagttatgtcatccctcttattaatcatcatcctagccctaagtctggcctatgagtgactacaaaaaggattagactgagccgaataaaaaaaaaaaaaaaaaaaaaaaaaaaaaaaaaaaaaaaaaaaaaggggaggaccggtgcgagtgaggcagccccgaggctctgctcgcccaccacccaatcctcgcctcccttctgctccaccttctctctctgccctcacctctcccccgaaaaccccctatttagccaaaggaaggaggtcaggggaacgctctcccctccccttccaaaaaacaaaaacagaaaaacccttttccaggccggggaaagcaggagggagaggggccgccgggctggccatggagctgctgtgccacgaggtggacccggtccgcagggccgtgcgggaccgcaacctgctccgagacgaccgcgtcctgcagaacctgctcaccatcgaggagcgctaccttccgcagtgctcctacttcaagtgcgtgcagaaggacatccaaccctacatgcgcagaatggtggccacctggatgctggaggtctgtgaggaacagaagtgcgaagaagaggtcttccctctggccatgaattacctggaccgtttcttggctggggtcccgactccgaagtcccatctgcaactcctgggtgctgtctgcatgttcctggcctccaaactcaaagagaccagcccgctgaccgcggagaagctgtgcatttacaccgacaactccatcaagcctcaggagctgctggagtgggaactggtggtgctggggaagttgaagtggaacctggcagctgtcactcctcatgacttcattgagcacatcttgcgcaagctgccccagcagcgggagaagctgtctctgatccgcaagcatgctcagaccttcattgctctgtgtgccaccgactttaagtttgccatgtacccaccgtcgatgatcgcaactggaagtgtgggagcagccatctgtgggctccagcaggatgaggaagtgagctcgctcacttgtgatgccctgactgagctgctggctaagatcaccaacacagacgtggattgtctcaaagcttgccaggagcagattgaggcggtgctcctcaatagcctgcagcagtaccgtcaggaccaacgtgacggatccaagtcggaggatgaactggaccaagccagcacccctacagacgtgcgggatatcgacctgtgaggatgccagttgggccgaaagagagagacgcgtccataatctggtctcttcttctttctggttgtttttgttctttgtgttttagggtgaaacttaaaaaaaaaattctgcccccacctagatcatatttaaagatcttttagaagtgagagaaaaaggtcctacgaaaacggaataataaaaagcatttggtgcctatttgaagtacagcataagggaatcccttgtatatgcgaacagttattgtttgattatgtaaaagtaatagtaaaatgcttacaggaaaacctgcagagtagttagagaatatgtatgcctgcaatatgggaacaaattagaggagacttttttttttcatgttatgagctagcacatacacccccttgtagtataatttcaaggaactgtgtacgccatttatggcatgattagattgcaaagcaatgaactcaagaaggaattgaaataaggagggacatgatggggaaggagtacaaaacaatctctcaacatgattgaaccatttgggatggagaagcacctttgctctcagccacctgttactaagtcaggagtgtagttggatctctacattaatgtcctcttgctgtctacagtagctgctacctaaaaaaagatgttttattttgccagttggacacaggtgattggctcctgggtttcatgttctgtgacatcctgcttcttcttccaaatgcagttcattgcagacaccaccatattgctatctaatggggaaatgtagctatgggccataaccaaaactcacatgaaacggaggcagatggagaccaagggtgggatccagaatggagtcttttctgttattgtatttaaaagggtaatgtggccttggcatttcttcttagaaaaaaactaatttttggtgctgattggcatgtctggttcacagtttagcattgttataaaccattccattcgaaaagcactttgaaaaattgttcccgagcgatagatgggatggtttatgcaagtcatgctgaatactcctcccctcttctcttttgccccctcccttcctgcccccagtctgggttactcttcgcttctggtatctggcgttctttggtacacagttctggtgttcctaccaggactcaagagacaccccttcctgctgacattcccatcacaacattcctcagacaagcctgtaaactaaaatctgttaccattctgatggcacagaaggatcttaattcccatctctatacttctcctttggacatggaaagaaaagttattgctggtgcaaagatagatggctgaacatcagggtgtggcattttgttcccttttccgtttttttttttttattgttgttgttaattttattgcaaagttgtattcagcgtacttgaatttttcttcctctccacttcttagaggcattcagttagcaaagaggttggagcaacaacttttttttttttttttgcacaattgtaattgacaggtaatgaagctatttgttaaaatatttgcctttttaagtaaaaaagaaaaatcagaacagggctatttgaagaattattttatacacagattctgccttgtttcatagtatgagggttgaagacggaaaacaatctaagggtctctcatttttttaattttgttttgttcagtttggtttttttttttttttgcgctgctaagaagctaaagtcatccatccttattcacgttgacagtacctagctgtaatgtttcacagagtgtgctgctattttataaacatttttataatatattattttactgcttaaattccaagtcctgaagtagatggttgagatatgagttcttcgtactggaaaagcccttccgtagtttgttttcttctggtagcatattcatggttgtttttttttttcttttttggttttttggttttttttttttcctctgatcacattcttcaaagacggagtattctttacctcaggtttactggacaaaatcaataactacaaaaggcaatgattcacgcttttgttttcataatacctcacaaccgtacagtttctgcttgggagcccattcgcatgaggaatacagaagcagtgtgagcagggctgactccctctcaggtggaaggcagggcggtctcactcccagggacctttttggtcatggaggccatcgggctcccagttagaccctggtatcctcatcatgatggaaaaaatacattgaaccaagggatcctccctccccttcaaggcagacgttcagtacaaacatttatgcggtaggctcagatgtcgtaatttgcacttaggtaccaggtgtcaggaaacagactaaaaagaattccaccaggctgtttggagatcctcatcttggagctttttcaaaagcggggcttcatctgcaaagggccctttcatcttgaagtttttcccctccgtctttcccctcccctggcatggacaccttgtgtttaggatcatctctgcaggtttcctaggtctgaatctgcgagtagatgaacctgcagcaagcagcgtttatggtgcttccttctccctcctctgtctcaaactgcgcaggcaagcactatgcaagcccaggccctctgctaagcggtactaaacggtcgggttttcaatcacactgaattggcaggataagaaaaataggtcagataagtatgggatgatagttgaagggaggtgaagaggctgcttctctacagaggtgaaattccagatgagtcagtctcttgggaagtgtgtttagaagggttcaggactttgtgagttagcatgaccctaaaattctaggggatttctggtgggacaatgggtggtgaattctgaagttttggagagggaagtggagcagccagcaagtaagctagccagagttttctcaagagccagctttgctcagcacactctcctgggccccaaggagtcccacggaatggggaaagcgggaaccctggagttcttgggaatcttggagcctaaagagaaaccgaggtgcaaattcatttcatggtgactgacccttgagcttaaacagaagcagcaaatgaaagaaccggacaaataaggaagggcacaagcctacccgactctatttacagtctgtaactttccactcttcctgtagtcccgaggcccctgggtccttctagcttttctctttcccatccttggggccttgtgtgatgatgggtgtggggctgccgatgggaaagtcgggggttgttaggcttttctgcctgctcctgcttaaacacaagaaggaatcctggattttgccctctccttagctcttagtctctttggtaggagttttgttccagaggagctctcccccttggatttgaacttgctctttttgttgttgttgttctttctcttctttttcttacctcccactaaaggggttccaaattatcctggtctttttctaccttgttgtgtttctatctcgtctttacttccatctgtttgtttttttctccatcagtgggggccgagttgttcccccagcctgccaaattttgatccttcccctcttttggccaaatcctagggggaagaaatcctagtatgccaaaaatatatgctaagcataattaaactccatgcgggtccataacagccaagaagcctgcaggagaaagccaagggcagttccctccgcagaacaccccatgcgtgctgagaggcgagctccttgaagaaggggctgttcttccaggaggccttattttgaactgcctcaggaccccactggagagcacagcatgccttactactgggtcatccttggtctatgtgctctgtactggaggctctgttctgcctcttatcagccaggtcaggggcacacatggcttaagtgacaaagccagaggagaagacaaccctgacagcatcacgctgcatcccattgctagcaggattggcaactcttcagacggagctgcgcttccctgcagtctagcacctctagggcctctccagactgtgccctgggagctctgggactgaaaggttaagaacataaggcaggatcagatgactctctccaagagggcaggggaattttctctccatgggccacaggggacagggctgggagaagaaatagacttgcaccttatgtcatgtaaataattgattttctagttcaagaagataatattggtagtgtgggaattggaggtaggaaggggaggaagtctgagtaagccagttggcttctaagccaaaaggattcctctttgtttatctctgagacagtccaaccttgagaatagctttaaaagggaaattaatgctgagatgataaagtccccttaagccaacaaaccctctgtagctatagaatgagtgcaggtttctattggtgtggactcagagcaatttacaagagctgttcatgcagccatccatttgtgcaaaatagggtaagaagattcaagaggatatttattacttcctcataccacatggcttttgatgattctggattctaaacaacccagaatggtcatttcaggcacaacgatactacattcgtgtgtgtctgcttttaaacttggctgggctatcagaccctattctcggctcaggttttgagaagccatcagcaaatgtgtacgtgcatgctgtagctgcagcctgcatcccttcgcctgcagcctactttggggaaataaagtgccttactgactgtagccattacagtatccaatgtcttttgacaggtgcctgtccttgaaaaacaaagtttctatttttatttttaattggtttagttcttaactgctggccaactcttacatccccagcaaatcatcgggccattggattttttccattatgttcatcacccttatatcatgtacctcagatctctctctctctcctctctctcagttatatagtttcttgtcttggactttttttttcttttctttttcttttttttttggctttaaaacaagtgtgatgccatatcaagtccatgttattctctcacagtgtactctataagaggtgtgggtgtctgtttggtcaggatgttagaaagtgctgataagtagcatgatcagtgtatgcgaaaaggtttttaggaagtatggcaaaaatgttgtattggctatgatggtgacatgatatagtcagctgccttttaagaggtcttatctgttcagtgttaagtgatttaaaaaaataataacctgttttctgactagtttaaagatggatttgaaaatggttttgaatgcaattaggttatgctatttggacaataaactcaccttgacctaaaaattatctggcc

SEQ ID NO: 362132 - DNA, 6422 bp, Homo sapiens
agagcgagcaggggagagcgagaccagttttaaggggaggaccggtgcgagtgaggcagccccgaggctctgctcgcccaccacccaatcctcgcctcccttctgctccaccttctctctctgccctcacctctcccccgaaaaccccctatttagccaaaggaaggaggtcaggggaacgctctcccctccccttccaaaaaacaaaaacagaaaaacccttttccaggccggggaaagcaggagggagaggggccgccgggctggccatggagctgctgtgccacgaggtggacccggtccgcagggccgtgcgggaccgcaacctgctccgagacgaccgcgtcctgcagaacctgctcaccatcgaggagcgctaccttccgcagtgctcctacttcaagtgcgtgcagaaggacatccaaccctacatgcgcagaatggtggccacctggatgctggaggtctgtgaggaacagaagtgcgaagaagaggtcttccctctggccatgaattacctggaccgtttcttggctggggtcccgactccgaagtcccatctgcaactcctgggtgctgtctgcatgttcctggcctccaaactcaaagagaccagcccgctgaccgcggagaagctgtgcatttacaccgacaactccatcaagcctcaggagctgctggagtgggaactggtggtgctggggaagttgaagtggaacctggcagctgtcactcctcatgacttcattgagcacatcttgcgcaagctgccccagcagcgggagaagctgtctctgatccgcaagcatgctcagaccttcattgctctgtgtgccaccgactttaagtttgccatgtacccaccgtcgatgatcgcaactggaagtgtgggagcagccatctgtgggctccagcaggatgaggaagtgagctcgctcacttgtgatgccctgactgagctgctggctaagatcaccaacacagacgtggattgtctcaaagcttgccaggagcagattgaggcggtgctcctcaatagcctgcagcagtaccgtcaggaccaacgtgacggatccaagtcggaggatgaactggaccaagccagcacccctacagacgtgcgggatatcgacctgtgaggatgccagttgggccgaaagagagagacgcgtccataatctggtctcttcttctttctggttgtttttgttctttgtgttttagggtgaaacttaaaaaaaaaattctgcccccacctagatcatatttaaagatcttttagaagtgagagaaaaaggtcctacgaaaacggaataataaaaagcatttggtgcctatttgaagtacagcataagggaatcccttgtatatgcgaacagttattgtttgattatgtaaaagtaatagtaaaatgcttacaggaaaacctgcagagtagttagagaatatgtatgcctgcaatatgggaacaaattagaggagacttttttttttcatgttatgagctagcacatacacccccttgtagtataatttcaaggaactgtgtacgccatttatggcatgattagattgcaaagcaatgaactcaagaaggaattgaaataaggagggacatgatggggaaggagtacaaaacaatctctcaacatgattgaaccatttgggatggagaagcacctttgctctcagccacctgttactaagtcaggagtgtagttggatctctacattaatgtcctcttgctgtctacagtagctgctacctaaaaaaagatgttttattttgccagttggacacaggtgattggctcctgggtttcatgttctgtgacatcctgcttcttcttccaaatgcagttcattgcagacaccaccatattgctatctaatggggaaatgtagctatgggccataaccaaaactcacatgaaacggaggcagatggagaccaagggtgggatccagaatggagtcttttctgttattgtatttaaaagggtaatgtggccttggcatttcttcttagaaaaaaactaatttttggtgctgattggcatgtctggttcacagtttatgcaagtcatgctgaatactcctcccctcttctcttttgccccctcccttcctgcccccagtctgggttactcttcgcttctggtatctggcgttctttggtacacagttctggtgttcctaccaggactcaagagacaccccttcctgctgacattcccatcacaacattcctcagacaagcctgtaaactaaaatctgttaccattctgatggcacagaaggatcttaattcccatctctatacttctcctttggacatggaaagaaaagttattgctggtgcaaagatagatggctgaacatcagggtgtggcattttgttcccttttccgtttttttttttttattgttgttgttaattttattgcaaagttgtattcagcgtacttgaatttttcttcctctccacttcttagaggcattcagttagcaaagaggttggagcaacaacttttttttttttttttgcacaattgtaattgacaggtaatgaagctatttgttaaaatatttgcctttttaagtaaaaaagaaaaatcagaacagggctatttgaagaattattttatacacagattctgccttgtttcatagtatgagggttgaagacggaaaacaatctaagggtctctcatttttttaattttgttttgttcagtttggtttttttttttttttgcgctgctaagaagctaaagtcatccatccttattcacgttgacagtacctagctgtaatgtttcacagagtgtgctgctattttataaacatttttataatatattattttactgcttaaattccaagtcctgaagtagatggttgagatatgagttcttcgtactggaaaagcccttccgtagtttgttttcttctggtagcatattcatggttgtttttttttttcttttttggttttttggttttttttttttcctctgatcacattcttcaaagacggagtattctttacctcaggtttactggacaaaatcaataactacaaaaggcaatgattcacgcttttgttttcataatacctcacaaccgtacagtttctgcttgggagcccattcgcatgaggaatacagaagcagtgtgagcagggctgactccctctcaggtggaaggcagggcggtctcactcccagggacctttttggtcatggaggccatcgggctcccagttagaccctggtatcctcatcatgatggaaaaaatacattgaaccaagggatcctccctccccttcaaggcagacgttcagtacaaacatttatgcggtaggctcagatgtcgtaatttgcacttaggtaccaggtgtcaggaaacagactaaaaagaattccaccaggctgtttggagatcctcatcttggagctttttcaaaagcggggcttcatctgcaaagggccctttcatcttgaagtttttcccctccgtctttcccctcccctggcatggacaccttgtgtttaggatcatctctgcaggtttcctaggtctgaatctgcgagtagatgaacctgcagcaagcagcgtttatggtgcttccttctccctcctctgtctcaaactgcgcaggcaagcactatgcaagcccaggccctctgctaagcggtactaaacggtcgggttttcaatcacactgaattggcaggataagaaaaataggtcagataagtatgggatgatagttgaagggaggtgaagaggctgcttctctacagaggtgaaattccagatgagtcagtctcttgggaagtgtgtttagaagggttcaggactttgtgagttagcatgaccctaaaattctaggggatttctggtgggacaatgggtggtgaattctgaagttttggagagggaagtggagcagccagcaagtaagctagccagagttttctcaagagccagctttgctcagcacactctcctgggccccaaggagtcccacggaatggggaaagcgggaaccctggagttcttgggaatcttggagcctaaagagaaaccgaggtgcaaattcatttcatggtgactgacccttgagcttaaacagaagcagcaaatgaaagaaccggacaaataaggaagggcacaagcctacccgactctatttacagtctgtaactttccactcttcctgtagtcccgaggcccctgggtccttctagcttttctctttcccatccttggggccttgtgtgatgatgggtgtggggctgccgatgggaaagtcgggggttgttaggcttttctgcctgctcctgcttaaacacaagaaggaatcctggattttgccctctccttagctcttagtctctttggtaggagttttgttccagaggagctctcccccttggatttgaacttgctctttttgttgttgttgttctttctcttctttttcttacctcccactaaaggggttccaaattatcctggtctttttctaccttgttgtgtttctatctcgtctttacttccatctgtttgtttttttctccatcagtgggggccgagttgttcccccagcctgccaaattttgatccttcccctcttttggccaaatcctagggggaagaaatcctagtatgccaaaaatatatgctaagcataattaaactccatgcgggtccataacagccaagaagcctgcaggagaaagccaagggcagttccctccgcagaacaccccatgcgtgctgagaggcgagctccttgaagaaggggctgttcttccaggaggccttattttgaactgcctcaggaccccactggagagcacagcatgccttactactgggtcatccttggtctatgtgctctgtactggaggctctgttctgcctcttatcagccaggtcaggggcacacatggcttaagtgacaaagccagaggagaagacaaccctgacagcatcacgctgcatcccattgctagcaggattggcaactcttcagacggagctgcgcttccctgcagtctagcacctctagggcctctccagactgtgccctgggagctctgggactgaaaggttaagaacataaggcaggatcagatgactctctccaagagggcaggggaattttctctccatgggccacaggggacagggctgggagaagaaatagacttgcaccttatgtcatgtaaataattgattttctagttcaagaagataatattggtagtgtgggaattggaggtaggaaggggaggaagtctgagtaagccagttggcttctaagccaaaaggattcctctttgtttatctctgagacagtccaaccttgagaatagctttaaaagggaaattaatgctgagatgataaagtccccttaagccaacaaaccctctgtagctatagaatgagtgcaggtttctattggtgtggactcagagcaatttacaagagctgttcatgcagccatccatttgtgcaaaatagggtaagaagattcaagaggatatttattacttcctcataccacatggcttttgatgattctggattctaaacaacccagaatggtcatttcaggcacaacgatactacattcgtgtgtgtctgcttttaaacttggctgggctatcagaccctattctcggctcaggttttgagaagccatcagcaaatgtgtacgtgcatgctgtagctgcagcctgcatcccttcgcctgcagcctactttggggaaataaagtgccttactgactgtagccattacagtatccaatgtcttttgacaggtgcctgtccttgaaaaacaaagtttctatttttatttttaattggtttagttcttaactgctggccaactcttacatccccagcaaatcatcgggccattggattttttccattatgttcatcacccttatatcatgtacctcagatctctctctctctcctctctctcagttatatagtttcttgtcttggactttttttttcttttctttttcttttttttttggctttaaaacaagtgtgatgccatatcaagtccatgttattctctcacagtgtactctataagaggtgtgggtgtctgtttggtcaggatgttagaaagtgctgataagtagcatgatcagtgtatgcgaaaaggtttttaggaagtatggcaaaaatgttgtattggctatgatggtgacatgatatagtcagctgccttttaagaggtcttatctgttcagtgttaagtgatttaaaaaaataataacctgttttctgactagtttaaagatggatttgaaaatggttttgaatgcaattaggttatgctatttggacaataaactcaccttgacctaaaaattatctggcc

SEQ ID NO: 362133 - DNA, 6013 bp, Homo sapiens
aaagtatttacagtttatgtgagggtcagtacgttggttcattggcttccttcttatctagttctcgggctgagtttgctaatgtcatagcacttctagtagccttccccttttctctgccacttcccagcttccccaggcagaaagcatctggtcggccccttgattaccaggcatccataagtgaccatcatttaggccagtgcttctcagaatgccaatcacctgggctccactaaaaggcaggttctgaatagctcggcctgggttgactgagattctgcggttccaacaagctcgcaggtgatgctgatgctgccagcccatggaccccacctggagtagtgaggttccttggcactttaagaacatccctcctttacttcacatttatttctactggaaactagcacagacttatgcaagctaaattacgcatgttttctccgtaggatgctctatgtcctgttcctcttactaacaactctggtctggaccattgttctaggattgtctcaaagcttgccaggagcagattgaggcggtgctcctcaatagcctgcagcagtaccgtcaggaccaacgtgacggatccaagtcggaggatgaactggaccaagccagcacccctacagacgtgcgggatatcgacctgtgaggatgccagttgggccgaaagagagagacgcgtccataatctggtctcttcttctttctggttgtttttgttctttgtgttttagggtgaaacttaaaaaaaaaattctgcccccacctagatcatatttaaagatcttttagaagtgagagaaaaaggtcctacgaaaacggaataataaaaagcatttggtgcctatttgaagtacagcataagggaatcccttgtatatgcgaacagttattgtttgattatgtaaaagtaatagtaaaatgcttacaggaaaacctgcagagtagttagagaatatgtatgcctgcaatatgggaacaaattagaggagacttttttttttcatgttatgagctagcacatacacccccttgtagtataatttcaaggaactgtgtacgccatttatggcatgattagattgcaaagcaatgaactcaagaaggaattgaaataaggagggacatgatggggaaggagtacaaaacaatctctcaacatgattgaaccatttgggatggagaagcacctttgctctcagccacctgttactaagtcaggagtgtagttggatctctacattaatgtcctcttgctgtctacagtagctgctacctaaaaaaagatgttttattttgccagttggacacaggtgattggctcctgggtttcatgttctgtgacatcctgcttcttcttccaaatgcagttcattgcagacaccaccatattgctatctaatggggaaatgtagctatgggccataaccaaaactcacatgaaacggaggcagatggagaccaagggtgggatccagaatggagtcttttctgttattgtatttaaaagggtaatgtggccttggcatttcttcttagaaaaaaactaatttttggtgctgattggcatgtctggttcacagtttagcattgttataaaccattccattcgaaaagcactttgaaaaattgttcccgagcgatagatgggatggtttatgcaagtcatgctgaatactcctcccctcttctcttttgccccctcccttcctgcccccagtctgggttactcttcgcttctggtatctggcgttctttggtacacagttctggtgttcctaccaggactcaagagacaccccttcctgctgacattcccatcacaacattcctcagacaagcctgtaaactaaaatctgttaccattctgatggcacagaaggatcttaattcccatctctatacttctcctttggacatggaaagaaaagttattgctggtgcaaagatagatggctgaacatcagggtgtggcattttgttcccttttccgtttttttttttttattgttgttgttaattttattgcaaagttgtattcagcgtacttgaatttttcttcctctccacttcttagaggcattcagttagcaaagaggttggagcaacaacttttttttttttttttgcacaattgtaattgacaggtaatgaagctatttgttaaaatatttgcctttttaagtaaaaaagaaaaatcagaacagggctatttgaagaattattttatacacagattctgccttgtttcatagtatgagggttgaagacggaaaacaatctaagggtctctcatttttttaattttgttttgttcagtttggtttttttttttttttgcgctgctaagaagctaaagtcatccatccttattcacgttgacagtacctagctgtaatgtttcacagagtgtgctgctattttataaacatttttataatatattattttactgcttaaattccaagtcctgaagtagatggttgagatatgagttcttcgtactggaaaagcccttccgtagtttgttttcttctggtagcatattcatggttgtttttttttttcttttttggttttttggttttttttttttcctctgatcacattcttcaaagacggagtattctttacctcaggtttactggacaaaatcaataactacaaaaggcaatgattcacgcttttgttttcataatacctcacaaccgtacagtttctgcttgggagcccattcgcatgaggaatacagaagcagtgtgagcagggctgactccctctcaggtggaaggcagggcggtctcactcccagggacctttttggtcatggaggccatcgggctcccagttagaccctggtatcctcatcatgatggaaaaaatacattgaaccaagggatcctccctccccttcaaggcagacgttcagtacaaacatttatgcggtaggctcagatgtcgtaatttgcacttaggtaccaggtgtcaggaaacagactaaaaagaattccaccaggctgtttggagatcctcatcttggagctttttcaaaagcggggcttcatctgcaaagggccctttcatcttgaagtttttcccctccgtctttcccctcccctggcatggacaccttgtgtttaggatcatctctgcaggtttcctaggtctgaatctgcgagtagatgaacctgcagcaagcagcgtttatggtgcttccttctccctcctctgtctcaaactgcgcaggcaagcactatgcaagcccaggccctctgctaagcggtactaaacggtcgggttttcaatcacactgaattggcaggataagaaaaataggtcagataagtatgggatgatagttgaagggaggtgaagaggctgcttctctacagaggtgaaattccagatgagtcagtctcttgggaagtgtgtttagaagggttcaggactttgtgagttagcatgaccctaaaattctaggggatttctggtgggacaatgggtggtgaattctgaagttttggagagggaagtggagcagccagcaagtaagctagccagagttttctcaagagccagctttgctcagcacactctcctgggccccaaggagtcccacggaatggggaaagcgggaaccctggagttcttgggaatcttggagcctaaagagaaaccgaggtgcaaattcatttcatggtgactgacccttgagcttaaacagaagcagcaaatgaaagaaccggacaaataaggaagggcacaagcctacccgactctatttacagtctgtaactttccactcttcctgtagtcccgaggcccctgggtccttctagcttttctctttcccatccttggggccttgtgtgatgatgggtgtggggctgccgatgggaaagtcgggggttgttaggcttttctgcctgctcctgcttaaacacaagaaggaatcctggattttgccctctccttagctcttagtctctttggtaggagttttgttccagaggagctctcccccttggatttgaacttgctctttttgttgttgttgttctttctcttctttttcttacctcccactaaaggggttccaaattatcctggtctttttctaccttgttgtgtttctatctcgtctttacttccatctgtttgtttttttctccatcagtgggggccgagttgttcccccagcctgccaaattttgatccttcccctcttttggccaaatcctagggggaagaaatcctagtatgccaaaaatatatgctaagcataattaaactccatgcgggtccataacagccaagaagcctgcaggagaaagccaagggcagttccctccgcagaacaccccatgcgtgctgagaggcgagctccttgaagaaggggctgttcttccaggaggccttattttgaactgcctcaggaccccactggagagcacagcatgccttactactgggtcatccttggtctatgtgctctgtactggaggctctgttctgcctcttatcagccaggtcaggggcacacatggcttaagtgacaaagccagaggagaagacaaccctgacagcatcacgctgcatcccattgctagcaggattggcaactcttcagacggagctgcgcttccctgcagtctagcacctctagggcctctccagactgtgccctgggagctctgggactgaaaggttaagaacataaggcaggatcagatgactctctccaagagggcaggggaattttctctccatgggccacaggggacagggctgggagaagaaatagacttgcaccttatgtcatgtaaataattgattttctagttcaagaagataatattggtagtgtgggaattggaggtaggaaggggaggaagtctgagtaagccagttggcttctaagccaaaaggattcctctttgtttatctctgagacagtccaaccttgagaatagctttaaaagggaaattaatgctgagatgataaagtccccttaagccaacaaaccctctgtagctatagaatgagtgcaggtttctattggtgtggactcagagcaatttacaagagctgttcatgcagccatccatttgtgcaaaatagggtaagaagattcaagaggatatttattacttcctcataccacatggcttttgatgattctggattctaaacaacccagaatggtcatttcaggcacaacgatactacattcgtgtgtgtctgcttttaaacttggctgggctatcagaccctattctcggctcaggttttgagaagccatcagcaaatgtgtacgtgcatgctgtagctgcagcctgcatcccttcgcctgcagcctactttggggaaataaagtgccttactgactgtagccattacagtatccaatgtcttttgacaggtgcctgtccttgaaaaacaaagtttctatttttatttttaattggtttagttcttaactgctggccaactcttacatccccagcaaatcatcgggccattggattttttccattatgttcatcacccttatatcatgtacctcagatctctctctctctcctctctctcagttatatagtttcttgtcttggactttttttttcttttctttttcttttttttttggctttaaaacaagtgtgatgccatatcaagtccatgttattctctcacagtgtactctataagaggtgtgggtgtctgtttggtcaggatgttagaaagtgctgataagtagcatgatcagtgtatgcgaaaaggtttttaggaagtatggcaaaaatgttgtattggctatgatggtgacatgatatagtcagctgccttttaagaggtcttatctgttcagtgttaagtgatttaaaaaaataataacctgttttctgactagtttaaagatggatttgaaaatggttttgaatgcaattaggttatgctatttggacaataaactcaccttgacctaaaaattatctggcc

SEQ ID NO: 362134 - DNA, 5937 bp, Homo sapiens
agagcgagcaggggagagcgagaccagttttaaggggaggaccggtgcgagtgaggcagccccgaggctctgctcgcccaccacccaatcctcgcctcccttctgctccaccttctctctctgccctcacctctcccccgaaaaccccctatttagccaaaggaaggaggtcaggggaacgctctcccctccccttccaaaaaacaaaaacagaaaaacccttttccaggccggggaaagcaggagggagaggggccgccgggctggccatggagctgctgtgccacgaggtggacccggtccgcagggccgtgcgggaccgcaacctgctccgagacgaccgcgtcctgcagaacctgctcaccatcgaggagcgctaccttccgcagtgctcctacttcaagtgcgtgcagaaggacatccaaccctacatgcgcagaatggtggccacctggatgctggaggtctgtgaggaacagaagtgcgaagaagaggtcttccctctggccatgaattacctggaccgtttcttggctggggtcccgactccgaagtcccatctgcaactcctgggtgctgtctgcatgttcctggcctccaaactcaaagagaccagcccgctgaccgcggagaagctgtgcatttacaccgacaactccatcaagcctcaggagctgctggagtgggaactggtggtgctggggaagttgaagtggaacctggcagctgtcactcctcatgacttcattgagcacatcttgcgcaagctgccccagcagcgggagaagctgtctctgatccgcaagcatgctcagaccttcattgctctgtgtgccaccgactttaagtttgccatgtacccaccgtcgatgatcgcaactggaagtgtgggagcagccatctgtgggctccagcaggatgaggaagtgagctcgctcacttgtgatgccctgactgagctgctggctaagatcaccaacacagacgtggattgtctcaaagcttgccaggagcagattgaggcggtgctcctcaatagcctgcagcagtaccgtcaggaccaacgtgacggatccaagtcggaggatgaactggaccaagccagcacccctacagacgtgcgggatatcgacctgtgaggatgccagttgggccgaaagagagagacgcgtccataatctggtctcttcttctttctggttgtttttgttctttgtgttttagggtgaaacttaaaaaaaaaattctgcccccacctagatcatatttaaagatcttttagaagtgagagaaaaaggtcctacgaaaacggaataataaaaagcatttggtgcctatttgaagtacagcataagggaatcccttgtatatgcgaacagttattgtttgattatgtaaaagtaatagtaaaatgcttacaggaaaacctgcagagtagttagagaatatgtatgcctgcaatatgggaacaaattagaggagacttttttttttcatgttatgagctagcacatacacccccttgtagtataatttcaaggaactgtgtacgccatttatggcatgattagattgcaaagcaatgaactcaagaaggaattgaaataaggagggacatgatggggaaggagtacaaaacaatctctcaacatgattgaaccatttgggatggagaagcacctttgctctcagccacctgttactaagtcaggagtgtagttggatctctacattaatgtcctcttgctgtctacagtagctgctacctaaaaaaagatgttttattttgccagttggacacaggtgattggctcctgggtttcatgttctgtgacatcctgcttcttcttccaaatgcagttcattgcagacaccaccatattgctatctaatggggaaatgtagctatgggccataaccaaaactcacatgaaacggaggcagatggagaccaagggtgggatccagaatggagtcttttctgttattgtatttaaaagggtaatgtggccttggcatttcttcttagaaaaaaactaatttttggtgctgattggcatgtctggttcacagtttagcattgttataaaccattccattcgaaaagcactttgaaaaattgttcccgagcgatagatgggatggtttatgcaagtcatgctgaatactcctcccctcttctcttttgccccctcccttcctgcccccagtctgggttactcttcgcttctggtatctggcgttctttggtacacagttctggtgttcctaccaggactcaagagacaccccttcctgctgacattcccatcacaacattcctcagacaagcctgtaaactaaaatctgttaccattctgatggcacagaaggatcttaattcccatctctatacttctcctttggacatggaaagaaaagttattgctggtgcaaagatagatggctgaacatcagggtgtggcattttgttcccttttccgtttttttttttttattgttgttgttaattttattgcaaagttgtattcagcgtacttgaatttttcttcctctccacttcttagaggcattcagttagcaaagaggttggagcaacaacttttttttttttttttgcacaattgtaattgacaggtaatgaagctatttgttaaaatatttgcctttttaagtaaaaaagaaaaatcagaacagggctatttgaagaattattttatacacagattctgccttgtttcatagtatgagggttgaagacggaaaacaatctaagggtctctcatttttttaattttgttttgttcagtttggtttttttttttttttgcgctgctaagaagctaaagtcatccatccttattcacgttgacagtacctagctgtaatgtttcacagagtgtgctgctattttataaacatttttataatatattattttactgcttaaattccaagtcctgaagtagatggttgagatatgagttcttcgtactggaaaagcccttccgtagtttgttttcttctggtagcatattcatggttgtttttttttttcttttttggttttttggttttttttttttcctctgatcacattcttcaaagacggagtattctttacctcaggtttactggacaaaatcaataactacaaaaggcaatgattcacgcttttgttttcataatacctcacaaccgtacagtttctgcttgggagcccattcgcatgaggaatacagaagcagtgtgagcagggctgactccctctcaggtggaaggcagggcggtctcactcccagggacctttttggtcatggaggccatcgggctcccagttagaccctggtatcctcatcatgatggaaaaaatacattgaaccaagggatcctccctccccttcaaggcagacgttcagtacaaacatttatgcggtaggctcagatgtcgtaatttgcacttaggtaccaggtgtcaggaaacagactaaaaagaattccaccaggctgtttggagatcctcatcttggagctttttcaaaagcggggcttcatctgcaaagggccctttcatcttgaagtttttcccctccgtctttcccctcccctggcatggacaccttgtgtttaggatcatctctgcaggtttcctaggtctgaatctgcgagtagatgaacctgcagcaagcagcgtttatggtgcttccttctccctcctctgtctcaaactgcgcaggcaagcactatgcaagcccaggccctctgctaagcggtactaaacggtcgggttttcaatcacactgaattggcaggataagaaaaataggtcagataagtatgggatgatagttgaagggaggtgaagaggctgcttctctacagaggtgaaattccagatgagtcagtctcttgggaagtgtgtttagaagggttcaggactttgtgagttagcatgaccctaaaattctaggggatttctggtgggacaatgggtggtgaattctgaagttttggagagggaagtggagcagccagcaagtaagctagccagagttttctcaagagccagctttgctcagcacactctcctgggccccaaggagtcccacggaatggggaaagcgggaaccctggagttcttgggaatcttggagcctaaagagaaaccgaggtgcaaattcatttcatggtgactgacccttgagcttaaacagaagcagcaaatgaaagaaccggacaaataaggaagggcacaagcctacccgactctatttacagtctgtaactttccactcttcctgtagtcccgaggcccctgggtccttctagcttttctctttcccatccttggggccttgtgtgatgatgggtgtggggctgccgatgggaaagtcgggggttgttaggcttttctgcctgctcctgcttaaacacaagaaggaatcctggattttgccctctccttagctcttagtctctttggtaggagttttgttccagaggagctctcccccttggatttgaacttgctctttttgttgttgttgttctttctcttctttttcttacctcccactaaaggggttccaaattatcctggtctttttctaccttgttgtgtttctatctcgtctttacttccatctgtttgtttttttctccatcagtgggggccgagttgttcccccagcctgccaaattttgatccttcccctcttttggccaaatcctagggggaagaaatcctagtatgccaaaaatatatgctaagcataattaaactccatgcgggtccataacagccaagaagcctgcaggagaaagccaagggcagttccctccgcagaacaccccatgcgtgctgagaggcgagctccttgaagaaggggctgttcttccaggaggccttattttgaactgcctcaggaccccactggagagcacagcatgccttactactgggtcatccttggtctatgtgctctgtactggaggctctgttctgcctcttatcagccaggtcaggggcacacatggcttaagtgacaaagccagaggagaagacaaccctgacagcatcacgctgcatcccattgctagcaggattggcaactcttcagacggagctgcgcttccctgcagtctagcacctctagggcctctccagactgtgccctgggagctctgggactgaaaggttaagaacataaggcaggatcagatgactctctccaagagggcaggggaattttctctccatgggccacaggggacagggctgggagaagaaatagacttgcaccttatgtcatgtaaataattgattttctagttcaagaagataatattggtagtgtgggaattggaggtaggaaggggaggaagtctgagtaagccagttggcttctaagccaaaaggattcctctttgtttatctctgagacagtccaaccttgagaatagctttaaaagggaaattaatgctgagatgataaagtccccttaagccaacaaaccctctgtagctatagaatgagtgcaggtttctattggtgtggactcagagcaatttacaagagctgttcatgcagccatccatttgtgcaaaatagggtaagaagattcaagaggatatttattacttcctcataccacatggcttttgatgattctggattctaaacaacccagaatggtcatttcaggcacaacgatactacattcgtgtgtgtctgcttttaaacttggctgggctatcagaccctattctcggctcaggttttgagaagccatcagcaaatgtgtacgtgcatgctgtagctgcagcctgcatcccttcgcctgcagcctactttggggaaataaagtgccttactgactgagaacatgattcatcttgatgatatttgtctttctgtgcctggcttatatcactta

SEQ ID NO: 362135 - DNA, 5619 bp, Homo sapiens
agagcgagcaggggagagcgagaccagttttaaggggaggaccggtgcgagtgaggcagccccgaggctctgctcgcccaccacccaatcctcgcctcccttctgctccaccttctctctctgccctcacctctcccccgaaaaccccctatttagccaaaggaaggaggtcaggggaacgctctcccctccccttccaaaaaacaaaaacagaaaaacccttttccaggccggggaaagcaggagggagaggggccgccgggctggccatggagctgctgtgccacgaggtggacccggtccgcagggccgtgcgggaccgcaacctgctccgagacgaccgcgtcctgcagaacctgctcaccatcgaggagcgctaccttccgcagtgctcctacttcaagtgcgtgcagaaggacatccaaccctacatgcgcagaatggtggccacctggatgctggaggtctgtgaggaacagaagtgcgaagaagaggtcttccctctggccatgaattacctggaccgtttcttggctggggtcccgactccgaagtcccatctgcaactcctgggtgctgtctgcatgttcctggcctccaaactcaaagagaccagcccgctgaccgcggagaagctgtgcatttacaccgacaactccatcaagcctcaggagctgctggagtgggaactggtggtgctggggaagttgaagtggaacctggcagctgtcactcctcatgacttcattgagcacatcttgcgcaagctgccccagcagcgggagaagctgtctctgatccgcaagcatgctcagaccttcattgctctgtgtgccaccgactttaagtttgccatgtacccaccgtcgatgatcgcaactggaagtgtgggagcagccatctgtgggctccagcaggatgaggaagtgagctcgctcacttgtgatgccctgactgagctgctggctaagatcaccaacacagacgtggattgtctcaaagcttgccaggagcagattgaggcggtgctcctcaatagcctgcagcagtaccgtcaggaccaacgtgacggatccaagtcggaggatgaactggaccaagccagcacccctacagacgtgcgggatatcgacctgtgaggatgccagttgggccgaaagagagagacgcgtccataatctggtctcttcttctttctggttgtttttgttctttgtgttttagggtgaaacttaaaaaaaaaattctgcccccacctagatcatatttaaagatcttttagaagtgagagaaaaaggtcctacgaaaacggaataataaaaagcatttggtgcctatttgaagtacagcataagggaatcccttgtatatgcgaacagttattgtttgattatgtaaaagtaatagtaaaatgcttacaggaaaacctgcagagtagttagagaatatgtatgcctgcaatatgggaacaaattagaggagacttttttttttcatgttatgagctagcacatacacccccttgtagtataatttcaaggaactgtgtacgccatttatggcatgattagattgcaaagcaatgaactcaagaaggaattgaaataaggagggacatgatggggaaggagtacaaaacaatctctcaacatgattgaaccatttgggatggagaagcacctttgctctcagccacctgttactaagtcaggagtgtagttggatctctacattaatgtcctcttgctgtctacagtagctgctacctaaaaaaagatgttttattttgccagttggacacaggtgattggctcctgggtttcatgttctgtgacatcctgcttcttcttccaaatgcagttcattgcagacaccaccatattgctatctaatggggaaatgtagctatgggccataaccaaaactcacatgaaacggaggcagatggagaccaagggtgggatccagaatggagtcttttctgttattgtatttaaaagggtaatgtggccttggcatttcttcttagaaaaaaactaatttttggtgctgattggcatgtctggttcacagtttagcattgttataaaccattccattcgaaaagcactttgaaaaattgttcccgagcgatagatgggatggtttatgcaagtcatgctgaatactcctcccctcttctcttttgccccctcccttcctgcccccagtctgggttactcttcgcttctggtatctggcgttctttggtacacagttctggtgttcctaccaggactcaagagacaccccttcctgctgacattcccatcacaacattcctcagacaagcctgtaaactaaaatctgttaccattctgatggcacagaaggatcttaattcccatctctatacttctcctttggacatggaaagaaaagttattgctggtgcaaagatagatggctgaacatcagggtgtggcattttgttcccttttccgtttttttttttttattgttgttgttaattttattgcaaagttgtattcagcgtacttgaatttttcttcctctccacttcttagaggcattcagttagcaaagaggttggagcaacaacttttttttttttttttgcacaattgtaattgacaggtaatgaagctatttgttaaaatatttgcctttttaagtaaaaaagaaaaatcagaacagggctatttgaagaattattttatacacagattctgccttgtttcatagtatgagggttgaagacggaaaacaatctaagggtctctcatttttttaattttgttttgttcagtttggtttttttttttttttgcgctgctaagaagctaaagtcatccatccttattcacgttgacagtacctagctgtaatgtttcacagagtgtgctgctattttataaacatttttataatatattattttactgcttaaattccaagtcctgaagtagatggttgagatatgagttcttcgtactggaaaagcccttccgtagtttgttttcttctggtagcatattcatggttgtttttttttttcttttttggttttttggttttttttttttcctctgatcacattcttcaaagacggagtattctttacctcaggtttactggacaaaatcaataactacaaaaggcaatgattcacgcttttgttttcataatacctcacaaccgtacagtttctgcttgggagcccattcgcatgaggaatacagaagcagtgtgagcagggctgactccctctcaggtggaaggcagggcggtctcactcccagggacctttttggtcatggaggccatcgggctcccagttagaccctggtatcctcatcatgatggaaaaaatacattgaaccaagggatcctccctccccttcaaggcagacgttcagtacaaacatttatgcggtaggctcagatgtcgtaatttgcacttaggtaccaggtgtcaggaaacagactaaaaagaattccaccaggctgtttggagatcctcatcttggagctttttcaaaagcggggcttcatctgcaaagggccctttcatcttgaagtttttcccctccgtctttcccctcccctggcatggacaccttgtgtttaggatcatctctgcaggtttcctaggtctgaatctgcgagtagatgaacctgcagcaagcagcgtttatggtgcttccttctccctcctctgtctcaaactgcgcaggcaagcactatgcaagcccaggccctctgctaagcggtactaaacggtcgggttttcaatcacactgaattggcaggataagaaaaataggtcagataagtatgggatgatagttgaagggaggtgaagaggctgcttctctacagaggtgaaattccagatgagtcagtctcttgggaagtgtgtttagaagggttcaggactttgtgagttagcatgaccctaaaattctaggggatttctggtgggacaatgggtggtgaattctgaagttttggagagggaagtggagcagccagcaagtaagctagccagagttttctcaagagccagctttgctcagcacactctcctgggccccaaggagtcccacggaatggggaaagcgggaaccctggagttcttgggaatcttggagcctaaagagaaaccgaggtgcaaattcatttcatggtgactgacccttgagcttaaacagaagcagcaaatgaaagaaccggacaaataaggaagggcacaagcctacccgactctatttacagtctgtaactttccactcttcctgtagtcccgaggcccctgggtccttctagcttttctctttcccatccttggggccttgtgtgatgatgggtgtggggctgccgatgggaaagtcgggggttgttaggcttttctgcctgctcctgcttaaacacaagaaggaatcctggattttgccctctccttagctcttagtctctttggtaggagttttgttccagaggagctctcccccttggatttgaacttgctctttttgttgttgttgttctttctcttctttttcttacctcccactaaaggggttccaaattatcctggtctttttctaccttgttgtgtttctatctcgtctttacttccatctgtttgtttttttctccatcagtgggggccgagttgttcccccagcctgccaaattttgatccttcccctcttttggccaaatcctagggggaagaaatcctagtatgccaaaaatatatgctaagcataattaaactccatgcgggtccataacagccaagaagcctgcaggagaaagccaagggcagttccctccgcagaacaccccatgcgtgctgagaggcgagctccttgaagaaggggctgttcttccaggaggccttattttgaactgcctcaggaccccactggagagcacagcatgccttactactgggtcatccttggtctatgtgctctgtactggaggctctgttctgcctcttatcagccaggtcaggggcacacatggcttaagtgacaaagccagaggagaagacaaccctgacagcatcacgctgcatcccattgctagcaggattggcaactcttcagacggagctgcgcttccctgcagtctagcacctctagggcctctccagactgtgccctgggagctctgggactgaaaggttaagaacataaggcaggatcagatgactctctccaagagggcaggggaattttctctccatgggccacaggggacagggctgggagaagaaatagacttgcaccttatgtcatgtaaataattgattttctagttcaagaagataatattggtagtgtgggaattggaggtaggaaggggaggaagtctgagtaagccagttggcttctaagccaaaaggattcctctttgtttatctctgagacagtccaaccttgcaactcctctcaaagggaaccaacgctgacaggtaacagtccctgagccaccgtctgtactattgatggctgcacgttgtatcggtgcggccccctacattttcacgacctgttatgcactgctccttttcgctcggtcaccatcccgaggacttttctcttc

SEQ ID NO: 362136 - DNA, 2032 bp, Homo sapiens
tattatttgatctagaaattgccctccttttacccctaccatgagccctacaaacaactaacctgccactaatagttatgtcatccctcttattaatcatcatcctagccctaagtctggcctatgagtgactacaaaaaggattagactgagccgaataaaaaaaaaaaaaaaaaaaaaaaaaaaaaaaaaaaaaaaaaaaaaggggaggaccggtgcgagtgaggcagccccgaggctctgctcgcccaccacccaatcctcgcctcccttctgctccaccttctctctctgccctcacctctcccccgaaaaccccctatttagccaaaggaaggaggtcaggggaacgctctcccctccccttccaaaaaacaaaaacagacatggagctgctgtgccacgaggtggacccggtccgcagggccgtgcgggaccgcaacctgctccgagacgaccgcgtcctgcagaacctgctcaccatcgaggagcgctaccttccgcagtgctcctacttcaagtgcgtgcagaaggacatccaaccctacatgcgcagaatggtggccacctggatgctggagtgacaaagccagaggagaagacaaccctgacagcatcacgctgcatcccattgctagcaggattggcaactcttcagacggagctgcgcttccctgcagtctagcacctctagggcctctccagactgtgccctgggagctctgggactgaaaggttaagaacataaggcaggatcagatgactctctccaagagggcaggggaattttctctccatgggccacaggggacagggctgggagaagaaatagacttgcaccttatgtcatgtaaataattgattttctagttcaagaagataatattggtagtgtgggaattggaggtaggaaggggaggaagtctgagtaagccagttggcttctaagccaaaaggattcctctttgtttatctctgagacagtccaaccttgagaatagctttaaaagggaaattaatgctgagatgataaagtccccttaagccaacaaaccctctgtagctatagaatgagtgcaggtttctattggtgtggactcagagcaatttacaagagctgttcatgcagccatccatttgtgcaaaatagggtaagaagattcaagaggatatttattacttcctcataccacatggcttttgatgattctggattctaaacaacccagaatggtcatttcaggcacaacgatactacattcgtgtgtgtctgcttttaaacttggctgggctatcagaccctattctcggctcaggttttgagaagccatcagcaaatgtgtacgtgcatgctgtagctgcagcctgcatcccttcgcctgcagcctactttggggaaataaagtgccttactgactgtagccattacagtatccaatgtcttttgacaggtgcctgtccttgaaaaacaaagtttctatttttatttttaattggtttagttcttaactgctggccaactcttacatccccagcaaatcatcgggccattggattttttccattatgttcatcacccttatatcatgtacctcagatctctctctctctcctctctctcagttatatagtttcttgtcttggactttttttttcttttctttttcttttttttttggctttaaaacaagtgtgatgccatatcaagtccatgttattctctcacagtgtactctataagaggtgtgggtgtctgtttggtcaggatgttagaaagtgctgataagtagcatgatcagtgtatgcgaaaaggtttttaggaagtatggcaaaaatgttgtattggctatgatggtgacatgatatagtcagctgccttttaagaggtcttatctgttcagtgttaagtgatttaaaaaaataataacctgttttctgactagtttaaagatggatttgaaaatggttttgaatgcaattaggttatgctatttggacaataaactcaccttgacctaaaaattatctggcc

SEQ ID NO: 362137 - DNA, 1054 bp, Homo sapiens
agagcgagcaggggagagcgagaccagttttaaggggaggaccggtgcgagtgaggcagccccgaggctctgctcgcccaccacccaatcctcgcctcccttctgctccaccttctctctctgccctcacctctcccccgaaaaccccctatttagccaaaggaaggaggtcaggggaacgctctcccctccccttccaaaaaacaaaaacagaaaaacccttttccaggccggggaaagcaggagggagaggggccgccgggctggccatggagctgctgtgccacgaggtggacccggtccgcagggccgtgcgggaccgcaacctgctccgagacgaccgcgtcctgcagaacctgctcaccatcgaggagcgctaccttccgcagtgctcctacttcaagtgcgtgcagaaggacatccaaccctacatgcgcagaatggtggccacctggatgctggaggtctgtgaggaacagaagtgcgaagaagaggtcttccctctggccatgaattacctggaccgtttcttggctggggtcccgactccgaagtcccatctgcaactcctgggtgctgtctgcatgttcctggcctccaaactcaaagagaccagcccgctgaccgcggagaagctgtgcatttacaccgacaactccatcaagcctcaggagctgctggagtgggaactggtggtgctggggaagttgaagtggaacctggcagctgtcactcctcatgacttcattgagcacatcttgcgcaagctgccccagcagcgggagaagctgtctctgatccgcaagcatgctcagaccttcattgctctgtgtgccaccgctcaacaggtcggacagggtaagggtaagggatgtaaccaggagatgccacaggaacgtctgagaggtgttagcaagtcccagaggccagcgcccgactccatttcagcctcgttcagggtggcacggagactcctgctgctgcgtcacgtctgtcatgttcagcactcttcccagacacacagtcttgactaaagattgtcaggatcttgaca

SEQ ID NO: 362138 - DNA, 984 bp, Homo sapiens
agagcgagcaggggagagcgagaccagttttaaggggaggaccggtgcgagtgaggcagccccgaggctctgctcgcccaccacccaatcctcgcctcccttctgctccaccttctctctctgccctcacctctcccccgaaaaccccctatttagccaaaggaaggaggtcaggggaacgctctcccctccccttccaaaaaacaaaaacagaaaaacccttttccaggccggggaaagcaggagggagaggggccgccgggctggccatggagctgctgtgccacgaggtggacccggtccgcagggccgtgcgggaccgcaacctgctccgagacgaccgcgtcctgcagaacctgctcaccatcgaggagcgctaccttccgcagtgctcctacttcaagtgcgtgcagaaggacatccaaccctacatgcgcagaatggtggccacctggatgctggaggtctgtgaggaacagaagtgcgaagaagaggtcttccctctggccatgaattacctggaccgtttcttggctggggtcccgactccgaagtcccatctgcaactcctgggtgctgtctgcatgttcctggcctccaaactcaaagagaccagcccgctgaccgcggagaagctgtgcatttacaccgacaactccatcaagcctcaggagctgctggagtgggaactggtggtgctggggaagttgaagtggaacctggcagctgtcactcctcatgacttcattgagcacatcttgcgcaagctgccccagcagcgggagaagctgtctctgatccgcaagcatgctcagaccttcattgctctgtgtgccaccgactttaagtttgccatgtacccaccgtcgatgatcgcaactggaagtgtgggagcagccatctgtgggctccagcacgaatagcaccagcacgaattcccttagcaccagcacgaattcccttagcaccagcacgaattccctt

SEQ ID NO: 362139 - DNA, 1225 bp, Homo sapiens
agagcgagcaggggagagcgagaccagttttaaggggaggaccggtgcgagtgaggcagccccgaggctctgctcgcccaccacccaatcctcgcctcccttctgctccaccttctctctctgccctcacctctcccccgaaaaccccctatttagccaaaggaaggaggtcaggggaacgctctcccctccccttccaaaaaacaaaaacagaaaaacccttttccaggccggggaaagcaggagggagaggggccgccgggctggccatggagctgctgtgccacgaggtggacccggtccgcagggccgtgcgggaccgcaacctgctccgagacgaccgcgtcctgcagaacctgctcaccatcgaggagcgctaccttccgcagtgctcctacttcaagtgcgtgcagaaggacatccaaccctacatgcgcagaatggtggccacctggatgctggagctggtgcgagtgaggcagccccgaggctctgctcgcaccaccacccaatcctcgcctctcttctgctccagcttctactctctgccctcacctctcccccgaaaaccccctatgtagccaaaggaaggaggtcaggggaacgctcgtcccctccccttccagagaaacacgaacaccagaacaaagcctataccaggcccggcggaaacgcaggaggggacgaggggccgccgggctggccatgcgagcactcgcgtgtgccaacgagcgtggacccaggtccgacgggaccgatgcggcaacacagcgcaacaaggcaccgacgcacggacaccgcacctccctgccagaaccctgcctacaccagtccgaggacgacgctacctaccggcagcggcctccgtactccaacgcagcgtaggcaggcacagggaccatcccaacccctaaccaatgacggcagaaaatgggatgggagacacacctggcgccacgccacgacacacgtcccccgacgacggaaccacgacacgtatagcggacacgaaacgcaaagacgacccatcacagcgaagacttggagccccctatgcaactttcaaacccgttggggagcaccgggcgatcctttaggcggactcggcgagtcttcaccgagaatccaccgagaaaaggttcccccactctttacgccaggcaccacccctggcgggatgaccttggcaactacgaaatagcatacccgtaggagacctgccaaa

SEQ ID NO: 362140 - DNA, 490 bp, Homo sapiens
aaagtatttacagtttatgtgagggtcagtacgttggttcattggcttccttcttatctagttctcgggctgagtttgctaatgtcatagcacttctagtagccttccccttttctctgccacttcccagcttccccaggcagaaagcatctggtcggccccttgattaccaggcatccataagtgaccatcatttaggccagtgcttctcagaatgccaatcacctgggctccactaaaaggcaggttctgaatagctcggcctgggttgactgagattctgcggttccaacaagctcgcaggtgatgctgatgctgccagcccatggaccccacctggagtagtgaggtggagagcccctacacgctgatcgattctcttgttctcatgccatacggtaaatcactgacatcttcacgtgggaggttcagagatggggtgtaccaacactgcctgggaacatgcgaacccggtatacctcgattcgta

SEQ ID NO: 362141 - DNA, 583 bp, Homo sapiens
  misc_feature (9)..(9): n is a, c, g, or t
  misc_feature (46)..(46): n is a, c, g, or t
  misc_feature (95)..(95): n is a, c, g, or t
  misc_feature (100)..(100): n is a, c, g, or t
  misc_feature (112)..(112): n is a, c, g, or t
gccacgccnatgaacggcttgccccaccattatggggtgccctctngccccagcttaccttagctccgccggttgatgtggcgatacattcaccngaacncttgccttgttncccagctcgaattaccctcctaagggacaaagctggagctcacgcgtgcgcccgcttagaactagtgaccccgggctgcaggaatcccggccgcgtcgacacggctgcgagagacgacagagggaaacagtgtgatgccatatcaagtccatgttattctctcacagtgtactctataagaggtgtgggtgtctgtttggtcaggatgttagaaagtgctgataagtagcatgatcagtgtatgcgaaaaggtttttaggaagtatggcaaaaatgttgtattggctatgatggtgacatgatatagtcagctgccttttaagaggtcttatctgttcagtgttaagtgatttaaaaaaataataacctgttttctgactagtttaaagatggatttgaaaatggttttgaatgcaattaggttatgctatttggacaataaactcaccttgacctaaaaattatctggcc

SEQ ID NO: 362142 - DNA, 5439 bp, Homo sapiens
agagcgagcaggggagagcgagaccagttttaaggggaggaccggtgcgagtgaggcagccccgaggctctgctcgcccaccacccaatcctcgcctcccttctgctccaccttctctctctgccctcacctctcccccgaaaaccccctatttagccaaaggaaggaggtcaggggaacgctctcccctccccttccaaaaaacaaaaacagaaaaacccttttccaggccggggaaagcaggagggagaggggccgccgggctggccatggagctgctgtgccacgaggtggacccggtccgcagggccgtgcgggaccgcaacctgctccgagacgaccgcgtcctgcagaacctgctcaccatcgaggagcgctaccttccgcagtgctcctacttcaagtgcgtgcagaaggacatccaaccctacatgcgcagaatggtggccacctggatgctggaggtctgtgaggaacagaagtgcgaagaagaggtcttccctctggccatgaattacctggaccgtttcttggctggggtcccgactccgaagtcccatctgcaactcctgggtgctgtctgcatgttcctggcctccaaactcaaagagaccagcccgctgaccgcggagaagctgtgcatttacaccgacaactccatcaagcctcaggagctgctggagtgggaactggtggtgctggggaagttgaagtggaacctggcagctgtcactcctcatgacttcattgagcacatcttgcgcaagctgccccagcagcgggagaagctgtctctgatccgcaagcatgctcagaccttcattgctctgtgtgccaccgactttaagtttgccatgtacccaccgtcgatgatcgcaactggaagtgtgggagcagccatctgtgggctccagcaggatgaggaagtgagctcgctcacttgtgatgccctgactgagctgctggctaagatcaccaacacagacgtggattgtctcaaagcttgccaggagcagattgaggcggtgctcctcaatagcctgcagcagtaccgtcaggaccaacgtgacggatccaagtcggaggatgaactggaccaagccagcacccctacagacgtgcgggatatcgacctgtgaggatgccagttgggccgaaagagagagacgcgtccataatctggtctcttcttctttctggttgtttttgttctttgtgttttagggtgaaacttaaaaaaaaaattctgcccccacctagatcatatttaaagatcttttagaagtgagagaaaaaggtcctacgaaaacggaataataaaaagcatttggtgcctatttgaagtacagcataagggaatcccttgtatatgcgaacagttattgtttgattatgtaaaagtaatagtaaaatgcttacaggaaaacctgcagagtagttagagaatatgtatgcctgcaatatgggaacaaattagaggagacttttttttttcatgttatgagctagcacatacacccccttgtagtataatttcaaggaactgtgtacgccatttatggcatgattagattgcaaagcaatgaactcaagaaggaattgaaataaggagggacatgatggggaaggagtacaaaacaatctctcaacatgattgaaccatttgggatggagaagcacctttgctctcagccacctgttactaagtcaggagtgtagttggatctctacattaatgtcctcttgctgtctacagtagctgctacctaaaaaaagatgttttattttgccagttggacacaggtgattggctcctgggtttcatgttctgtgacatcctgcttcttcttccaaatgcagttcattgcagacaccaccatattgctatctaatggggaaatgtagctatgggccataaccaaaactcacatgaaacggaggcagatggagaccaagggtgggatccagaatggagtcttttctgttattgtatttaaaagggtaatgtggccttggcatttcttcttagaaaaaaactaatttttggtgctgattggcatgtctggttcacagtttagcattgttataaaccattccattcgaaaagcactttgaaaaattgttcccgagcgatagatgggatggtttatgcaagtcatgctgaatactcctcccctcttctcttttgccccctcccttcctgcccccagtctgggttactcttcgcttctggtatctggcgttctttggtacacagttctggtgttcctaccaggactcaagagacaccccttcctgctgacattcccatcacaacattcctcagacaagcctgtaaactaaaatctgttaccattctgatggcacagaaggatcttaattcccatctctatacttctcctttggacatggaaagaaaagttattgctggtgcaaagatagatggctgaacatcagggtgtggcattttgttcccttttccgtttttttttttttattgttgttgttaattttattgcaaagttgtattcagcgtacttgaatttttcttcctctccacttcttagaggcattcagttagcaaagaggttggagcaacaacttttttttttttttttgcacaattgtaattgacaggtaatgaagctatttgttaaaatatttgcctttttaagtaaaaaagaaaaatcagaacagggctatttgaagaattattttatacacagattctgccttgtttcatagtatgagggttgaagacggaaaacaatctaagggtctctcatttttttaattttgttttgttcagtttggtttttttttttttttgcgctgctaagaagctaaagtcatccatccttattcacgttgacagtacctagctgtaatgtttcacagagtgtgctgctattttataaacatttttataatatattattttactgcttaaattccaagtcctgaagtagatggttgagatatgagttcttcgtactggaaaagcccttccgtagtttgttttcttctggtagcatattcatggttgtttttttttttcttttttggttttttggttttttttttttcctctgatcacattcttcaaagacggagtattctttacctcaggtttactggacaaaatcaataactacaaaaggcaatgattcacgcttttgttttcataatacctcacaaccgtacagtttctgcttgggagcccattcgcatgaggaatacagaagcagtgtgagcagggctgactccctctcaggtggaaggcagggcggtctcactcccagggacctttttggtcatggaggccatcgggctcccagttagaccctggtatcctcatcatgatggaaaaaatacattgaaccaagggatcctccctccccttcaaggcagacgttcagtacaaacatttatgcggtaggctcagatgtcgtaatttgcacttaggtaccaggtgtcaggaaacagactaaaaagaattccaccaggctgtttggagatcctcatcttggagctttttcaaaagcggggcttcatctgcaaagggccctttcatcttgaagtttttcccctccgtctttcccctcccctggcatggacaccttgtgtttaggatcatctctgcaggtttcctaggtctgaatctgcgagtagatgaacctgcagcaagcagcgtttatggtgcttccttctccctcctctgtctcaaactgcgcaggcaagcactatgcaagcccaggccctctgctaagcggtactaaacggtcgggttttcaatcacactgaattggcaggataagaaaaataggtcagataagtatgggatgatagttgaagggaggtgaagaggctgcttctctacagaggtgaaattccagatgagtcagtctcttgggaagtgtgtttagaagggttcaggactttgtgagttagcatgaccctaaaattctaggggatttctggtgggacaatgggtggtgaattctgaagttttggagagggaagtggagcagccagcaagtaagctagccagagttttctcaagagccagctttgctcagcacactctcctgggccccaaggagtcccacggaatggggaaagcgggaaccctggagttcttgggaatcttggagcctaaagagaaaccgaggtgcaaattcatttcatggtgactgacccttgagcttaaacagaagcagcaaatgaaagaaccggacaaataaggaagggcacaagcctacccgactctatttacagtctgtaactttccactcttcctgtagtcccgaggcccctgggtccttctagcttttctctttcccatccttggggccttgtgtgatgatgggtgtggggctgccgatgggaaagtcgggggttgttaggcttttctgcctgctcctgcttaaacacaagaaggaatcctggattttgccctctccttagctcttagtctctttggtaggagttttgttccagaggagctctcccccttggatttgaacttgctctttttgttgttgttgttctttctcttctttttcttacctcccactaaaggggttccaaattatcctggtctttttctaccttgttgtgtttctatctcgtctttacttccatctgtttgtttttttctccatcagtgggggccgagttgttcccccagcctgccaaattttgatccttcccctcttttggccaaatcctagggggaagaaatcctagtatgccaaaaatatatgctaagcataattaaactccatgcgggtccataacagccaagaagcctgcaggagaaagccaagggcagttccctccgcagaacaccccatgcgtgctgagaggcgagctccttgaagaaggggctgttcttccaggaggccttattttgaactgcctcaggaccccactggagagcacagcatgccttactactgggtcatccttggtctatgtgctctgtactggaggctctgttctgcctcttatcagccaggtcaggggcacacatggcttaagtgacaaagccagaggagaagacaaccctgacagcatcacgctgcatcccattgctagcaggattggcaactcttcagacggagctgcgcttccctgcagtctagcacctctagggacctttttggtcatggaggccatcgggctcccagttagaccctggtatcctcatcatgatggaaaaaatacattgaaccaagggatcctccctccccttcaaggcagacgttcagtacaaacatttatgcggtaggctcagatgtcgtaatttgcacttaggtaccaggtgtcaggaaacagactgcaaagaattccaccaggctgtttggagatcctcatcttggagctttttcaaaagcggggcttcatctgcaaagggccctttatctgaagttgtac

SEQ ID NO: 362143 - DNA, 4695 bp, Homo sapiens
agagcgagcaggggagagcgagaccagttttaaggggaggaccggtgcgagtgaggcagccccgaggctctgctcgcccaccacccaatcctcgcctcccttctgctccaccttctctctctgccctcacctctcccccgaaaaccccctatttagccaaaggaaggaggtcaggggaacgctctcccctccccttccaaaaaacaaaaacagaaaaacccttttccaggccggggaaagcaggagggagaggggccgccgggctggccatggagctgctgtgccacgaggtggacccggtccgcagggccgtgcgggaccgcaacctgctccgagacgaccgcgtcctgcagaacctgctcaccatcgaggagcgctaccttccgcagtgctcctacttcaagtgcgtgcagaaggacatccaaccctacatgcgcagaatggtggccacctggatgctggaggtctgtgaggaacagaagtgcgaagaagaggtcttccctctggccatgaattacctggaccgtttcttggctggggtcccgactccgaagtcccatctgcaactcctgggtgctgtctgcatgttcctggcctccaaactcaaagagaccagcccgctgaccgcggagaagctgtgcatttacaccgacaactccatcaagcctcaggagctgctggagtgggaactggtggtgctggggaagttgaagtggaacctggcagctgtcactcctcatgacttcattgagcacatcttgcgcaagctgccccagcagcgggagaagctgtctctgatccgcaagcatgctcagaccttcattgctctgtgtgccaccgactttaagtttgccatgtacccaccgtcgatgatcgcaactggaagtgtgggagcagccatctgtgggctccagcaggatgaggaagtgagctcgctcacttgtgatgccctgactgagctgctggctaagatcaccaacacagacgtggattgtctcaaagcttgccaggagcagattgaggcggtgctcctcaatagcctgcagcagtaccgtcaggaccaacgtgacggatccaagtcggaggatgaactggaccaagccagcacccctacagacgtgcgggatatcgacctgtgaggatgccagttgggccgaaagagagagacgcgtccataatctggtctcttcttctttctggttgtttttgttctttgtgttttagggtgaaacttaaaaaaaaaattctgcccccacctagatcatatttaaagatcttttagaagtgagagaaaaaggtcctacgaaaacggaataataaaaagcatttggtgcctatttgaagtacagcataagggaatcccttgtatatgcgaacagttattgtttgattatgtaaaagtaatagtaaaatgcttacaggaaaacctgcagagtagttagagaatatgtatgcctgcaatatgggaacaaattagaggagacttttttttttcatgttatgagctagcacatacacccccttgtagtataatttcaaggaactgtgtacgccatttatggcatgattagattgcaaagcaatgaactcaagaaggaattgaaataaggagggacatgatggggaaggagtacaaaacaatctctcaacatgattgaaccatttgggatggagaagcacctttgctctcagccacctgttactaagtcaggagtgtagttggatctctacattaatgtcctcttgctgtctacagtagctgctacctaaaaaaagatgttttattttgccagttggacacaggtgattggctcctgggtttcatgttctgtgacatcctgcttcttcttccaaatgcagttcattgcagacaccaccatattgctatctaatggggaaatgtagctatgggccataaccaaaactcacatgaaacggaggcagatggagaccaagggtgggatccagaatggagtcttttctgttattgtatttaaaagggtaatgtggccttggcatttcttcttagaaaaaaactaatttttggtgctgattggcatgtctggttcacagtttagcattgttataaaccattccattcgaaaagcactttgaaaaattgttcccgagcgatagatgggatggtttatgcaagtcatgctgaatactcctcccctcttctcttttgccccctcccttcctgcccccagtctgggttactcttcgcttctggtatctggcgttctttggtacacagttctggtgttcctaccaggactcaagagacaccccttcctgctgacattcccatcacaacattcctcagacaagcctgtaaactaaaatctgttaccattctgatggcacagaaggatcttaattcccatctctatacttctcctttggacatggaaagaaaagttattgctggtgcaaagatagatggctgaacatcagggtgtggcattttgttcccttttccgtttttttttttttattgttgttgttaattttattgcaaagttgtattcagcgtacttgaatttttcttcctctccacttcttagaggcattcagttagcaaagaggttggagcaacaacttttttttttttttttgcacaattgtaattgacaggtaatgaagctatttgttaaaatatttgcctttttaagtaaaaaagaaaaatcagaacagggctatttgaagaattattttatacacagattctgccttgtttcatagtatgagggttgaagacggaaaacaatctaagggtctctcatttttttaattttgttttgttcagtttggtttttttttttttttgcgctgctaagaagctaaagtcatccatccttattcacgttgacagtacctagctgtaatgtttcacagagtgtgctgctattttataaacatttttataatatattattttactgcttaaattccaagtcctgaagtagatggttgagatatgagttcttcgtactggaaaagcccttccgtagtttgttttcttctggtagcatattcatggttgtttttttttttcttttttggttttttggttttttttttttcctctgatcacattcttcaaagacggagtattctttacctcaggtttactggacaaaatcaataactacaaaaggcaatgattcacgcttttgttttcataatacctcacaaccgtacagtttctgcttgggagcccattcgcatgaggaatacagaagcagtgtgagcagggctgactccctctcaggtggaaggcagggcggtctcactcccagggacctttttggtcatggaggccatcgggctcccagttagaccctggtatcctcatcatgatggaaaaaatacattgaaccaagggatcctccctccccttcaaggcagacgttcagtacaaacatttatgcggtaggctcagatgtcgtaatttgcacttaggtaccaggtgtcaggaaacagactaaaaagaattccaccaggctgtttggagatcctcatcttggagctttttcaaaagcggggcttcatctgcaaagggccctttcatcttgaagtttttcccctccgtctttcccctcccctggcatggacaccttgtgtttaggatcatctctgcaggtttcctaggtctgaatctgcgagtagatgaacctgcagcaagcagcgtttatggtgcttccttctccctcctctgtctcaaactgcgcaggcaagcactatgcaagcccaggccctctgctaagcggtactaaacggtcgggttttcaatcacactgaattggcaggataagaaaaataggtcagataagtatgggatgatagttgaagggaggtgaagaggctgcttctctacagaggtgaaattccagatgagtcagtctcttgggaagtgtgtttagaagggttcaggactttgtgagttagcatgaccctaaaattctaggggatttctggtgggacaatgggtggtgaattctgaagttttggagagggaagtggagcagccagcaagtaagctagccagagttttctcaagagccagctttgctcagcacactctcctgggccccaaggagtcccacggaatggggaaagcgggaaccctggagttcttgggaatcttggagcctaaagagaaaccgaggtgcaaattcatttcatggtgactgacccttgagcttaaacagaagcagcaaatgaaagaaccggacaaataaggaagggcacaagcctacccgactctatttacagtctgtaactttccactcttcctgtagtcccgaggcccctgggtccttctagcttttctctttcccatccttggggccttgtgtgatgatgggtgtggggctgccgatgggaaagtcgggggttgttaggcttttctgcctgctcctgcttaaacacaagaaggaatcctggattttgccctctccttagctcttagtctctttggtaggagttttgttccagaggagctctcccccttggatttgaacttgctctttttgttgttgttgttctttctcttctttttcttacctcccactaaaggggttccaaattatcctggtctttttctacctttgtttttatctctctaactcaatctttctttttcccatcatgggccgattttccccacttccaattgactcccctcttgca

SEQ ID NO: 362144 - DNA, 1212 bp, Homo sapiens
tattatttgatctagaaattgccctccttttacccctaccatgagccctacaaacaactaacctgccactaatagttatgtcatccctcttattaatcatcatcctagccctaagtctggcctatgagtgactacaaaaaggattagactgagccgaataaaaaaaaaaaaaaaaaaaaaaaaaaaaaaaaaaaaaaaaaaaaaggggaggaccggtgcgagtgaggcagccccgaggctctgctcgcccaccacccaatcctcgcctcccttctgctccaccttctctctctgccctcacctctcccccgaaaaccccctatttagccaaaggaaggaggtcaggggaacgctctcccctccccttccaaaaaacaaaaacagaaaaacccttttccaggccggggaaagcaggagggagaggggccgccgggctggccatggagctgctgtgccacgaggtggacccggtccgcagggccgtgcgggaccgcaacctgctccgagacgaccgcgtcctgcagaacctgctcaccatcgaggagcgctaccttccgcagtgctcctacttcaagtgcgtgcagaaggacatccaaccctacatgcgcagaatggtggccacctggatgctggaggtctgtgaggaacagaagtgcgaagaagaggtcttccctctggccatgaattacctggaccgtttcttggctggggtcccgactccgaagtcccatctgcaactcctgggtgctgtctgcatgttcctggcctccaaactcaaagagaccagcccgctgaccgcggagaagctgtgcatttacaccgacaactccatcaagcctcaggagctgctggtaatgaccggccccttcctcccttcctttctgcgattcccgctttcccctggccaacaatatgccttctatcaccactgccagagcaaattcttgggatccagaatgaccccaccaatagaatttacccacttatgggcgatagctcatttaataggaaaccactgtttattttttgtgtgttcctactatgtgcccaggctccgtgcccagcactgaggctacatctgtgaataagatcctcatggagatttgggttggtgagactcatttgcaattgtgtatgcatgtgtgtaggggacgcatggaatattttaattaacagtgataatattttaattaaattccaaatttccaaaaa

SEQ ID NO: 362145 - DNA, 6494 bp, Homo sapiens
agagcgagcaggggagagcgagaccagttttaaggggaggaccggtgcgagtgaggcagccccgaggctctgctcgcccaccacccaatcctcgcctcccttctgctccaccttctctctctgccctcacctctcccccgaaaaccccctatttagccaaaggaaggaggtcaggggaacgctctcccctccccttccaaaaaacaaaaacagaaaaacccttttccaggccggggaaagcaggagggagaggggccgccgggctggccatggagctgctgtgccacgaggtggacccggtccgcagggccgtgcgggaccgcaacctgctccgagacgaccgcgtcctgcagaacctgctcaccatcgaggagcgctaccttccgcagtgctcctacttcaagtgcgtgcagaaggacatccaaccctacatgcgcagaatggtggccacctggatgctggaggtctgtgaggaacagaagtgcgaagaagaggtcttccctctggccatgaattacctggaccgtttcttggctggggtcccgactccgaagtcccatctgcaactcctgggtgctgtctgcatgttcctggcctccaaactcaaagagaccagcccgctgaccgcggagaagctgtgcatttacaccgacaactccatcaagcctcaggagctgctggagtgggaactggtggtgctggggaagttgaagtggaacctggcagctgtcactcctcatgacttcattgagcacatcttgcgcaagctgccccagcagcgggagaagctgtctctgatccgcaagcatgctcagaccttcattgctctgtgtgccaccgactttaagtttgccatgtacccaccgtcgatgatcgcaactggaagtgtgggagcagccatctgtgggctccagcaggatgaggaagtgagctcgctcacttgtgatgccctgactgagctgctggctaagatcaccaacacagacgtggattgtctcaaagcttgccaggagcagattgaggcggtgctcctcaatagcctgcagcagtaccgtcaggaccaacgtgacggatccaagtcggaggatgaactggaccaagccagcacccctacagacgtgcgggatatcgacctgtgaggatgccagttgggccgaaagagagagacgcgtccataatctggtctcttcttctttctggttgtttttgttctttgtgttttagggtgaaacttaaaaaaaaaattctgcccccacctagatcatatttaaagatcttttagaagtgagagaaaaaggtcctacgaaaacggaataataaaaagcatttggtgcctatttgaagtacagcataagggaatcccttgtatatgcgaacagttattgtttgattatgtaaaagtaatagtaaaatgcttacaggaaaacctgcagagtagttagagaatatgtatgcctgcaatatgggaacaaattagaggagacttttttttttcatgttatgagctagcacatacacccccttgtagtataatttcaaggaactgtgtacgccatttatggcatgattagattgcaaagcaatgaactcaagaaggaattgaaataaggagggacatgatggggaaggagtacaaaacaatctctcaacatgattgaaccatttgggatggagaagcacctttgctctcagccacctgttactaagtcaggagtgtagttggatctctacattaatgtcctcttgctgtctacagtagctgctacctaaaaaaagatgttttattttgccagttggacacaggtgattggctcctgggtttcatgttctgtgacatcctgcttcttcttccaaatgcagttcattgcagacaccaccatattgctatctaatggggaaatgtagctatgggccataaccaaaactcacatgaaacggaggcagatggagaccaagggtgggatccagaatggagtcttttctgttattgtatttaaaagggtaatgtggccttggcatttcttcttagaaaaaaactaatttttggtgctgattggcatgtctggttcacagtttagcattgttataaaccattccattcgaaaagcactttgaaaaattgttcccgagcgatagatgggatggtttatgcaagtcatgctgaatactcctcccctcttctcttttgccccctcccttcctgcccccagtctgggttactcttcgcttctggtatctggcgttctttggtacacagttctggtgttcctaccaggactcaagagacaccccttcctgctgacattcccatcacaacattcctcagacaagcctgtaaactaaaatctgttaccattctgatggcacagaaggatcttaattcccatctctatacttctcctttggacatggaaagaaaagttattgctggtgcaaagatagatggctgaacatcagggtgtggcattttgttcccttttccgtttttttttttttattgttgttgttaattttattgcaaagttgtattcagcgtacttgaatttttcttcctctccacttcttagaggcattcagttagcaaagaggttggagcaacaacttttttttttttttttgcacaattgtaattgacaggtaatgaagctatttgttaaaatatttgcctttttaagtaaaaaagaaaaatcagaacagggctatttgaagaattattttatacacagattctgccttgtttcatagtatgagggttgaagacggaaaacaatctaagggtctctcatttttttaattttgttttgttcagtttggtttttttttttttttgcgctgctaagaagctaaagtcatccatccttattcacgttgacagtacctagctgtaatgtttcacagagtgtgctgctattttataaacatttttataatatattattttactgcttaaattccaagtcctgaagtagatggttgagatatgagttcttcgtactggaaaagcccttccgtagtttgttttcttctggtagcatattcatggttgtttttttttttcttttttggttttttggttttttttttttcctctgatcacattcttcaaagacggagtattctttacctcaggtttactggacaaaatcaataactacaaaaggcaatgattcacgcttttgttttcataatacctcacaaccgtacagtttctgcttgggagcccattcgcatgaggaatacagaagcagtgtgagcagggctgactccctctcaggtggaaggcagggcggtctcactcccagggacctttttggtcatggaggccatcgggctcccagttagaccctggtatcctcatcatgatggaaaaaatacattgaaccaagggatcctccctccccttcaaggcagacgttcagtacaaacatttatgcggtaggctcagatgtcgtaatttgcacttaggtaccaggtgtcaggaaacagactaaaaagaattccaccaggctgtttggagatcctcatcttggagctttttcaaaagcggggcttcatctgcaaagggccctttcatcttgaagtttttcccctccgtctttcccctcccctggcatggacaccttgtgtttaggatcatctctgcaggtttcctaggtctgaatctgcgagtagatgaacctgcagcaagcagcgtttatggtgcttccttctccctcctctgtctcaaactgcgcaggcaagcactatgcaagcccaggccctctgctaagcggtactaaacggtcgggttttcaatcacactgaattggcaggataagaaaaataggtcagataagtatgggatgatagttgaagggaggtgaagaggctgcttctctacagaggtgaaattccagatgagtcagtctcttgggaagtgtgtttagaagggttcaggactttgtgagttagcatgaccctaaaattctaggggatttctggtgggacaatgggtggtgaattctgaagttttggagagggaagtggagcagccagcaagtaagctagccagagttttctcaagagccagctttgctcagcacactctcctgggccccaaggagtcccacggaatggggaaagcgggaaccctggagttcttgggaatcttggagcctaaagagaaaccgaggtgcaaattcatttcatggtgactgacccttgagcttaaacagaagcagcaaatgaaagaaccggacaaataaggaagggcacaagcctacccgactctatttacagtctgtaactttccactcttcctgtagtcccgaggcccctgggtccttctagcttttctctttcccatccttggggccttgtgtgatgatgggtgtggggctgccgatgggaaagtcgggggttgttaggcttttctgcctgctcctgcttaaacacaagaaggaatcctggattttgccctctccttagctcttagtctctttggtaggagttttgttccagaggagctctcccccttggatttgaacttgctctttttgttgttgttgttctttctcttctttttcttacctcccactaaaggggttccaaattatcctggtctttttctaccttgttgtgtttctatctcgtctttacttccatctgtttgtttttttctccatcagtgggggccgagttgttcccccagcctgccaaattttgatccttcccctcttttggccaaatcctagggggaagaaatcctagtatgccaaaaatatatgctaagcataattaaactccatgcgggtccataacagccaagaagcctgcaggagaaagccaagggcagttccctccgcagaacaccccatgcgtgctgagaggcgagctccttgaagaaggggctgttcttccaggaggccttattttgaactgcctcaggaccccactggagagcacagcatgccttactactgggtcatccttggtctatgtgctctgtactggaggctctgttctgcctcttatcagccaggtcaggggcacacatggcttaagtgacaaagccagaggagaagacaaccctgacagcatcacgctgcatcccattgctagcaggattggcaactcttcagacggagctgcgcttccctgcagtctagcacctctagggcctctccagactgtgccctgggagctctgggactgaaaggttaagaacataaggcaggatcagatgactctctccaagagggcaggggaattttctctccatgggccacaggggacagggctgggagaagaaatagacttgcaccttatgtcatgtaaataattgattttctagttcaagaagataatattggtagtgtgggaattggaggtaggaaggggaggaagtctgagtaagccagttggcttctaagccaaaaggattcctctttgtttatctctgagacagtccaaccttgagaatagctttaaaagggaaattaatgctgagatgataaagtccccttaagccaacaaaccctctgtagctatagaatgagtgcaggtttctattggtgtggactcagagcaatttacaagagctgttcatgcagccatccatttgtgcaaaatagggtaagaagattcaagaggatatttattacttcctcataccacatggcttttgatgattctggattctaaacaacccagaatggtcatttcaggcacaacgatactacattcgtgtgtgtctgcttttaaacttggctgggctatcagaccctattctcggctcaggttttgagaagccatcagcaaatgtgtacgtgcatgctgtagctgcagcctgcatcccttcgcctgcagcctactttggggaaataaagtgccttactgactgtagccattacagtatccaatgtcttttgacaggtgcctgtccttgaaaaacaaagtttctatttttatttttaattggtttagttcttaactgctggccaactcttacatccccagcaaatcatcgggccattggattttttccattatgttcatcacccttatatcatgtacctcagatctctctctctctcctctctctcagttatatagtttcttgtcttggactttttttttcttttctttttcttttttttttggctttaaaacaagtgtgatgccatatcaagtccatgttattctctcacagtgtactctataagaggtgtgggtgtctgtttggtcaggatgttagaaagtgctgataagtagcatgatcagtgtatgcgaaaaggtttttaggaagtatggcaaaaatgttgtattggctatgatggtgacatgatatagtcagctgccttttaagaggtcttatctgttcagtgttaagtgatttaaaaaaataataacctgttttctgactagtttaaagatggatttgaaaatggttttgaatgcaattaggttatgctatttggacaataaactcaccttgacctaaaaattatctggcc

SEQ ID NO: 362146 - DNA, 333 bp, Homo sapiens
gggtatctgggtgatggtgggtggggcatctgggtagtggtgaggtgcccggggatgaagagggagggaaaatctgtagggaaggggggagcagggaggttggactggtgatgcactaaggacctgggatgctcctgggaggctgcatcctgctttcctcgggggctctgagctgagtttgtccaagtgaggagtgagtatggctgagtaaaaggagtaaaggatcctgctgacacatttctcatccttctaggttgttcttcgtgggctcccgggagggccacctaccggaccttctgtccatgcctctctcgctaaatgcagccttctcgt

SEQ ID NO: 362147 - DNA, 6327 bp, Homo sapiens
tgagcatcctgttggcgccgttccactgggagagtttatgtggccgaggcagacaagtggaattaggccttgctgcaggggacttcatttccttctcagtactggacccatttatgaggaggtggcttatgaaagtgtgatgttcgcgtatttcttgacaggcagtggcgtgatcttggctcactgcaacctccgactccctggttcaagcgattctcctgcctcagcctcctgagtggggattacaggccacagcaaacacaggtgtgcaggaaccgtttgtcatggaagccagggagcctgggaggcccacacccacctaccatcttgtccctaacaccagccagtcccaggtggaagaagatgtcagctcgccacctcaaaggtcctccgaaactatgcagctgaagaaggagatctccctgctgaatggggtcagcctggtggtgggcaacatgatcggctcagggatctttgtctcacccaagggtgtgctggtacacactgcctcctatgggatgtcactgattgtgtgggccattggtgggctcttctctgttgtgggtgccctttgttatgcagagctggggaccaccatcaccaagtcgggagccagctacgcttatattctagaggcctttgggggcttcattgccttcatccgcctgtgggtctcactgctagttgttgagcccaccggtcaggccatcatcgccatcacctttgccaactacatcatccagccgtccttccccagctgtgatcccccatacctggcctgccgtctcctggctgctgcttgcatatgtctgctgacatttgtgaactgtgcctatgtcaagtggggcacacgtgtgcaggacacgttcacttacgccaaggtcgtagcgctcattgccatcattgtcatgggccttgttaaactgtgccagggacactctgagcactttcaggacgcctttgagggttcctcctgggacatgggaaacctctctcttgccctctactctgccctcttctcttactcaggttgggacacccttaattttgtaacagaagaaatcaaaaacccagaaagaaatttgcccttggccattgggatttctatgccaattgtgacgctcatctacatcctgaccaatgtggcctattacacagtgctgaacatttcagatgtccttagcagtgatgctgtggctgtgacatttgctgaccagacgtttggcatgttcagctggaccatccccattgctgttgccctgtcctgctttgggggcctcaatgcatccatctttgcttcatcaaggttgttcttcgtgggctcccgggagggccacctaccggaccttctgtccatgatccacattgagcgttttacacctatccctgctttactgttcaattgcaccatggcactcatctacctcatcgtggaggatgttttccagcttatcaactacttcagcttcagctactggttcttcgtgggcctgtctgttgttggacagctctacctccgctggaaggagcccaagcggccccggcctctcaagctgagcgtgtttttccccatcgtgttctgcatatgctccgtgtttctggtgatagtgcccctcttcactgacaccattaattccctcattggcatcgggattgccctttctggagtccctttctacttcatgggtgtttacctgccagagtcccggaggccattgtttattcggaatgtcctggctgctatcaccagaggcacccagcagctttgcttttgtgtcctgactgagcttgatgtagccgaagaaaaaaaggatgagaggaaaactgactagaggtcagaggtggctttctgaggcctggaaggcaggccaaccagcaaaatcctgataacaagactctgtgggcccaactctcctgaattaaaggagccttttgacccaatcatatagtggggctcagggccagtgctcactcttattggtaagctataggagactcaggatctgggccaacctcaaggtgggggcttcagagggtggggggaagattggggaacggggggaatggtcatttagttttactcctgataggtagatgcagctcttacagatatttacttggtaaagtgcagtggggaagagggaatgctaggttgatagggctggtggcttctgaatttggtatttgaactaggagtccctatagaggggctgctttatgggaagtttttctctgaccaggtacaacacctgactttaaaggcctgaaatgctaccatttcttcctctggctcaaaattcttccctggggagagagttatattcccttatttattgatatttagtccagaacaccagttctaacgaagcatgcgtgtctcttcatctacaggatgcaataggctgattgtatttaaaaatcaaagtacccaaaactgagtccctttgggctcagaaatgtctgtggtattgggtcagactctgaccacagattttatgctgtttagcacaatttctattgagtcttacctgcaacaatgaaccttaaagatttttttactcacgtacctgttacactttagcatacagatagatcatagatcacgttacaagcacttggctcaggtccagcaaggacagatgaacaaattcctgagtcagaagtctgttaatattgctgttttgaaggacaatcctttattttacttgagaccttacatctttgttctagctgacagtaaatctctgggtttctgttacgaactctaagagggctgaaacttctgatattcaggtggatcacctgaattctctcagctgtcaatggcttggagaacatctcatgggcccaagtcatcaaataacctgttcctctctgtaagggcagtgtgagggactgctgtgcagacccaagcaatcccaacctggtgctaggtcatttcacttttctgaaaacctcacatcaggctgcatcctcttctgtccctggcaccaggctttgtttacacttggagccaccttggtgtgggtcaccgggacagtgtactcctctcctgccagcctccccttccccgaggtgtggtggctgcagtctcaggaagagcttggtacttgtggggacttctgttttctccctgtggagatcagtgaagactgggaggaaagctgcttcaacctgagtccggctcttcagcaggctgcacaagtggaagcaactaattctggtgctcaggctgggctctccacccaagttaggcctgctctggcctaatggatcttactgtatgagcaggacggctgcattggattgtacaactgttttgtgatgcccccagacactgtcatcctaggccgagaagaacctgctagcttgacataccccatgggcttatccttaggttttggaattggtcaacagtgaggcagtctcccttcctgaccattcttctccacccagtcacagataagggaataaccttggccatatatttgctcaataaagattgaaggaagcatggtcatagttgccctgggttcagagcataatgcatatgtgaagcatggggtgacattcctactgtcatgggtttgggatttgtaacggcaaattcctgcccgacgacagggtgtcttatgcaaaggctgacttgcctgaacgctaagaacatgacttctgtctgagctaagctggcacccatcccagggctcctctggagctaatcctttaagcaaaatgtgcttgccttttaaagatccctgaccccagctttagctttctccaccagataaccagctaatcccaggaatttgctgccccccaccagtggcttctagggaaagcaaggacctcacatgccaggtgccctagtacttgcttagtgagccatgtcatcctcctttcatttttggatggtgacagcatttttcccctctgtgctggatacagacttctcccaggatcctctctttgggagcgaagccagaggatccctacagcactcaagcttcatggtggaattaatttctgccagctctttgttgtctgtctccttaaatccttttcctggtgtgcttattatcccttttgcagtgagtacagtttattaagttgtcagccctttaatattggggaaacttaatgagtataaatagcagggagcacattgtaacagcacagtgttttgtttttttcacccggttgctgtatgagaatggctttcaatcctttgtttctatgcctacagacagaaagcaagatgtctaatattagacatacaagttgctgcctgttataacggtgaattatacctttgtgcatgcctaggatgtttgttgttttaattagctgcaatatatacggcctgtgtacacagaatttaatcacttcggcaggttgaacaactccatgtagataagagcaagtgtaggcaaaggtttagaaaatggacataaagtcaaagaatgatggcaggtaggatgaaggagagatacttaggaaatcctaaaagaggcggcaagaaggtacctccctgtgtaactcaccttcccccatgacagtgagtaagagacactcacaggctatgagggtacacccctagctgaatgttctgtgttgtttccttagacctgtggtgtccgctgcaacagctactagccacgtgtagctaattacattaaaatgaaataaaattaaaagctcagtttctcagttgcgctaatcacatttcaagtgctcagcagccacccgtgtctactactacacagtgcagacacagaacatatcatcactgcagatagttctactggacaatgttacgctagaataaacaccaaggcagtcagttaaggcagctatggtttggaaaggcatacggacagagtctgcttagaagagatacaagttgttaataaaattgatcctgttgatagtagtttgtttttgtggtgggtgctgtgaagagtaaacattactcagtggaaagctaagttcagaaggtactttgtttttcctcccttgccttaagtccttggtatttataatcaatgctgaaccttctatttcactaccgctccctgttttagatattcagatttaaaaggttttcaaagaattactttcttccatgttcaaagctagattttactaaacacatgtatcacattcatatatattgtttcttggccccactgccaaaggaagtcagtcagtaatttcacaaccgttatcagagtttggaagcagaaatagctgttaactaaaatctcccactgctcagactactttctgccctaatggccattactatccagtctgtattgctacaagggacccactggtaccccttttagattctatcaaaaggaacagggttttcctagaggcaggcagcctggtggtatggcacagcagaagcttactgctaatgaaatgggaacctccccctcccttgtggtttcagcacagaacctgaatgccaggaaaaattcctgggccaagaagctaaagctaaagaaaccttccttttttcaacgtttttttttctttcaaactgtagggtcacttttgattgaggcaaaggggtcctactgtaagtggaaaagactcactcccctaacataagttttcactgtggtgggatggtgccgcccgatatgcttgatatgcttttccttccacatgttaagctaggaaacctaacaggatgtcagcagggcagttaactctggactcagagccctcaagggcatgtggcagaacctcatggacatcacaagaccatcagtctgaatccaggtcgtgggggctgtcatagccgaactccttctgcacatccagagggtacttgctccacatccgctgtctgctgctgcctctttcctcctcactcaggctgttgtagtcagcagagcctagaatgacatcccgggagtggattctaaatgtgattttcctaggctactgcaggagccccttctcttctcagaaaggtctgtttttgttcccgattgtaatgcaaaatccttgctcaataaataaaaaagaatatagaattcttttttttttaaagaaggaatcactttcctatcatctaaaccaagttccttcacactggagtattttgtcacttctcccctccgtggagtattttgtcacttctcccctccgtataggattttttgttgttgtaagagttgtagtcatattgtaaatatttttgtacctttctccttttaacgtgttattgacaaacctccccaaaagaatatgcaattgtttgattcatttctctgttatcagacaccaataaattctttttgttgggccttc

SEQ ID NO: 362148 - DNA, 6240 bp, Homo sapiens
tgagcatcctgttggcgccgttccactgggagagtttatgtggccgaggcagacaagtggaattaggccttgctgcaggggacttcatttccttctcagtactggacccatttatgaggaggtggcttatgaaagtgtgatgttcgcgtatttcttgacaggccacagcaaacacaggtgtgcaggaaccgtttgtcatggaagccagggagcctgggaggcccacacccacctaccatcttgtccctaacaccagccagtcccaggtggaagaagatgtcagctcgccacctcaaaggtcctccgaaactatgcagctgaagaaggagatctccctgctgaatggggtcagcctggtggtgggcaacatgatcggctcagggatctttgtctcacccaagggtgtgctggtacacactgcctcctatgggatgtcactgattgtgtgggccattggtgggctcttctctgttgtgggtgccctttgttatgcagagctggggaccaccatcaccaagtcgggagccagctacgcttatattctagaggcctttgggggcttcattgccttcatccgcctgtgggtctcactgctagttgttgagcccaccggtcaggccatcatcgccatcacctttgccaactacatcatccagccgtccttccccagctgtgatcccccatacctggcctgccgtctcctggctgctgcttgcatatgtctgctgacatttgtgaactgtgcctatgtcaagtggggcacacgtgtgcaggacacgttcacttacgccaaggtcgtagcgctcattgccatcattgtcatgggccttgttaaactgtgccagggacactctgagcactttcaggacgcctttgagggttcctcctgggacatgggaaacctctctcttgccctctactctgccctcttctcttactcaggttgggacacccttaattttgtaacagaagaaatcaaaaacccagaaagaaatttgcccttggccattgggatttctatgccaattgtgacgctcatctacatcctgaccaatgtggcctattacacagtgctgaacatttcagatgtccttagcagtgatgctgtggctgtgacatttgctgaccagacgtttggcatgttcagctggaccatccccattgctgttgccctgtcctgctttgggggcctcaatgcatccatctttgcttcatcaaggttgttcttcgtgggctcccgggagggccacctaccggaccttctgtccatgatccacattgagcgttttacacctatccctgctttactgttcaattgcaccatggcactcatctacctcatcgtggaggatgttttccagcttatcaactacttcagcttcagctactggttcttcgtgggcctgtctgttgttggacagctctacctccgctggaaggagcccaagcggccccggcctctcaagctgagcgtgtttttccccatcgtgttctgcatatgctccgtgtttctggtgatagtgcccctcttcactgacaccattaattccctcattggcatcgggattgccctttctggagtccctttctacttcatgggtgtttacctgccagagtcccggaggccattgtttattcggaatgtcctggctgctatcaccagaggcacccagcagctttgcttttgtgtcctgactgagcttgatgtagccgaagaaaaaaaggatgagaggaaaactgactagaggtcagaggtggctttctgaggcctggaaggcaggccaaccagcaaaatcctgataacaagactctgtgggcccaactctcctgaattaaaggagccttttgacccaatcatatagtggggctcagggccagtgctcactcttattggtaagctataggagactcaggatctgggccaacctcaaggtgggggcttcagagggtggggggaagattggggaacggggggaatggtcatttagttttactcctgataggtagatgcagctcttacagatatttacttggtaaagtgcagtggggaagagggaatgctaggttgatagggctggtggcttctgaatttggtatttgaactaggagtccctatagaggggctgctttatgggaagtttttctctgaccaggtacaacacctgactttaaaggcctgaaatgctaccatttcttcctctggctcaaaattcttccctggggagagagttatattcccttatttattgatatttagtccagaacaccagttctaacgaagcatgcgtgtctcttcatctacaggatgcaataggctgattgtatttaaaaatcaaagtacccaaaactgagtccctttgggctcagaaatgtctgtggtattgggtcagactctgaccacagattttatgctgtttagcacaatttctattgagtcttacctgcaacaatgaaccttaaagatttttttactcacgtacctgttacactttagcatacagatagatcatagatcacgttacaagcacttggctcaggtccagcaaggacagatgaacaaattcctgagtcagaagtctgttaatattgctgttttgaaggacaatcctttattttacttgagaccttacatctttgttctagctgacagtaaatctctgggtttctgttacgaactctaagagggctgaaacttctgatattcaggtggatcacctgaattctctcagctgtcaatggcttggagaacatctcatgggcccaagtcatcaaataacctgttcctctctgtaagggcagtgtgagggactgctgtgcagacccaagcaatcccaacctggtgctaggtcatttcacttttctgaaaacctcacatcaggctgcatcctcttctgtccctggcaccaggctttgtttacacttggagccaccttggtgtgggtcaccgggacagtgtactcctctcctgccagcctccccttccccgaggtgtggtggctgcagtctcaggaagagcttggtacttgtggggacttctgttttctccctgtggagatcagtgaagactgggaggaaagctgcttcaacctgagtccggctcttcagcaggctgcacaagtggaagcaactaattctggtgctcaggctgggctctccacccaagttaggcctgctctggcctaatggatcttactgtatgagcaggacggctgcattggattgtacaactgttttgtgatgcccccagacactgtcatcctaggccgagaagaacctgctagcttgacataccccatgggcttatccttaggttttggaattggtcaacagtgaggcagtctcccttcctgaccattcttctccacccagtcacagataagggaataaccttggccatatatttgctcaataaagattgaaggaagcatggtcatagttgccctgggttcagagcataatgcatatgtgaagcatggggtgacattcctactgtcatgggtttgggatttgtaacggcaaattcctgcccgacgacagggtgtcttatgcaaaggctgacttgcctgaacgctaagaacatgacttctgtctgagctaagctggcacccatcccagggctcctctggagctaatcctttaagcaaaatgtgcttgccttttaaagatccctgaccccagctttagctttctccaccagataaccagctaatcccaggaatttgctgccccccaccagtggcttctagggaaagcaaggacctcacatgccaggtgccctagtacttgcttagtgagccatgtcatcctcctttcatttttggatggtgacagcatttttcccctctgtgctggatacagacttctcccaggatcctctctttgggagcgaagccagaggatccctacagcactcaagcttcatggtggaattaatttctgccagctctttgttgtctgtctccttaaatccttttcctggtgtgcttattatcccttttgcagtgagtacagtttattaagttgtcagccctttaatattggggaaacttaatgagtataaatagcagggagcacattgtaacagcacagtgttttgtttttttcacccggttgctgtatgagaatggctttcaatcctttgtttctatgcctacagacagaaagcaagatgtctaatattagacatacaagttgctgcctgttataacggtgaattatacctttgtgcatgcctaggatgtttgttgttttaattagctgcaatatatacggcctgtgtacacagaatttaatcacttcggcaggttgaacaactccatgtagataagagcaagtgtaggcaaaggtttagaaaatggacataaagtcaaagaatgatggcaggtaggatgaaggagagatacttaggaaatcctaaaagaggcggcaagaaggtacctccctgtgtaactcaccttcccccatgacagtgagtaagagacactcacaggctatgagggtacacccctagctgaatgttctgtgttgtttccttagacctgtggtgtccgctgcaacagctactagccacgtgtagctaattacattaaaatgaaataaaattaaaagctcagtttctcagttgcgctaatcacatttcaagtgctcagcagccacccgtgtctactactacacagtgcagacacagaacatatcatcactgcagatagttctactggacaatgttacgctagaataaacaccaaggcagtcagttaaggcagctatggtttggaaaggcatacggacagagtctgcttagaagagatacaagttgttaataaaattgatcctgttgatagtagtttgtttttgtggtgggtgctgtgaagagtaaacattactcagtggaaagctaagttcagaaggtactttgtttttcctcccttgccttaagtccttggtatttataatcaatgctgaaccttctatttcactaccgctccctgttttagatattcagatttaaaaggttttcaaagaattactttcttccatgttcaaagctagattttactaaacacatgtatcacattcatatatattgtttcttggccccactgccaaaggaagtcagtcagtaatttcacaaccgttatcagagtttggaagcagaaatagctgttaactaaaatctcccactgctcagactactttctgccctaatggccattactatccagtctgtattgctacaagggacccactggtaccccttttagattctatcaaaaggaacagggttttcctagaggcaggcagcctggtggtatggcacagcagaagcttactgctaatgaaatgggaacctccccctcccttgtggtttcagcacagaacctgaatgccaggaaaaattcctgggccaagaagctaaagctaaagaaaccttccttttttcaacgtttttttttctttcaaactgtagggtcacttttgattgaggcaaaggggtcctactgtaagtggaaaagactcactcccctaacataagttttcactgtggtgggatggtgccgcccgatatgcttgatatgcttttccttccacatgttaagctaggaaacctaacaggatgtcagcagggcagttaactctggactcagagccctcaagggcatgtggcagaacctcatggacatcacaagaccatcagtctgaatccaggtcgtgggggctgtcatagccgaactccttctgcacatccagagggtacttgctccacatccgctgtctgctgctgcctctttcctcctcactcaggctgttgtagtcagcagagcctagaatgacatcccgggagtggattctaaatgtgattttcctaggctactgcaggagccccttctcttctcagaaaggtctgtttttgttcccgattgtaatgcaaaatccttgctcaataaataaaaaagaatatagaattcttttttttttaaagaaggaatcactttcctatcatctaaaccaagttccttcacactggagtattttgtcacttctcccctccgtggagtattttgtcacttctcccctccgtataggattttttgttgttgtaagagttgtagtcatattgtaaatatttttgtacctttctccttttaacgtgttattgacaaacctccccaaaagaatatgcaattgtttgattcatttctctgttatcagacaccaataaattctttttgttgggccttc

SEQ ID NO: 362149 - DNA, 5274 bp, Homo sapiens
gggtatctgggtgatggtgggtggggcatctgggtagtggtgaggtgcccggggatgaagagggagggaaaatctgtagggaaggggggagcagggaggttggactggtgatgcactaaggacctgggatgctcctgggaggctgcatcctgctttcctcgggggctctgagctgagtttgtccaagtgaggagtgagtatggctgagtaaaaggagtaaaggatcctgctgacacatttctcatccttctaggttgttcttcgtgggctcccgggagggccacctaccggaccttctgtccatgatccacattgagcgttttacacctatccctgctttactgttcaattgcaccatggcactcatctacctcatcgtggaggatgttttccagcttatcaactacttcagcttcagctactggttcttcgtgggcctgtctgttgttggacagctctacctccgctggaaggagcccaagcggccccggcctctcaagctgagcgtgtttttccccatcgtgttctgcatatgctccgtgtttctggtgatagtgcccctcttcactgacaccattaattccctcattggcatcgggattgccctttctggagtccctttctacttcatgggtgtttacctgccagagtcccggaggccattgtttattcggaatgtcctggctgctatcaccagaggcacccagcagctttgcttttgtgtcctgactgagcttgatgtagccgaagaaaaaaaggatgagaggaaaactgactagaggtcagaggtggctttctgaggcctggaaggcaggccaaccagcaaaatcctgataacaagactctgtgggcccaactctcctgaattaaaggagccttttgacccaatcatatagtggggctcagggccagtgctcactcttattggtaagctataggagactcaggatctgggccaacctcaaggtgggggcttcagagggtggggggaagattggggaacggggggaatggtcatttagttttactcctgataggtagatgcagctcttacagatatttacttggtaaagtgcagtggggaagagggaatgctaggttgatagggctggtggcttctgaatttggtatttgaactaggagtccctatagaggggctgctttatgggaagtttttctctgaccaggtacaacacctgactttaaaggcctgaaatgctaccatttcttcctctggctcaaaattcttccctggggagagagttatattcccttatttattgatatttagtccagaacaccagttctaacgaagcatgcgtgtctcttcatctacaggatgcaataggctgattgtatttaaaaatcaaagtacccaaaactgagtccctttgggctcagaaatgtctgtggtattgggtcagactctgaccacagattttatgctgtttagcacaatttctattgagtcttacctgcaacaatgaaccttaaagatttttttactcacgtacctgttacactttagcatacagatagatcatagatcacgttacaagcacttggctcaggtccagcaaggacagatgaacaaattcctgagtcagaagtctgttaatattgctgttttgaaggacaatcctttattttacttgagaccttacatctttgttctagctgacagtaaatctctgggtttctgttacgaactctaagagggctgaaacttctgatattcaggtggatcacctgaattctctcagctgtcaatggcttggagaacatctcatgggcccaagtcatcaaataacctgttcctctctgtaagggcagtgtgagggactgctgtgcagacccaagcaatcccaacctggtgctaggtcatttcacttttctgaaaacctcacatcaggctgcatcctcttctgtccctggcaccaggctttgtttacacttggagccaccttggtgtgggtcaccgggacagtgtactcctctcctgccagcctccccttccccgaggtgtggtggctgcagtctcaggaagagcttggtacttgtggggacttctgttttctccctgtggagatcagtgaagactgggaggaaagctgcttcaacctgagtccggctcttcagcaggctgcacaagtggaagcaactaattctggtgctcaggctgggctctccacccaagttaggcctgctctggcctaatggatcttactgtatgagcaggacggctgcattggattgtacaactgttttgtgatgcccccagacactgtcatcctaggccgagaagaacctgctagcttgacataccccatgggcttatccttaggttttggaattggtcaacagtgaggcagtctcccttcctgaccattcttctccacccagtcacagataagggaataaccttggccatatatttgctcaataaagattgaaggaagcatggtcatagttgccctgggttcagagcataatgcatatgtgaagcatggggtgacattcctactgtcatgggtttgggatttgtaacggcaaattcctgcccgacgacagggtgtcttatgcaaaggctgacttgcctgaacgctaagaacatgacttctgtctgagctaagctggcacccatcccagggctcctctggagctaatcctttaagcaaaatgtgcttgccttttaaagatccctgaccccagctttagctttctccaccagataaccagctaatcccaggaatttgctgccccccaccagtggcttctagggaaagcaaggacctcacatgccaggtgccctagtacttgcttagtgagccatgtcatcctcctttcatttttggatggtgacagcatttttcccctctgtgctggatacagacttctcccaggatcctctctttgggagcgaagccagaggatccctacagcactcaagcttcatggtggaattaatttctgccagctctttgttgtctgtctccttaaatccttttcctggtgtgcttattatcccttttgcagtgagtacagtttattaagttgtcagccctttaatattggggaaacttaatgagtataaatagcagggagcacattgtaacagcacagtgttttgtttttttcacccggttgctgtatgagaatggctttcaatcctttgtttctatgcctacagacagaaagcaagatgtctaatattagacatacaagttgctgcctgttataacggtgaattatacctttgtgcatgcctaggatgtttgttgttttaattagctgcaatatatacggcctgtgtacacagaatttaatcacttcggcaggttgaacaactccatgtagataagagcaagtgtaggcaaaggtttagaaaatggacataaagtcaaagaatgatggcaggtaggatgaaggagagatacttaggaaatcctaaaagaggcggcaagaaggtacctccctgtgtaactcaccttcccccatgacagtgagtaagagacactcacaggctatgagggtacacccctagctgaatgttctgtgttgtttccttagacctgtggtgtccgctgcaacagctactagccacgtgtagctaattacattaaaatgaaataaaattaaaagctcagtttctcagttgcgctaatcacatttcaagtgctcagcagccacccgtgtctactactacacagtgcagacacagaacatatcatcactgcagatagttctactggacaatgttacgctagaataaacaccaaggcagtcagttaaggcagctatggtttggaaaggcatacggacagagtctgcttagaagagatacaagttgttaataaaattgatcctgttgatagtagtttgtttttgtggtgggtgctgtgaagagtaaacattactcagtggaaagctaagttcagaaggtactttgtttttcctcccttgccttaagtccttggtatttataatcaatgctgaaccttctatttcactaccgctccctgttttagatattcagatttaaaaggttttcaaagaattactttcttccatgttcaaagctagattttactaaacacatgtatcacattcatatatattgtttcttggccccactgccaaaggaagtcagtcagtaatttcacaaccgttatcagagtttggaagcagaaatagctgttaactaaaatctcccactgctcagactactttctgccctaatggccattactatccagtctgtattgctacaagggacccactggtaccccttttagattctatcaaaaggaacagggttttcctagaggcaggcagcctggtggtatggcacagcagaagcttactgctaatgaaatgggaacctccccctcccttgtggtttcagcacagaacctgaatgccaggaaaaattcctgggccaagaagctaaagctaaagaaaccttccttttttcaacgtttttttttctttcaaactgtagggtcacttttgattgaggcaaaggggtcctactgtaagtggaaaagactcactcccctaacataagttttcactgtggtgggatggtgccgcccgatatgcttgatatgcttttccttccacatgttaagctaggaaacctaacaggatgtcagcagggcagttaactctggactcagagccctcaagggcatgtggcagaacctcatggacatcacaagaccatcagtctgaatccaggtcgtgggggctgtcatagccgaactccttctgcacatccagagggtacttgctccacatccgctgtctgctgctgcctctttcctcctcactcaggctgttgtagtcagcagagcctagaatgacatcccgggagtggattctaaatgtgattttcctaggctactgcaggagccccttctcttctcagaaaggtctgtttttgttcccgattgtaatgcaaaatccttgctcaataaataaaaaagaatatagaattcttttttttttaaagaaggaatcactttcctatcatctaaaccaagttccttcacactggagtattttgtcacttctcccctccgtggagtattttgtcacttctcccctccgtataggattttttgttgttgtaagagttgtagtcatattgtaaatatttttgtacctttctccttttaacgtgttattgacaaacctccccaaaagaatatgcaattgtttgattcatttctctgttatcagacaccaataaattctttttgttgggccttc

SEQ ID NO: 362150 - DNA, 3431 bp, Homo sapiens
tgagcatcctgttggcgccgttccactgggagagtttatgtggccgaggcagacaagtggaattaggccttgctgcaggggacttcatttccttctcagtactggacccatttatgaggaggtggcttatgaaagtgtgatgttcgcgtatttcttgacaggccacagcaaacacaggtgtgcaggaaccgtttgtcatggaagccagggagcctgggaggcccacacccacctaccatcttgtccctaacaccagccagtcccaggtggaagaagatgtcagctcgccacctcaaaggtcctccgaaactatgcagctgaagaaggagatctccctgctgaatggggtcagcctggtggtgggcaacatgatcggctcagggatctttgtctcacccaagggtgtgctggtacacactgcctcctatgggatgtcactgattgtgtgggccattggtgggctcttctctgttgtgggtgccctttgttatgcagagctggggaccaccatcaccaagtcgggagccagctacgcttatattctagaggcctttgggggcttcattgccttcatccgcctgtgggtctcactgctagttgttgagcccaccggtcaggccatcatcgccatcacctttgccaactacatcatccagccgtccttccccagctgtgatcccccatacctggcctgccgtctcctggctgctgcttgcatatgtctgctgacatttgtgaactgtgcctatgtcaagtggggcacacgtgtgcaggacacgttcacttacgccaaggtcgtagcgctcattgccatcattgtcatgggccttgttaaactgtgccagggacactctgagcactttcaggacgcctttgagggttcctcctgggacatgggaaacctctctcttgccctctactctgccctcttctcttactcaggttgggacacccttaattttgtaacagaagaaatcaaaaacccagaaagaaatttgcccttggccattgggatttctatgccaattgtgacgctcatctacatcctgaccaatgtggcctattacacagtgctgaacatttcagatgtccttagcagtgatgctgtggctgtgacatttgctgaccagacgtttggcatgttcagctggaccatccccattgctgttgccctgtcctgctttgggggcctcaatgcatccatctttgcttcatcaaggttgttcttcgtgggctcccgggagggccacctaccggaccttctgtccatgatccacattgagcgttttacacctatccctgctttactgttcaattgcaccatggcactcatctacctcatcgtggaggatgttttccagcttatcaactacttcagcttcagctactggttcttcgtgggcctgtctgttgttggacagctctacctccgctggaaggagcccaagcggccccggcctctcaagctgagcgtgtttttccccatcgtgttctgcatatgctccgtgtttctggtgatagtgcccctcttcactgacaccattaattccctcattggcatcgggattgccctttctggagtccctttctacttcatgggtgtttacctgccagagtcccggaggccattgtttattcggaatgtcctggctgctatcaccagaggcacccagcagctttgcttttgtgtcctgactgagcttgatgtagccgaagaaaaaaaggatgagaggaaaactgactagaggtcagaggtggctttctgaggcctggaaggcaggccaaccagcaaaatcctgataacaagactctgtgggcccaactctcctgaattaaaggagccttttgacccaatcatatagtggggctcagggccagtgctcactcttattggtaagctataggagactcaggatctgggccaacctcaaggtgggggcttcagagggtggggggaagattggggaacggggggaatggtcatttagttttactcctgataggtagatgcagctcttacagatatttacttggtaaagtgcagtggggaagagggaatgctaggttgatagggctggtggcttctgaatttggtatttgaactaggagtccctatagaggggctgctttatgggaagtttttctctgaccaggtacaacacctgactttaaaggcctgaaatgctaccatttcttcctctggctcaaaattcttccctggggagagagttatattcccttatttattgatatttagtccagaacaccagttctaacgaagcatgcgtgtctcttcatctacaggatgcaataggctgattgtatttaaaaatcaaagtacccaaaactgagtccctttgggctcagaaatgtctgtggtattgggtcagactctgaccacagattttatgctgtttagcacaatttctattgagtcttacctgcaacaatgaaccttaaagatttttttactcacgtacctgttacactttagcatacagatagatcatagatcacgttacaagcacttggctcaggtccagcaaggacagatgaacaaattcctgagtcagaagtctgttaatattgctgttttgaaggacaatcctttattttacttgagaccttacatctttgttctagctgacagtaaatctctgggtttctgttacgaactctaagagggctgaaacttctgatattcaggtggatcacctgaattctctcagctgtcaatggcttggagaacatctcatgggcccaagtcatcaaataacctgttcctctctgtaagggcagtgtgagggactgctgtgcagacccaagcaatcccaacctggtgctaggtcatttcacttttctgaaaacctcacatcaggctgcatcctcttctgtccctggcaccaggctttgtttacacttggagccaccttggtgtgggtcaccgggacagtgtactcctctcctgccagcctccccttccccgaggtgtggtggctgcagtctcaggaagagcttggtacttgtggggacttctgttttctccctgtggagatcagtgaagactgggaggaaagctgcttcaacctgagtccggctcttcagcaggctgcacaagtggaagcaactaattctggtgctcaggctgggctctccacccaagttaggcctgctctggcctaatggatcttactgtatgagcaggacggctgcattggattgtacaactgttttgtgatgcccccagacactgtcatcctaggccgagaagaacctgctagcttgacataccccatgggcttatccttaggttttggaattggtcaacagtgaggcagtctcccttcctgaccattcttctccacccagtcacagataagggaataaccttggccatatatttgctcaataaagattgaaggaagcatggt

SEQ ID NO: 362151 - DNA, 370 bp, Homo sapiens
ttgtgggttttaagctggtgagaacagagcagaaatctataactcaaggagaatccaatcgttggacaaatttaatgccagcctattctgggctgcaggacaggtatttgtcatcagaagtcattatcacatcatgcgtgagctctcatggtgtctttcttgggagcagtgaaggtctacccacttctatttccctgtgttctatggtgggaactgagacaggcctattgtagttagggctgtgtgcatggcatgctgtccctaaataggaagtgggcagggaaatctggtctaaatagagcctcaccagctcctgccctagactgacatacttgtattctttgccaggccacagcaaacacaggtgtgc

SEQ ID NO: 362152 - DNA, 244 bp, Homo sapiens
gctatcttcacagagaaagttgggtctttctcaatagaaagaacccagggtcaaggggaaggtgagcctccctcaaagacttggaggctagtgaactgttaaatgttaggaaaatcccagtggagacttgataaactttgttcccaaggagaggttggttctaggtagtcctttctcacttgtcctgacagaaatttgcccttggccattgggatttctatgccaattgtgacgctcatctaca

SEQ ID NO: 362153 - DNA, 301 bp, Homo sapiens
ttcctcttcccacgttacttaatctctcaccccctctatttcagctgagcgtgtttttccccatcgtgttctgcatatgctccgtgtttctggtgatagtgcccctcttcactgacaccattaattccctcattggcatcgggattgccctttctggagtccctttctacttcatgggtgtttacctgccagagtcccggaggccattgtttattcggaatgtcctgggtgagcttctctgtgccccattactcactggcggctatgtgtgcatgcgcatgcagaggtggggggtggctaa

SEQ ID NO: 362154 - DNA, 6204 bp, Homo sapiens
ttttttttttttgagaccaagtcttgctctgttgccaggcagtggcgtgatcttggctcactgcaacctccgactccctggttcaagcgattctcctgcctcagcctcctgagtggggattacaggccacagcaaacacaggtgtgcaggaaccgtttgtcatggaagccagggagcctgggaggcccacacccacctaccatcttgtccctaacaccagccagtcccaggtggaagaagatgtcagctcgccacctcaaaggtcctccgaaactatgcagctgaagaaggagatctccctgctgaatggggtcagcctggtggtgggcaacatgatcggctcagggatctttgtctcacccaagggtgtgctggtacacactgcctcctatgggatgtcactgattgtgtgggccattggtgggctcttctctgttgtgggtgccctttgttatgcagagctggggaccaccatcaccaagtcgggagccagctacgcttatattctagaggcctttgggggcttcattgccttcatccgcctgtgggtctcactgctagttgttgagcccaccggtcaggccatcatcgccatcacctttgccaactacatcatccagccgtccttccccagctgtgatcccccatacctggcctgccgtctcctggctgctgcttgcatatgtctgctgacatttgtgaactgtgcctatgtcaagtggggcacacgtgtgcaggacacgttcacttacgccaaggtcgtagcgctcattgccatcattgtcatgggccttgttaaactgtgccagggacactctgagcactttcaggacgcctttgagggttcctcctgggacatgggaaacctctctcttgccctctactctgccctcttctcttactcaggttgggacacccttaattttgtaacagaagaaatcaaaaacccagaaagaaatttgcccttggccattgggatttctatgccaattgtgacgctcatctacatcctgaccaatgtggcctattacacagtgctgaacatttcagatgtccttagcagtgatgctgtggctgtgacatttgctgaccagacgtttggcatgttcagctggaccatccccattgctgttgccctgtcctgctttgggggcctcaatgcatccatctttgcttcatcaaggttgttcttcgtgggctcccgggagggccacctaccggaccttctgtccatgatccacattgagcgttttacacctatccctgctttactgttcaattgcaccatggcactcatctacctcatcgtggaggatgttttccagcttatcaactacttcagcttcagctactggttcttcgtgggcctgtctgttgttggacagctctacctccgctggaaggagcccaagcggccccggcctctcaagctgagcgtgtttttccccatcgtgttctgcatatgctccgtgtttctggtgatagtgcccctcttcactgacaccattaattccctcattggcatcgggattgccctttctggagtccctttctacttcatgggtgtttacctgccagagtcccggaggccattgtttattcggaatgtcctggctgctatcaccagaggcacccagcagctttgcttttgtgtcctgactgagcttgatgtagccgaagaaaaaaaggatgagaggaaaactgactagaggtcagaggtggctttctgaggcctggaaggcaggccaaccagcaaaatcctgataacaagactctgtgggcccaactctcctgaattaaaggagccttttgacccaatcatatagtggggctcagggccagtgctcactcttattggtaagctataggagactcaggatctgggccaacctcaaggtgggggcttcagagggtggggggaagattggggaacggggggaatggtcatttagttttactcctgataggtagatgcagctcttacagatatttacttggtaaagtgcagtggggaagagggaatgctaggttgatagggctggtggcttctgaatttggtatttgaactaggagtccctatagaggggctgctttatgggaagtttttctctgaccaggtacaacacctgactttaaaggcctgaaatgctaccatttcttcctctggctcaaaattcttccctggggagagagttatattcccttatttattgatatttagtccagaacaccagttctaacgaagcatgcgtgtctcttcatctacaggatgcaataggctgattgtatttaaaaatcaaagtacccaaaactgagtccctttgggctcagaaatgtctgtggtattgggtcagactctgaccacagattttatgctgtttagcacaatttctattgagtcttacctgcaacaatgaaccttaaagatttttttactcacgtacctgttacactttagcatacagatagatcatagatcacgttacaagcacttggctcaggtccagcaaggacagatgaacaaattcctgagtcagaagtctgttaatattgctgttttgaaggacaatcctttattttacttgagaccttacatctttgttctagctgacagtaaatctctgggtttctgttacgaactctaagagggctgaaacttctgatattcaggtggatcacctgaattctctcagctgtcaatggcttggagaacatctcatgggcccaagtcatcaaataacctgttcctctctgtaagggcagtgtgagggactgctgtgcagacccaagcaatcccaacctggtgctaggtcatttcacttttctgaaaacctcacatcaggctgcatcctcttctgtccctggcaccaggctttgtttacacttggagccaccttggtgtgggtcaccgggacagtgtactcctctcctgccagcctccccttccccgaggtgtggtggctgcagtctcaggaagagcttggtacttgtggggacttctgttttctccctgtggagatcagtgaagactgggaggaaagctgcttcaacctgagtccggctcttcagcaggctgcacaagtggaagcaactaattctggtgctcaggctgggctctccacccaagttaggcctgctctggcctaatggatcttactgtatgagcaggacggctgcattggattgtacaactgttttgtgatgcccccagacactgtcatcctaggccgagaagaacctgctagcttgacataccccatgggcttatccttaggttttggaattggtcaacagtgaggcagtctcccttcctgaccattcttctccacccagtcacagataagggaataaccttggccatatatttgctcaataaagattgaaggaagcatggtcatagttgccctgggttcagagcataatgcatatgtgaagcatggggtgacattcctactgtcatgggtttgggatttgtaacggcaaattcctgcccgacgacagggtgtcttatgcaaaggctgacttgcctgaacgctaagaacatgacttctgtctgagctaagctggcacccatcccagggctcctctggagctaatcctttaagcaaaatgtgcttgccttttaaagatccctgaccccagctttagctttctccaccagataaccagctaatcccaggaatttgctgccccccaccagtggcttctagggaaagcaaggacctcacatgccaggtgccctagtacttgcttagtgagccatgtcatcctcctttcatttttggatggtgacagcatttttcccctctgtgctggatacagacttctcccaggatcctctctttgggagcgaagccagaggatccctacagcactcaagcttcatggtggaattaatttctgccagctctttgttgtctgtctccttaaatccttttcctggtgtgcttattatcccttttgcagtgagtacagtttattaagttgtcagccctttaatattggggaaacttaatgagtataaatagcagggagcacattgtaacagcacagtgttttgtttttttcacccggttgctgtatgagaatggctttcaatcctttgtttctatgcctacagacagaaagcaagatgtctaatattagacatacaagttgctgcctgttataacggtgaattatacctttgtgcatgcctaggatgtttgttgttttaattagctgcaatatatacggcctgtgtacacagaatttaatcacttcggcaggttgaacaactccatgtagataagagcaagtgtaggcaaaggtttagaaaatggacataaagtcaaagaatgatggcaggtaggatgaaggagagatacttaggaaatcctaaaagaggcggcaagaaggtacctccctgtgtaactcaccttcccccatgacagtgagtaagagacactcacaggctatgagggtacacccctagctgaatgttctgtgttgtttccttagacctgtggtgtccgctgcaacagctactagccacgtgtagctaattacattaaaatgaaataaaattaaaagctcagtttctcagttgcgctaatcacatttcaagtgctcagcagccacccgtgtctactactacacagtgcagacacagaacatatcatcactgcagatagttctactggacaatgttacgctagaataaacaccaaggcagtcagttaaggcagctatggtttggaaaggcatacggacagagtctgcttagaagagatacaagttgttaataaaattgatcctgttgatagtagtttgtttttgtggtgggtgctgtgaagagtaaacattactcagtggaaagctaagttcagaaggtactttgtttttcctcccttgccttaagtccttggtatttataatcaatgctgaaccttctatttcactaccgctccctgttttagatattcagatttaaaaggttttcaaagaattactttcttccatgttcaaagctagattttactaaacacatgtatcacattcatatatattgtttcttggccccactgccaaaggaagtcagtcagtaatttcacaaccgttatcagagtttggaagcagaaatagctgttaactaaaatctcccactgctcagactactttctgccctaatggccattactatccagtctgtattgctacaagggacccactggtaccccttttagattctatcaaaaggaacagggttttcctagaggcaggcagcctggtggtatggcacagcagaagcttactgctaatgaaatgggaacctccccctcccttgtggtttcagcacagaacctgaatgccaggaaaaattcctgggccaagaagctaaagctaaagaaaccttccttttttcaacgtttttttttctttcaaactgtagggtcacttttgattgaggcaaaggggtcctactgtaagtggaaaagactcactcccctaacataagttttcactgtggtgggatggtgccgcccgatatgcttgatatgcttttccttccacatgttaagctaggaaacctaacaggatgtcagcagggcagttaactctggactcagagccctcaagggcatgtggcagaacctcatggacatcacaagaccatcagtctgaatccaggtcgtgggggctgtcatagccgaactccttctgcacatccagagggtacttgctccacatccgctgtctgctgctgcctctttcctcctcactcaggctgttgtagtcagcagagcctagaatgacatcccgggagtggattctaaatgtgattttcctaggctactgcaggagccccttctcttctcagaaaggtctgtttttgttcccgattgtaatgcaaaatccttgctcaataaataaaaaagaatatagaattcttttttttttaaagaaggaatcactttcctatcatctaaaccaagttccttcacactggagtattttgtcacttctcccctccgtggagtattttgtcacttctcccctccgtataggattttttgttgttgtaagagttgtagtcatattgtaaatatttttgtacctttctccttttaacgtgttattgacaaacctccccaaaagaatatgcaattgtttgattcatttctctgttatcagacaccaataaattctttttgttgggccttc

SEQ ID NO: 362155 - DNA, 6154 bp, Homo sapiens
tgagcatcctgttggcgccgttccactgggagagtttatgtggccgaggcagacaagtggaattaggccttgctgcaggggacttcatttccttctcagtactggacccatttatgaggaggtggcttatgaaagtgtgatgttcgcgtatttcttgacaggccacagcaaacacaggtgtgcaggaaccgtttgtcatggaagccagggagcctgggaggcccacacccacctaccatcttgtccctaacaccagccagtcccaggtggaagaagatgtcagctcgccacctcaaaggtcctccgaaactatgcagctgaagaaggagatctccctgctgaatggggtcagcctggtggtgggcaacatgatcggctcagggatctttgtctcacccaagggtgtgctggtacacactgcctcctatgggatgtcactgattgtgtgggccattggtgggctcttctctgttgtgggtgccctttgttatgcagagctggggaccaccatcaccaagtcgggagccagctacgcttatattctagaggcctttgggggcttcattgccttcatccgcctgtgggtctcactgctagttgttgagcccaccggtcaggccatcatcgccatcacctttgccaactacatcatccagccgtccttccccagctgtgatcccccatacctggcctgccgtctcctggctgctgcttgcatatgtctgctgacatttgtgaactgtgcctatgtcaagtggggcacacgtgtgcaggacacgttcacttacgccaaggtcgtagcgctcattgccatcattgtcatgggccttgttaaactgtgccagggacactctgagcactttcaggacgcctttgagggttcctcctgggacatgggaaacctctctcttgccctctactctgccctcttctcttactcaggttgggacacccttaattttgtaacagaagaaatcaaaaacccagaaagaaatttgcccttggccattgggatttctatgccaattgtgacgctcatctacatcctgaccaatgtggcctattacacagtgctgaacatttcagatgtccttagcagtgatgctgtggctgtgacatttgctgaccagacgtttggcatgttcagctggaccatccccattgctgttgccctgtcctgctttgggggcctcaatgcatccatctttgcttcatcaaggttgttcttcgtgggctcccgggagggccacctaccggaccttctgtccatgatccacattgagcgttttacacctatccctgctttactgttcaattgcaccatggcactcatctacctcatcgtggaggatgttttccagcttatcaactacttcagcttcagctactggttcttcgtgggcctgtctgttgttggacagctctacctccgctggaaggagcccaagcggccccggcctctcaagctgagcgtgtttttccccatcgtgttctgcatatgctccgtgtttctggtgatagtgcccctcttcactgacaccattaattccctcattggcatcgggattgccctttctggagtccctttctacttcatgggtgtttacctgccagagtcccggaggccattgtttattcggaatgtcctggctgctatcaccagaggcacccagcagctttgcttttgtgtcctgactgagcttgatgtagccgaagaaaaaaaggatgagaggaaaactgactagaggtcagaggtggctttctgaggcctggaaggcaggccaaccagcaaaatcctgataacaagactctgtgggcccaactctcctgaattaaaggagccttttgacccaatcatatagtggggctcagggccagtgctcactcttattggtaagctataggagactcaggatctgggccaacctcaaggtgggggcttcagagggtggggggaagattggggaacggggggaatggtcatttagttttactcctgataggtagatgcagctcttacagatatttacttggtaaagtgcagtggggaagagggaatgctaggttgatagggctggtggcttctgaatttggtatttgaactaggagtccctatagaggggctgctttatgggaagtttttctctgaccaggtacaacacctgactttaaaggcctgaaatgctaccatttcttcctctggctcaaaattcttccctggggagagagttatattcccttatttattgatatttagtccagaacaccagttctaacgaagcatgcgtgtctcttcatctacaggatgcaataggctgattgtatttaaaaatcaaagtacccaaaactgagtccctttgggctcagaaatgtctgtggtattgggtcagactctgaccacagattttatgctgtttagcacaatttctattgagtcttacctgcaacaatgaaccttaaagatttttttactcacgtacctgttacactttagcatacagatagatcatagatcacgttacaagcacttggctcaggtccagcaaggacagatgaacaaattcctgagtcagaagtctgttaatattgctgttttgaaggacaatcctttattttacttgagaccttacatctttgttctagctgacagtaaatctctgggtttctgttacgaactctaagagggctgaaacttctgatattcaggtggatcacctgaattctctcagctgtcaatggcttggagaacatctcatgggcccaagtcatcaaataacctgttcctctctgtaagggcagtgtgagggactgctgtgcagacccaagcaatcccaacctggtgctaggtcatttcacttttctgaaaacctcacatcaggctgcatcctcttctgtccctggcaccaggctttgtttacacttggagccacttggtacttgtggggacttctgttttctccctgtggagatcagtgaagactgggaggaaagctgcttcaacctgagtccggctcttcagcaggctgcacaagtggaagcaactaattctggtgctcaggctgggctctccacccaagttaggcctgctctggcctaatggatcttactgtatgagcaggacggctgcattggattgtacaactgttttgtgatgcccccagacactgtcatcctaggccgagaagaacctgctagcttgacataccccatgggcttatccttaggttttggaattggtcaacagtgaggcagtctcccttcctgaccattcttctccacccagtcacagataagggaataaccttggccatatatttgctcaataaagattgaaggaagcatggtcatagttgccctgggttcagagcataatgcatatgtgaagcatggggtgacattcctactgtcatgggtttgggatttgtaacggcaaattcctgcccgacgacagggtgtcttatgcaaaggctgacttgcctgaacgctaagaacatgacttctgtctgagctaagctggcacccatcccagggctcctctggagctaatcctttaagcaaaatgtgcttgccttttaaagatccctgaccccagctttagctttctccaccagataaccagctaatcccaggaatttgctgccccccaccagtggcttctagggaaagcaaggacctcacatgccaggtgccctagtacttgcttagtgagccatgtcatcctcctttcatttttggatggtgacagcatttttcccctctgtgctggatacagacttctcccaggatcctctctttgggagcgaagccagaggatccctacagcactcaagcttcatggtggaattaatttctgccagctctttgttgtctgtctccttaaatccttttcctggtgtgcttattatcccttttgcagtgagtacagtttattaagttgtcagccctttaatattggggaaacttaatgagtataaatagcagggagcacattgtaacagcacagtgttttgtttttttcacccggttgctgtatgagaatggctttcaatcctttgtttctatgcctacagacagaaagcaagatgtctaatattagacatacaagttgctgcctgttataacggtgaattatacctttgtgcatgcctaggatgtttgttgttttaattagctgcaatatatacggcctgtgtacacagaatttaatcacttcggcaggttgaacaactccatgtagataagagcaagtgtaggcaaaggtttagaaaatggacataaagtcaaagaatgatggcaggtaggatgaaggagagatacttaggaaatcctaaaagaggcggcaagaaggtacctccctgtgtaactcaccttcccccatgacagtgagtaagagacactcacaggctatgagggtacacccctagctgaatgttctgtgttgtttccttagacctgtggtgtccgctgcaacagctactagccacgtgtagctaattacattaaaatgaaataaaattaaaagctcagtttctcagttgcgctaatcacatttcaagtgctcagcagccacccgtgtctactactacacagtgcagacacagaacatatcatcactgcagatagttctactggacaatgttacgctagaataaacaccaaggcagtcagttaaggcagctatggtttggaaaggcatacggacagagtctgcttagaagagatacaagttgttaataaaattgatcctgttgatagtagtttgtttttgtggtgggtgctgtgaagagtaaacattactcagtggaaagctaagttcagaaggtactttgtttttcctcccttgccttaagtccttggtatttataatcaatgctgaaccttctatttcactaccgctccctgttttagatattcagatttaaaaggttttcaaagaattactttcttccatgttcaaagctagattttactaaacacatgtatcacattcatatatattgtttcttggccccactgccaaaggaagtcagtcagtaatttcacaaccgttatcagagtttggaagcagaaatagctgttaactaaaatctcccactgctcagactactttctgccctaatggccattactatccagtctgtattgctacaagggacccactggtaccccttttagattctatcaaaaggaacagggttttcctagaggcaggcagcctggtggtatggcacagcagaagcttactgctaatgaaatgggaacctccccctcccttgtggtttcagcacagaacctgaatgccaggaaaaattcctgggccaagaagctaaagctaaagaaaccttccttttttcaacgtttttttttctttcaaactgtagggtcacttttgattgaggcaaaggggtcctactgtaagtggaaaagactcactcccctaacataagttttcactgtggtgggatggtgccgcccgatatgcttgatatgcttttccttccacatgttaagctaggaaacctaacaggatgtcagcagggcagttaactctggactcagagccctcaagggcatgtggcagaacctcatggacatcacaagaccatcagtctgaatccaggtcgtgggggctgtcatagccgaactccttctgcacatccagagggtacttgctccacatccgctgtctgctgctgcctctttcctcctcactcaggctgttgtagtcagcagagcctagaatgacatcccgggagtggattctaaatgtgattttcctaggctactgcaggagccccttctcttctcagaaaggtctgtttttgttcccgattgtaatgcaaaatccttgctcaataaataaaaaagaatatagaattcttttttttttaaagaaggaatcactttcctatcatctaaaccaagttccttcacactggagtattttgtcacttctcccctccgtggagtattttgtcacttctcccctccgtataggattttttgttgttgtaagagttgtagtcatattgtaaatatttttgtacctttctccttttaacgtgttattgacaaacctccccaaaagaatatgcaattgtttgattcatttctctgttatcagacaccaataaattctttttgttgggccttc

SEQ ID NO: 362156 - DNA, 1678 bp, Homo sapiens
tgagcatcctgttggcgccgttccactgggagagtttatgtggccgaggcagacaagtggaattaggccttgctgcaggggacttcatttccttctcagtactggacccatttatgaggaggtggcttatgaaagtgtgatgttcgcgtatttcttgacaggccacagcaaacacaggtgtgcaggaaccgtttgtcatggaagccagggagcctgggaggcccacacccacctaccatcttgtccctaacaccagccagtcccaggtggaagaagatgtcagctcgccacctcaaaggtcctccgaaactatgcagctgaagaaggagatctccctgctgaatggggtcagcctggtggtgggcaacatgatcggctcagggatctttgtctcacccaagggtgtgctggtacacactgcctcctatgggatgtcactgattgtgtgggccattggtgggctcttctctgttgtgggtgccctttgttatgcagagctggggaccaccatcaccaagtcgggagccagctacgcttatattctagaggcctttgggggcttcattgccttcatccgcctgtgggtctcactgctagttgttgagcccaccggtcaggccatcatcgccatcacctttgccaactacatcatccagccgtccttccccagctgtgatcccccatacctggcctgccgtctcctggctgctgcttgcatatgtctgctgacatttgtgaactgtgcctatgtcaagtggggcacacgtgtgcaggacacgttcacttacgccaaggtcgtagcgctcattgccatcattgtcatgggccttgttaaactgtgccagggacactctgagcactttcaggacgcctttgagggttcctcctgggacatgggaaacctctctcttgccctctactctgccctcttctcttactcaggttgggacacccttaattttgtaacagaagaaatcaaaaacccagaaagaaatttgcccttggccattgggatttctatgccaattgtgacgctcatctacatcctgaccaatgtggcctattacacagtgctgaacatttcagatgtccttagcagtgatgctgtggctgtgacatttgctgaccagacgtttggcatgttcagctggaccatccccattgctgttgccctgtcctgctttgggggcctcaatgcatccatctttgcttcatcaaggttgttcttcgtgggctcccgggagggccacctaccggaccttctgtccatgatccacattgagcgttttacacctatccctgctttactgttcaattgcaccatggcactcatctacctcatcgtggaggatgttttccagcttatcaactacttcagcttcagctactggttcttcgtgggcctgtctgttgttggacagctctacctccgctggaaggagcccaagcggccccggcctctcaagctgagcgtgtttttccccatcgtgttctgcatatgctccgtgtttctggtgatagtgcccctcttcactgacaccattaattccctcattggcatcgggattgccctttctggagtccctttctacttcatgggtgtttacctgccagagtcccggaggccatttagcggagaaaaagtttacacagggtggacgagatgaacggcaataga

SEQ ID NO: 362157 - DNA, 316 bp, Homo sapiens
tgcagaactgctagtctgttttctaaagtggctgcatagttttacgtttccatcagccgtgtaggaaatatgtggccttttgtaattggcttctttcacttagcataatatgttcaaggtttatccatgttgtggtatgtatcagtacttcattccttttaatggctgaataatgtcccattgcatggatataacacatttatccttcagaaagctttttatccaaaagtattcagtgaagcattagttataattttaaaaaattgaaaattaccttaatttttaacaaaaaagagtcgttaaattaggtacatct

SEQ ID NO: 362158 - DNA, 467 bp, Homo sapiens
gcataatggtttttaattgtttctattctatgtgcatttacatgcattctacaagtaacctttattatttacaaaatcagaacattttgatcaacaaagaaaatgactaaaatatccataatcaggacaattctaatgccatcagatacatctagtaacaagtgaaaggtgagggatctgtgaacacggcttaaccatgttaggcccattctagagagcaggtctgggtagcagagggcaggaacccagagtagattgaatcaggagctaaacagataatgtaaagccagaatattcttttcagaaacttataaattttacatgtgttaatttctaccaaatttttgatgtttgagactataacaggcataacttacattccaataaatactcacatcacagcaaattgatgtctacctgttgatgatcttaaaaacaaataatacaaggagagttttctattgaag

SEQ ID NO: 362159 - DNA, 425 bp, Homo sapiens
agaattgcttgaacccaggaggcggaggttgcagtgagctgagatggtgccactgtacttcagcctgggcgacaagagcaaaactccatctcaaaaataaataagaaaaataaataaataaatttcattcctctgcccactgccagtatccagccccgctgatgaggctggggtgaggtggggggtaactttttagcacctgggcccttacgtccagcagggctgtgaacagggactttttgtgccagtaacagtagaaaatacggcaactggtgtttgccactatcaaagaggaacttggagttttgttgaaggagcaaaattgtaaccacccaaggggttcaccttgcctgctgcctcgacagagccgattgatcaagacaggggaattgcaatagaagaagagtaattcacgcagagccggc

SEQ ID NO: 362160 - DNA, 521 bp, Homo sapiens
agccctgagccgatgctgcctctggccgccactcaccgtccgctcacgcccagggatgcaggcgatccccaacctggcagtgggtctgtctgttgccctgtgctgcgcggtgcactctctccccctcggatctccttgtggagggtgggttgctcctgctgcccctcccatcacccatctctctgagctgcattatttttagggttataggattttctgggtgtctgatgtcatcagcaacccctactgttcgccagaactttcatgggcacgagcattcacacacacacacactcctcctcaatttctaacgctgaaaccatggtttttttttttttttttgagacagagtctcgctctgtcacccaggctggagtgcagtggtgtgatctcggctcactgcaacctccacctcccgggttcaagtgattctcctgcctcagcctcccgagtagctgggactacagcttacgcagcccagtcccatgtcccgccatccctcaccattgtcgagggtgacc

SEQ ID NO: 362161 - DNA, 367 bp, Homo sapiens
gattcttccccgacagagtcaccctgggattcctcagagcaagtgctccggtcgcattccagatcatccactggcaaaagcatcacttcttacacgtggttttcagggaagtacctaatgcagaacgcaagggtggggtggcaggagcgaggcttgcagcctctacctccttggttcaagtgattctcctgcctcagtctcccaagtagctgggattacaggcacccaccaccacgcccggctagtttttgtatttttagtagagacggggtttcgccatgttggccaggctggtctcgaactcctgacctcaagtgatctgcccaccttggcctcccaaagtgctgggattacaggcatgagccac

SEQ ID NO: 362162 - DNA, 501 bp, Homo sapiens
tcgcttgttggtcgtctctcaggatcccattttatctgaaggctgctgcaggagagttcgcagatgatccctgctcttctgtgaagcgaggcaacatggttcgggcagctcgagctttgctctctgctgttacccggttgctgattttggctgacatggcagatgtctacaaattacttgttcagctgaaagttgtggaagatggtatcttgaagttgaggaatgctggcaatgaacaagacttaggaatccagtataaagccctaaaacctgaagtggataagctgaacattatggcagccttcagataaaatgggctgctatgattcatttttataagaaactatcaaactgttttccaaagtggctgtaccattttgaattcccgctatgagtatcccagcgtgccttgcatattcacaaccttgaggtaatggcagttttgtggatctgggccagtctggtggggcagcattcagataaaaggggatccttagagtc

SEQ ID NO: 362163 - DNA, 539 bp, Homo sapiens
gtgggataaagcaccatgctttgtaacagcatcggggtcgttgcaggaccccctgattacaataaagcgagaaagaagaactcctgacttaaaaacatgatattccttcagtgtaggaagcagcagtgaggttgtaataaaggctgcattcaagaagacccatctgaacagctggacgtaaagaaagaagtgatgcactcaattctgcaatagataaaatgaccaagaagaccagggacttgcgtagacagctccgcaaagctgtcatggaccacgtttcagattctttcctggaaaccaatgttccacttttggtattgattgaagctgcaaagaatggaaatgagaaagaagttaaggagtatgcccaagttttccgtgaacatgccaacaaattgattgaggttaagtgaattagcagtttcattgacttgtaggcaacttggtgaagtgtggtgagttttaatcacattatttaatcagttaaaatttgtaagggctcgcttaacatacaacatgtctgagatgatagtctttca

SEQ ID NO: 362164 - DNA, 441 bp, Homo sapiens
ggcatggtggcatgttgcctctaatcccagccacttgggaggctgaggcaggtgaatctcttgaacccgggaggcggaggttgcattgattccaagatcacgccactgcactccagcctgggtgacagagcgagactctgtctcaaaggaaaaaaaaaaacaatcatgtcttacaaagaaatagtgaattgactcagtgatagcaattgagccccacacacagtgaaaccagcccaggcctgctgtgggccaggcagcccagcgtgtgcaccagtgaagcagaggctcgagacaaatgctgagtgattttgactttattcaccatactgttcagaacactgcacattaaaatccagaattctgggcctccgtgcacctggccaagaggctcagggtggctgggggctggtggcccagagatgtgtctgacctgtgatcttt

SEQ ID NO: 362165 - DNA, 803 bp, Homo sapiens
tttcttttttctttttttgcagattgctgatttggtcaagatgtaaacatatcgtagagctccagcatgggggctcacgcctgtaatacaaacactttggaaggccaaggtgggagaatcactcaagcccaggagtttaagatcaacctgggcaacaaaggctaccacataaagaatatgacattattaaattcccctgcagttacacagagcagtggctctacagtttcttgttggctgaattaagcatttaaagaaatgtttaagtatttaatacaacatcttcaggtatttgaactaagagagtttcttgggaaatgtgctatttgatagattgagaagtctcccagtgctgttttgctttgtttcatcactcactatttaaatgttaattacaaaaataatacatactcactggaagaaaaatcaaacaaactcaaagcacagaaaaattttaaagcctccttgctcttggtggctttctttctcccaccaatttttggtgacttcaatttttgtgttagaccatttatgttcaaagcatccacatgaaacttaccctctataaggtgctgtgagcaccacagacttgaataccagttcccatgctcaagaagccttcaatcttgttgaggagatagatgaaagaactggcttacaacagagaagtagatgtattaaagagtcagttttcccagcactctgggaggctgaggcaggtggatcacctgaggtctggagttcgagaccagcctgaccaacatggagaaaccccatctctactaaaaatacaaaattagccg

SEQ ID NO: 362166 - DNA, 457 bp, Homo sapiens
agattccgtgggtgtaggaccctctgagccaggtgtgggatatagtctcgtggtgcgccgttttttaagccggtctgaaaagcgcaatattcgggtgggagtgacccgattttcccagattgctgatttggtcaagatgtaaacatatcgtagagctccagcatgggggctcacgcctgtaatacaaacactttggaaggccaaggtgggagaatcactcaagcccaggagtttaagatcaacctgggcaacaaagtaagaccctgtctctacaaaacaataaaaagtaaaaactagccaggcatggagcatatgcctgtggtctcagctagacaggaggctgaggcaggagactgagtctgcagtaagccgtgtttgcaccactgcactctaggcttgggtgatacagcaagatctgtctcaaaaaataaaacaaaaagtacatacattgtaacta

SEQ ID NO: 362167 - DNA, 3765 bp, Homo sapiens
cggcccatttcctcctcctagccggactggagggagacaaagcagcgcccgtctgcttcgggcctctggaatttagcgctcgcccagctagccgcagaaatgactgctgtccatgcaggcaacataaacttcaagtgggatcctaaaagtctagagatcaggactctggcagttgagagactgttggagcctcttgttacacaggttacaacccttgtaaacaccaatagtaaagggccctctaataagaagagaggtcgttctaagaaggcccatgttttggctgcatctgttgaacaagcaactgagaatttcttggagaagggggataaaattgcgaaggagagccagtttctcaaggaggagcttgtggctgctgtagaagatgttcgaaaacaaggtgatttgatgaaggctgctgcaggagagttcgcagatgatccctgctcttctgtgaagcgaggcaacatggttcgggcagctcgagctttgctctctgctgttacccggttgctgattttggctgacatggcagatgtctacaaattacttgttcagctgaaagttgtggaagatggtatcttgaagttgaggaatgctggcaatgaacaagacttaggaatccagtataaagccctaaaacctgaagtggataagctgaacattatggcagccaaaagacaacaggaattgaaagatgttggccatcgtgatcagatggctgcagctagaggaatcctgcagaagaacgttccgatcctctatactgcatcccaggcatgcctacagcaccctgatgtcgcagcctataaggccaacagggacctgatatacaagcagctgcagcaggcggtcacaggcatttccaatgcagcccaggccactgcctcagacgatgcctcacagcaccagggtggaggaggaggagaactggcatatgcactcaataactttgacaaacaaatcattgtggaccccttgagcttcagcgaggagcgctttaggccttccctggaggagcgtctggaaagcatcattagtggggctgccttgatggccgactcgtcctgcacgcgtgatgaccgtcgtgagcgaattgtggcagagtgtaatgctgtccgccaggccctgcaggacctgctttcggagtacatgggcaatgctggacgtaaagaaagaagtgatgcactcaattctgcaatagataaaatgaccaagaagaccagggacttgcgtagacagctccgcaaagctgtcatggaccacgtttcagattctttcctggaaaccaatgttccacttttggtattgattgaagctgcaaagaatggaaatgagaaagaagttaaggagtatgcccaagttttccgtgaacatgccaacaaattgattgaggttgccaacttggcctgttccatctcaaataatgaagaaggtgtaaagcttgttcgaatgtctgcaagccagttagaagccctctgtcctcaggttattaatgctgcactggctttagcagcaaaaccacagagtaaactggcccaagagaacatggatctttttaaagaacaatgggaaaaacaagtccgtgttctcacagatgctgtcgatgacattacttccattgatgacttcttggctgtctcagagaatcacattttggaagatgtgaacaaatgtgtcattgctctccaagagaaggatgtggatggcctggaccgcacagctggtgcaattcgaggccgggcagcccgggtcattcacgtagtcacctcagagatggacaactatgagccaggagtctacacagagaaggttctggaagccactaagctgctctccaacacagtcatgccacgttttactgagcaagtagaagcagccgtggaagccctcagctcggaccctgcccagcccatggatgagaatgagtttatcgatgcttcccgcctggtatatgatggcatccgggacatcaggaaagcagtgctgatgataaggacccctgaggagttggatgactctgactttgagacagaagattttgatgtcagaagcaggacgagcgtccagacagaagacgatcagctgatagctggccagagtgcccgggcgatcatggctcagcttccccaggagcaaaaagcgaagattgcggaacaggtggccagcttccaggaagaaaagagcaagctggatgctgaagtgtccaaatgggacgacagtggcaatgacatcattgtgctggccaagcagatgtgcatgattatgatggagatgacagactttacccgaggtaaaggaccactcaaaaatacatcggatgtcatcagtgctgccaagaaaattgctgaggcaggatccaggatggacaagcttggccgcaccattgcagaccattgccccgactcggcttgcaagcaggacctgctggcctacctgcaacgcatcgccctctactgccaccagctgaacatctgcagcaaggtcaaggccgaggtgcagaatctcggcggggagcttgttgtctctggggtggacagcgccatgtccctgatccaggcagccaagaacttgatgaatgctgtggtgcagacagtgaaggcatcctacgtcgcctctaccaaataccaaaagtcacagggtatggcttccctcaaccttcctgctgtgtcatggaagatgaaggcaccagagaaaaagccattggtgaagagagagaaacaggatgagacacagaccaagattaaacgggcatctcagaagaagcacgtgaacccggtgcaggccctcagcgagttcaaagctatggacagcatctaagtctgcccaggccggccgcccccacccctcggggctcctgaatatcagtcactgttcgtcactcaaatgaatttgctaaatacaacactgatactagattccacagggaaatgggcagactgaaccagtccaggtggtgaattttccaagaacatagtttaagttgattaaaaatgcttttagaatgcaggagcctacttctagctgtattttttgtatgcttaaataaaaataaaaattcataaccaaagagaatcccacattagcttgttagtaatgctctgaccaagccgagatgcccattctcttagtgatggcggcgttagggtttgagagaagggaatttggctcaacttcagttgagagggtgcagtccagacagcttgactgcttttaaatgaccaaagatgacctgtggtaagcaacctgggcatcttaggaagcagtccctggagaaggcatgttcccagaaaggtctctggagggacaaactcactcagtaaaacataatgtatcatgaagaaaactgattctctatgacatgaaatgaaaattttaatgcattgttataattactaatgtacgctgctgcaggacattaataaagttgcttttttaggctacagtgtctcgatgccataatcagaacacactttttttcctctttctcccagcttcaaatgcaaattcatcattgggctcacttctaataactgcagtgtttcccgccttgggcttgcagcagaaaaacctgacaacatagtgtttgctaaggcagtaatttagactttaccttatttgtgattactgtagtgattgattgattgattactattaactacaaggtataatttactatcaccttatttaaattttatgaattaatttgaatgttttttacactaactaacttttcccaataaagtccactatgaaaccacgaca

SEQ ID NO: 362168 - DNA, 3789 bp, Homo sapiens
cggcccatttcctcctcctagccggactggagggagacaaagcagcgcccgtctgcttcgggcctctggaatttagcgctcgcccagctagccgcagaaatgactgctgtccatgcaggcaacataaacttcaagtgggatcctaaaagtctagagatcaggactctggcagttgagagactgttggagcctcttgttacacaggttacaacccttgtaaacaccaatagtaaagggccctctaataagaagagaggtcgttctaagaaggcccatgttttggctgcatctgttgaacaagcaactgagaatttcttggagaagggggataaaattgcgaaggagagccagtttctcaaggaggagcttgtggctgctgtagaagatgttcgaaaacaaggtgatttgatgaaggctgctgcaggagagttcgcagatgatccctgctcttctgtgaagcgaggcaacatggttcgggcagctcgagctttgctctctgctgttacccggttgctgattttggctgacatggcagatgtctacaaattacttgttcagctgaaagttgtggaagatggtatcttgaagttgaggaatgctggcaatgaacaagacttaggaatccagtataaagccctaaaacctgaagtggataagctgaacattatggcagccaaaagacaacaggaattgaaagatgttggccatcgtgatcagatggctgcagctagaggaatcctgcagaagaacgttccgatcctctatactgcatcccaggcatgcctacagcaccctgatgtcgcagcctataaggccaacagggacctgatatacaagcagctgcagcaggcggtcacaggcatttccaatgcagcccaggccactgcctcagacgatgcctcacagcaccagggtggaggaggaggagaactggcatatgcactcaataactttgacaaacaaatcattgtggaccccttgagcttcagcgaggagcgctttaggccttccctggaggagcgtctggaaagcatcattagtggggctgccttgatggccgactcgtcctgcacgcgtgatgaccgtcgtgagcgaattgtggcagagtgtaatgctgtccgccaggccctgcaggacctgctttcggagtacatgggcaatgctggacgtaaagaaagaagtgatgcactcaattctgcaatagataaaatgaccaagaagaccagggacttgcgtagacagctccgcaaagctgtcatggaccacgtttcagattctttcctggaaaccaatgttccacttttggtattgattgaagctgcaaagaatggaaatgagaaagaagttaaggagtatgcccaagttttccgtgaacatgccaacaaattgattgaggttgccaacttggcctgttccatctcaaataatgaagaaggtgtaaagcttgttcgaatgtctgcaagccagttagaagccctctgtcctcaggttattaatgctgcactggctttagcagcaaaaccacagagtaaactggcccaagagaacatggatctttttaaagaacaatgggaaaaacaagtccgtgttctcacagatgctgtcgatgacattacttccattgatgacttcttggctgtctcagagaatcacattttggaagatgtgaacaaatgtgtcattgctctccaagagaaggatgtggatggcctggaccgcacagctggtgcaattcgaggccgggcagcccgggtcattcacgtagtcacctcagagatggacaactatgagccaggagtctacacagagaaggttctggaagccactaagctgctctccaacacagtcatgccacgttttactgagcaagtagaagcagccgtggaagccctcagctcggaccctgcccagcccatggatgagaatgagtttatcgatgcttcccgcctggtatatgatggcatccgggacatcaggaaagcagtgctgatgataaggacccctgaggagttggatgactctgactttgagacagaagattttgatgtcagaagcaggacgagcgtccagacagaagacgatcagctgatagctggccagagtgcccgggcgatcatggctcagcttccccaggagcaaaaagcgaagattgcggaacaggtggccagcttccaggaagaaaagagcaagctggatgctgaagtgtccaaatgggacgacagtggcaatgacatcattgtgctggccaagcagatgtgcatgattatgatggagatgacagactttacccgaggtaaaggaccactcaaaaatacatcggatgtcatcagtgctgccaagaaaattgctgaggcaggatccaggatggacaagcttggccgcaccattgcagaccattgccccgactcggcttgcaagcaggacctgctggcctacctgcaacgcatcgccctctactgccaccagctgaacatctgcagcaaggtcaaggccgaggtgcagaatctcggcggggagcttgttgtctctggggtggacagcgccatgtccctgatccaggcagccaagaacttgatgaatgctgtggtgcagacagtgaaggcatcctacgtcgcctctaccaaataccaaaagtcacagggtatggcttccctcaaccttcctgctgtgtcatggaagatgaaggcaccagagaaaaagccattggtgaagagagagaaacaggatgagacacagaccaagattaaacgggcatctcagaagaagcacgtgaacccggtgcaggccctcagcgagttcaaagctatggacagcatctaagtctgcccaggccggccgcccccacccctcggggctcctgaatatcagtcactgttcgtcactcaaatgaatttgctaaatacaacactgatactagattccacagggaaatgggcagactgaaccagtccaggtggtgaattttccaagaacatagtttaagttgattaaaaatgcttttagaatgcaggagcctacttctagctgtattttttgtatgcttaaataaaaataaaaattcataaccaaagagaatcccacattagcttgttagtaatgctctgaccaagccgagatgcccattctcttagtgatggcggcgttagggtttgagagaagggaatttggctcaacttcagttgagagggtgcagtccagacagcttgactgcttttaaatgaccaaagatgacctgtggtaagcaacctgggcatcttaggaagcagtccctggagaaggcatgttcccagaaaggtctctggagggacaaactcactcagtaaaacataatgtatcatgaagaaaactgattctctatgacatgaaatgaaaattttaatgcattgttataattactaatgtacgctgctgcaggacattaataaagttgcttttttaggctacagtgtctcgatgccataatcagaacacactttttttcctctttctcccagcttcaaatgcaaattcatcattgggctcacttctaataactgcagtgtttcccgccttgggcttgcagcagaaaaacctgacaacatagtgtttgctaaggcagtaatttagactttaccttatttgtgattactgtagtgattgattgattgattactattaactacaaggtataatttactatcaccttatttaaattttatgaattaatttgaatgttttttacactaactaacttttcccaataaagtccactatgaaaccacgacaaaaaaacgtaatcaactcaaaact

SEQ ID NO: 362169 - DNA, 3800 bp, Homo sapiens
cggcccatttcctcctcctagccggactggagggagacaaagcagcgcccgtctgcttcgggcctctggaatttagcgctcgcccagctagccgcagaaatgactgctgtccatgcaggcaacataaacttcaagtgggatcctaaaagtctagagatcaggactctggcagttgagagactgttggagcctcttgttacacaggttacaacccttgtaaacaccaatagtaaagggccctctaataagaagagaggtcgttctaagaaggcccatgttttggctgcatctgttgaacaagcaactgagaatttcttggagaagggggataaaattgcgaaggagagccagtttctcaaggaggagcttgtggctgctgtagaagatgttcgaaaacaaggtgatttgatgaaggctgctgcaggagagttcgcagatgatccctgctcttctgtgaagcgaggcaacatggttcgggcagctcgagctttgctctctgctgttacccggttgctgattttggctgacatggcagatgtctacaaattacttgttcagctgaaagttgtggaagatggtatcttgaagttgaggaatgctggcaatgaacaagacttaggaatccagtataaagccctaaaacctgaagtggataagctgaacattatggcagccaaaagacaacaggaattgaaagatgttggccatcgtgatcagatggctgcagctagaggaatcctgcagaagaacgttccgatcctctatactgcatcccaggcatgcctacagcaccctgatgtcgcagcctataaggccaacagggacctgatatacaagcagctgcagcaggcggtcacaggcatttccaatgcagcccaggccactgcctcagacgatgcctcacagcaccagggtggaggaggaggagaactggcatatgcactcaataactttgacaaacaaatcattgtggaccccttgagcttcagcgaggagcgctttaggccttccctggaggagcgtctggaaagcatcattagtggggctgccttgatggccgactcgtcctgcacgcgtgatgaccgtcgtgagcgaattgtggcagagtgtaatgctgtccgccaggccctgcaggacctgctttcggagtacatgggcaatgctggacgtaaagaaagaagtgatgcactcaattctgcaatagataaaatgaccaagaagaccagggacttgcgtagacagctccgcaaagctgtcatggaccacgtttcagattctttcctggaaaccaatgttccacttttggtattgattgaagctgcaaagaatggaaatgagaaagaagttaaggagtatgcccaagttttccgtgaacatgccaacaaattgattgaggttgccaacttggcctgttccatctcaaataatgaagaaggtgtaaagcttgttcgaatgtctgcaagccagttagaagccctctgtcctcaggttattaatgctgcactggctttagcagcaaaaccacagagtaaactggcccaagagaacatggatctttttaaagaacaatgggaaaaacaagtccgtgttctcacagatgctgtcgatgacattacttccattgatgacttcttggctgtctcagagaatcacattttggaagatgtgaacaaatgtgtcattgctctccaagagaaggatgtggatggcctggaccgcacagctggtgcaattcgaggccgggcagcccgggtcattcacgtagtcacctcagagatggacaactatgagccaggagtctacacagagaaggttctggaagccactaagctgctctccaacacagtcatgccacgttttactgagcaagtagaagcagccgtggaagccctcagctcggaccctgcccagcccatggatgagaatgagtttatcgatgcttcccgcctggtatatgatggcatccgggacatcaggaaagcagtgctgatgataaggacccctgaggagttggatgactctgactttgagacagaagattttgatgtcagaagcaggacgagcgtccagacagaagacgatcagctgatagctggccagagtgcccgggcgatcatggctcagcttccccaggagcaaaaagcgaagattgcggaacaggtggccagcttccaggaagaaaagagcaagctggatgctgaagtgtccaaatgggacgacagtggcaatgacatcattgtgctggccaagcagatgtgcatgattatgatggagatgacagactttacccgaggtaaaggaccactcaaaaatacatcggatgtcatcagtgctgccaagaaaattgctgaggcaggatccaggatggacaagcttggccgcaccattgcagaccattgccccgactcggcttgcaagcaggacctgctggcctacctgcaacgcatcgccctctactgccaccagctgaacatctgcagcaaggtcaaggccgaggtgcagaatctcggcggggagcttgttgtctctggggtggacagcgccatgtccctgatccaggcagccaagaacttgatgaatgctgtggtgcagacagtgaaggcatcctacgtcgcctctaccaaataccaaaagtcacagggtatggcttccctcaaccttcctgctgtgtcatggaagatgaaggcaccagagaaaaagccattggtgaagagagagaaacaggatgagacacagaccaagattaaacgggcatctcagaagaagcacgtgaacccggtgcaggccctcagcgagttcaaagctatggacagcatctaagtctgcccaggccggccgcccccacccctcggggctcctgaatatcagtcactgttcgtcactcaaatgaatttgctaaatacaacactgatactagattccacagggaaatgggcagactgaaccagtccaggtggtgaattttccaagaacatagtttaagttgattaaaaatgcttttagaatgcaggagcctacttctagctgtattttttgtatgcttaaataaaaataaaaattcataaccaaagagaatcccacattagcttgttagtaatgctctgaccaagccgagatgcccattctcttagtgatggcggcgttagggtttgagagaagggaatttggctcaacttcagttgagagggtgcagtccagacagcttgactgcttttaaatgaccaaagatgacctgtggtaagcaacctgggcatcttaggaagcagtccctggagaaggcatgttcccagaaaggtctctggagggacaaactcactcagtaaaacataatgtatcatgaagaaaactgattctctatgacatgaaatgaaaattttaatgcattgttataattactaatgtacgctgctgcaggacattaataaagttgcttttttaggctacagtgtctcgatgccataatcagaacacactttttttcctctttctcccagcttcaaatgcaaattcatcattgggctcacttctaataactgcagtgtttcccgccttgggcttgcagcagaaaaacctgacaacatagtgtttgctaaggcagtaatttagactttaccttatttgtgattactgtagtgattgattgattgattactattaactacaaggtataatttactatcaccttatttaaattttatgaattaatttgaatgttttttacactaactaacttttcccaataaagtccactatgaaaccacgacaaaaaaattgtgttctgattatggcatcggtccgcc

SEQ ID NO: 362170 - DNA, 6087 bp, Homo sapiens
  misc_feature (4472)..(4472): n is a, c, g, or t
  misc_feature (4519)..(4519): n is a, c, g, or t
cggcccatttcctcctcctagccggactggagggagacaaagcagcgcccgtctgcttcgggcctctggaatttagcgctcgcccagctagccgcagaaatgactgctgtccatgcaggcaacataaacttcaagtgggatcctaaaagtctagagatcaggactctggcagttgagagactgttggagcctcttgttacacaggttacaacccttgtaaacaccaatagtaaagggccctctaataagaagagaggtcgttctaagaaggcccatgttttggctgcatctgttgaacaagcaactgagaatttcttggagaagggggataaaattgcgaaggagagccagtttctcaaggaggagcttgtggctgctgtagaagatgttcgaaaacaaggtgatttgatgaaggctgctgcaggagagttcgcagatgatccctgctcttctgtgaagcgaggcaacatggttcgggcagctcgagctttgctctctgctgttacccggttgctgattttggctgacatggcagatgtctacaaattacttgttcagctgaaagttgtggaagatggtatcttgaagttgaggaatgctggcaatgaacaagacttaggaatccagtataaagccctaaaacctgaagtggataagctgaacattatggcagccaaaagacaacaggaattgaaagatgttggccatcgtgatcagatggctgcagctagaggaatcctgcagaagaacgttccgatcctctatactgcatcccaggcatgcctacagcaccctgatgtcgcagcctataaggccaacagggacctgatatacaagcagctgcagcaggcggtcacaggcatttccaatgcagcccaggccactgcctcagacgatgcctcacagcaccagggtggaggaggaggagaactggcatatgcactcaataactttgacaaacaaatcattgtggaccccttgagcttcagcgaggagcgctttaggccttccctggaggagcgtctggaaagcatcattagtggggctgccttgatggccgactcgtcctgcacgcgtgatgaccgtcgtgagcgaattgtggcagagtgtaatgctgtccgccaggccctgcaggacctgctttcggagtacatgggcaatgctggacgtaaagaaagaagtgatgcactcaattctgcaatagataaaatgaccaagaagaccagggacttgcgtagacagctccgcaaagctgtcatggaccacgtttcagattctttcctggaaaccaatgttccacttttggtattgattgaagctgcaaagaatggaaatgagaaagaagttaaggagtatgcccaagttttccgtgaacatgccaacaaattgattgaggttgccaacttggcctgttccatctcaaataatgaagaaggtgtaaagcttgttcgaatgtctgcaagccagttagaagccctctgtcctcaggttattaatgctgcactggctttagcagcaaaaccacagagtaaactggcccaagagaacatggatctttttaaagaacaatgggaaaaacaagtccgtgttctcacagatgctgtcgatgacattacttccattgatgacttcttggctgtctcagagaatcacattttggaagatgtgaacaaatgtgtcattgctctccaagagaaggatgtggatggcctggaccgcacagctggtgcaattcgaggccgggcagcccgggtcattcacgtagtcacctcagagatggacaactatgagccaggagtctacacagagaaggttctggaagccactaagctgctctccaacacagtcatgccacgttttactgagcaagtagaagcagccgtggaagccctcagctcggaccctgcccagcccatggatgagaatgagtttatcgatgcttcccgcctggtatatgatggcatccgggacatcaggaaagcagtgctgatgataaggacccctgaggagttggatgactctgactttgagacagaagattttgatgtcagaagcaggacgagcgtccagacagaagacgatcagctgatagctggccagagtgcccgggcgatcatggctcagcttccccaggagcaaaaagcgaagattgcggaacaggtggccagcttccaggaagaaaagagcaagctggatgctgaagtgtccaaatgggacgacagtggcaatgacatcattgtgctggccaagcagatgtgcatgattatgatggagatgacagactttacccgaggtaaaggaccactcaaaaatacatcggatgtcatcagtgctgccaagaaaattgctgaggcaggatccaggatggacaagcttggccgcaccattgcagaccattgccccgactcggcttgcaagcaggacctgctggcctacctgcaacgcatcgccctctactgccaccagctgaacatctgcagcaaggtcaaggccgaggtgcagaatctcggcggggagcttgttgtctctggggtggacagcgccatgtccctgatccaggcagccaagaacttgatgaatgctgtggtgcagacagtgaaggcatcctacgtcgcctctaccaaataccaaaagtcacagggtatggcttccctcaaccttcctgctgtgtcatggaagatgaaggcaccagagaaaaagccattggtgaagagagagaaacaggatgagacacagaccaagattaaacgggcatctcagaagaagcacgtgaacccggtgcaggccctcagcgagttcaaagctatggacagcatctaagtctgcccaggccggccgcccccacccctcggggctcctgaatatcagtcactgttcgtcactcaaatgaatttgctaaatacaacactgatactagattccacagggaaatgggcagactgaaccagtccaggtggtgaattttccaagaacatagtttaagttgattaaaaatgcttttagaatgcaggagcctacttctagctgtattttttgtatgcttaaataaaaataaaaattcataaccaaagagaatcccacattagcttgttagtaatgctctgaccaagccgagatgcccattctcttagtgatggcggcgttagggtttgagagaagggaatttggctcaacttcagttgagagggtgcagtccagacagcttgactgcttttaaatgaccaaagatgacctgtggtaagcaacctgggcatcttaggaagcagtccctggagaaggcatgttcccagaaaggtctctggagggacaaactcactcagtaaaacataatgtatcatgaagaaaactgattctctatgacatgaaatgaaaattttaatgcattgttataattactaatgtacgctgctgcaggacattaataaagttgcttttttaggctacagtgtctcgatgccataatcagaacacactttttttcctctttctcccagcttcaaatgcaaattcatcattgggctcacttctaataactgcagtgtttcccgccttgggcttgcagcagagtgattactgtagtgattgattgattgattactattaactacaaggtataatttactatcaccttatttaaattttatgaattaatttgaatgttttttacactaactaacttttcccaataaagtccactatgaaaccacgacatccaagagcccaaagtcgtcttctctgccttcaagtcatagatttgcccgcagtatctgtggtgctctgggccctcccggtgtccgtctcttccaggatggggatgcccgggagggaaactgtctgtggctctaggctgcacggctcgtgccaacccatcagggagggccatgcccgttgtcctattgagtgccccaccctgcacccccaccttgggaattcacatgtccattccttgaggttcatgtcaacctcggaggcatccctgtcttcattatagctgacccctctcctgcgtccttctgtcagcatatcccttctgcatccttcccgtcacacatacataccaagctatgatgattgattgatagtggccttcgagatgaaaaccatccttaaccccatgatccttcccagctggcatccccaccctaagcaaggttccctaaagagaagcttgttgacattttctccccttcctcacttacagtcagctgtcaccttgctccctccacctcccctcgtcaaggtgactgccttccactgccagccacactggcaattgtcttgagacctcaccgtgcaagcggcctgggggcgtggcggggaggaggaggaggacaaggactcctgaacgctgctcactcggcttccaggacaccccgctcaggttctgcctgccttactgggggctccttctcctttcctggggctgagaggttgtgtctgtgcccactctcctgagctcagccagaatctcncatgtaaagacatccaaatgccgacttcttctccccagagcctggcntttataactgactgccgcctcacgctccattcggatgtctaatgaatctctcagacttgacctgtccaaactgcttgccacctctactcgccaccgcccacccccacaccctccataccgttttccccacgtcactgcccctcccccccttcctcttgccaaatgcctaaaaataaaaattctgaggtggatctgtagcacaatgggcttctagtgacaaatcaaaattctgatctttaaaatgtatgcacaatttacctgttaccgcctggcctaagccatcctgctgttactgctgtgtagcaagttgcagccaaagcgacctcacacggctcctgaaggtcaagaatctgggagcagctcagctggatggctgtgactcggggtctcatgaagtggccaagatgccagctaaggctgccgtctctgaaggcttgacctggcgaggatttgcttccagactcactcgcgtggctattgacagaaggctcagttccatgccacatggcccgttccacagagcagctcacagcttggtagtagctggcttccccagagcggtatctgcgagcagcgtccagatggaagccatggtgttcccttaaaacctgatatggagggtgattccccatcatgtctgtattctgtgggtcacacagaccaaggccggtccactgtggaaggcaaggacgaggttgccagtgcccggcggtgggtggccacagccagcctccctgccagtgtcccccacagacaagttgtccctgtaagacaggtcagctcaggtcattccgagctcagaccttccaacggcgtccatgtccctcagtaaaagccagagtcctaaaggcctcttgcctgctctggcctcctctcaccattctctgccatcctccatctgcccctggtgtccctgaagtcttgaacatgccgagcacatcctgcctcgtatgcttcctggcctggaatgcacttgccccgggacaccctgtgctggctttagtgtttccttcctgtctcctcaagtcaccttattatcaaaaggactccgacaggctaagtgtggtggctcatgcctgtagtcccagcactcgggaaggccgaggtgggaggatcgcttgagcccaggagttcaggacctgcctgggcaacatggcaaaactttgtctctcttaaaaaaaaaaaaaaaaaaaaaaaaaaagagagaatttggggggggattgggcttggaaaggtttctataacacccattccggttggggcgcgcggggcgccatatgtggttcacgtgggaccctgtgggcaaatcagggtgtggccccaaggagaaactccggggcacgtggactagagggcctggggtttttcaccaaattaaaaaaaacgggcccggggggggggaaacacgcgaagcgcggttccgggaacacaaacctccccagagaaagtggaggtccacaggaggggccacaaaacccgcggggcctcctattcacacacgggggaggtccccaacagaagaagctctcaaattttccacaatttaacccccacaccggcggtgggga

SEQ ID NO: 362171 - DNA, 3836 bp, Homo sapiens
cggcccatttcctcctcctagccggactggagggagacaaagcagcgcccgtctgcttcgggcctctggaatttagcgctcgcccagctagccgcagaaatgactgctgtccatgcaggcaacataaacttcaagtgggatcctaaaagtctagagatcaggactctggcagttgagagactgttggagcctcttgttacacaggttacaacccttgtaaacaccaatagtaaagggccctctaataagaagagaggtcgttctaagaaggcccatgttttggctgcatctgttgaacaagcaactgagaatttcttggagaagggggataaaattgcgaaggagagccagtttctcaaggaggagcttgtggctgctgtagaagatgttcgaaaacaaggtgatttgatgaaggctgctgcaggagagttcgcagatgatccctgctcttctgtgaagcgaggcaacatggttcgggcagctcgagctttgctctctgctgttacccggttgctgattttggctgacatggcagatgtctacaaattacttgttcagctgaaagttgtggaagatggtatcttgaagttgaggaatgctggcaatgaacaagacttaggaatccagtataaagccctaaaacctgaagtggataagctgaacattatggcagccaaaagacaacaggaattgaaagatgttggccatcgtgatcagatggctgcagctagaggaatcctgcagaagaacgttccgatcctctatactgcatcccaggcatgcctacagcaccctgatgtcgcagcctataaggccaacagggacctgatatacaagcagctgcagcaggcggtcacaggcatttccaatgcagcccaggccactgcctcagacgatgcctcacagcaccagggtggaggaggaggagaactggcatatgcactcaataactttgacaaacaaatcattgtggaccccttgagcttcagcgaggagcgctttaggccttccctggaggagcgtctggaaagcatcattagtggggctgccttgatggccgactcgtcctgcacgcgtgatgaccgtcgtgagcgaattgtggcagagtgtaatgctgtccgccaggccctgcaggacctgctttcggagtacatgggcaatgctggacgtaaagaaagaagtgatgcactcaattctgcaatagataaaatgaccaagaagaccagggacttgcgtagacagctccgcaaagctgtcatggaccacgtttcagattctttcctggaaaccaatgttccacttttggtattgattgaagctgcaaagaatggaaatgagaaagaagttaaggagtatgcccaagttttccgtgaacatgccaacaaattgattgaggttgccaacttggcctgttccatctcaaataatgaagaaggtgtaaagcttgttcgaatgtctgcaagccagttagaagccctctgtcctcaggttattaatgctgcactggctttagcagcaaaaccacagagtaaactggcccaagagaacatggatctttttaaagaacaatgggaaaaacaagtccgtgttctcacagatgctgtcgatgacattacttccattgatgacttcttggctgtctcagagaatcacattttggaagatgtgaacaaatgtgtcattgctctccaagagaaggatgtggatggcctggaccgcacagctggtgcaattcgaggccgggcagcccgggtcattcacgtagtcacctcagagatggacaactatgagccaggagtctacacagagaaggttctggaagccactaagctgctctccaacacagtcatgccacgttttactgagcaagtagaagcagccgtggaagccctcagctcggaccctgcccagcccatggatgagaatgagtttatcgatgcttcccgcctggtatatgatggcatccgggacatcaggaaagcagtgctgatgataaggacccctgaggagttggatgactctgactttgagacagaagattttgatgtcagaagcaggacgagcgtccagacagaagacgatcagctgatagctggccagagtgcccgggcgatcatggctcagcttccccaggagcaaaaagcgaagattgcggaacaggtggccagcttccaggaagaaaagagcaagctggatgctgaagtgtccaaatgggacgacagtggcaatgacatcattgtgctggccaagcagatgtgcatgattatgatggagatgacagactttacccgaggtaaaggaccactcaaaaatacatcggatgtcatcagtgctgccaagaaaattgctgaggcaggatccaggatggacaagcttggccgcaccattgcagaccattgccccgactcggcttgcaagcaggacctgctggcctacctgcaacgcatcgccctctactgccaccagctgaacatctgcagcaaggtcaaggccgaggtgcagaatctcggcggggagcttgttgtctctgggaactgtgacacctgcggggcactgcaagggctgaaaggctggcctcctcccctttgctggccactcactgggtggacagcgccatgtccctgatccaggcagccaagaacttgatgaatgctgtggtgcagacagtgaaggcatcctacgtcgcctctaccaaataccaaaagtcacagggtatggcttccctcaaccttcctgctgtgtcatggaagatgaaggcaccagagaaaaagccattggtgaagagagagaaacaggatgagacacagaccaagattaaacgggcatctcagaagaagcacgtgaacccggtgcaggccctcagcgagttcaaagctatggacagcatctaagtctgcccaggccggccgcccccacccctcggggctcctgaatatcagtcactgttcgtcactcaaatgaatttgctaaatacaacactgatactagattccacagggaaatgggcagactgaaccagtccaggtggtgaattttccaagaacatagtttaagttgattaaaaatgcttttagaatgcaggagcctacttctagctgtattttttgtatgcttaaataaaaataaaaattcataaccaaagagaatcccacattagcttgttagtaatgctctgaccaagccgagatgcccattctcttagtgatggcggcgttagggtttgagagaagggaatttggctcaacttcagttgagagggtgcagtccagacagcttgactgcttttaaatgaccaaagatgacctgtggtaagcaacctgggcatcttaggaagcagtccctggagaaggcatgttcccagaaaggtctctggagggacaaactcactcagtaaaacataatgtatcatgaagaaaactgattctctatgacatgaaatgaaaattttaatgcattgttataattactaatgtacgctgctgcaggacattaataaagttgcttttttaggctacagtgtctcgatgccataatcagaacacactttttttcctctttctcccagcttcaaatgcaaattcatcattgggctcacttctaataactgcagtgtttcccgccttgggcttgcagcagaaaaacctgacaacatagtgtttgctaaggcagtaatttagactttaccttatttgtgattactgtagtgattgattgattgattactattaactacaaggtataatttactatcaccttatttaaattttatgaattaatttgaatgttttttacactaactaacttttcccaataaagtccactatgaaaccacgaca

SEQ ID NO: 362172 - DNA, 3733 bp, Homo sapiens
cggcccatttcctcctcctagccggactggagggagacaaagcagcgcccgtctgcttcgggcctctggaatttagcgctcgcccagctagccgcagaaatgactgctgtccatgcaggcaacataaacttcaagtgggatcctaaaagtctagagatcaggactctggcagttgagagactgttggagcctcttgttacacaggttacaacccttgtaaacaccaatagtaaagggccctctaataagaagagaggtcgttctaagaaggcccatgttttggctgcatctgttgaacaagcaactgagaatttcttggagaagggggataaaattgcgaaggagagccagtttctcaaggaggagcttgtggctgctgtagaagatgttcgaaaacaaggtgatttgatgaaggctgctgcaggagagttcgcagatgatccctgctcttctgtgaagcgaggcaacatggttcgggcagctcgagctttgctctctgctgttacccggttgctgattttggctgacatggcagatgtctacaaattacttgttcagctgaaagttgtggaagatggtatcttgaagttgaggaatgctggcaatgaacaagacttaggaatccagtataaagccctaaaacctgaagtggataagctgaacattatggcagccaaaagacaacaggaattgaaagatgttggccatcgtgatcagatggctgcagctagaggaatcctgcagaagaacgttccgatcctctatactgcatcccaggcatgcctacagcaccctgatgtcgcagcctataaggccaacagggacctgatatacaagcagctgcagcaggcggtcacaggcatttccaatgcagcccaggccactgcctcagacgatgcctcacagcaccagggtggaggaggaggagaactggcatatgcactcaataactttgacaaacaaatcattgtggaccccttgagcttcagcgaggagcgctttaggccttccctggaggagcgtctggaaagcatcattagtggggctgccttgatggccgactcgtcctgcacgcgtgatgaccgtcgtgagcgaattgtggcagagtgtaatgctgtccgccaggccctgcaggacctgctttcggagtacatgggcaatgctggacgtaaagaaagaagtgatgcactcaattctgcaatagataaaatgaccaagaagaccagggacttgcgtagacagctccgcaaagctgtcatggaccacgtttcagattctttcctggaaaccaatgttccacttttggtattgattgaagctgcaaagaatggaaatgagaaagaagttaaggagtatgcccaagttttccgtgaacatgccaacaaattgattgaggttgccaacttggcctgttccatctcaaataatgaagaaggtgtaaagcttgttcgaatgtctgcaagccagttagaagccctctgtcctcaggttattaatgctgcactggctttagcagcaaaaccacagagtaaactggcccaagagaacatggatctttttaaagaacaatgggaaaaacaagtccgtgttctcacagatgctgtcgatgacattacttccattgatgacttcttggctgtctcagagaatcacattttggaagatgtgaacaaatgtgtcattgctctccaagagaaggatgtggatggcctggaccgcacagctggtgcaattcgaggccgggcagcccgggtcattcacgtagtcacctcagagatggacaactatgagccaggagtctacacagagaaggttctggaagccactaagctgctctccaacacagtcatgccacgttttactgagcaagtagaagcagccgtggaagccctcagctcggaccctgcccagcccatggatgagaatgagtttatcgatgcttcccgcctggtatatgatggcatccgggacatcaggaaagcagtgctgatgataaggacccctgaggagttggatgactctgactttgagacagaagattttgatgtcagaagcaggacgagcgtccagacagaagacgatcagctgatagctggccagagtgcccgggcgatcatggctcagcttccccaggagcaaaaagcgaagattgcggaacaggtggccagcttccaggaagaaaagagcaagctggatgctgaagtgtccaaatgggacgacagtggcaatgacatcattgtgctggccaagcagatgtgcatgattatgatggagatgacagactttacccgaggtaaaggaccactcaaaaatacatcggatgtcatcagtgctgccaagaaaattgctgaggcaggatccaggatggacaagcttggccgcaccattgcagaccattgccccgactcggcttgcaagcaggacctgctggcctacctgcaacgcatcgccctctactgccaccagctgaacatctgcagcaaggtcaaggccgaggtgcagaatctcggcggggagcttgttgtctctggccaagaacttgatgaatgctgtggtgcagacagtgaaggcatcctacgtcgcctctaccaaataccaaaagtcacagggtatggcttccctcaaccttcctgctgtgtcatggaagatgaaggcaccagagaaaaagccattggtgaagagagagaaacaggatgagacacagaccaagattaaacgggcatctcagaagaagcacgtgaacccggtgcaggccctcagcgagttcaaagctatggacagcatctaagtctgcccaggccggccgcccccacccctcggggctcctgaatatcagtcactgttcgtcactcaaatgaatttgctaaatacaacactgatactagattccacagggaaatgggcagactgaaccagtccaggtggtgaattttccaagaacatagtttaagttgattaaaaatgcttttagaatgcaggagcctacttctagctgtattttttgtatgcttaaataaaaataaaaattcataaccaaagagaatcccacattagcttgttagtaatgctctgaccaagccgagatgcccattctcttagtgatggcggcgttagggtttgagagaagggaatttggctcaacttcagttgagagggtgcagtccagacagcttgactgcttttaaatgaccaaagatgacctgtggtaagcaacctgggcatcttaggaagcagtccctggagaaggcatgttcccagaaaggtctctggagggacaaactcactcagtaaaacataatgtatcatgaagaaaactgattctctatgacatgaaatgaaaattttaatgcattgttataattactaatgtacgctgctgcaggacattaataaagttgcttttttaggctacagtgtctcgatgccataatcagaacacactttttttcctctttctcccagcttcaaatgcaaattcatcattgggctcacttctaataactgcagtgtttcccgccttgggcttgcagcagaaaaacctgacaacatagtgtttgctaaggcagtaatttagactttaccttatttgtgattactgtagtgattgattgattgattactattaactacaaggtataatttactatcaccttatttaaattttatgaattaatttgaatgttttttacactaactaacttttcccaataaagtccactatgaaaccacgaca

SEQ ID NO: 362173 - DNA, 3413 bp, Homo sapiens
tgaatgatgcatagtacgatgcccggtgttagaagatgtcgagaacgggtgatttgatgaaggctgctgcaggagagttcgcagatgatccctgctcttctgtgaagcgaggcaacatggttcgggcagctcgagctttgctctctgctgttacccggttgctgattttggctgacatggcagatgtctacaaattacttgttcagctgaaagttgtggaagatggtatcttgaagttgaggaatgctggcaatgaacaagacttaggaatccagtataaagccctaaaacctgaagtggataagctgaacattatggcagccaaaagacaacaggaattgaaagatgttggccatcgtgatcagatggctgcagctagaggaatcctgcagaagaacgttccgatcctctatactgcatcccaggcatgcctacagcaccctgatgtcgcagcctataaggccaacagggacctgatatacaagcagctgcagcaggcggtcacaggcatttccaatgcagcccaggccactgcctcagacgatgcctcacagcaccagggtggaggaggaggagaactggcatatgcactcaataactttgacaaacaaatcattgtggaccccttgagcttcagcgaggagcgctttaggccttccctggaggagcgtctggaaagcatcattagtggggctgccttgatggccgactcgtcctgcacgcgtgatgaccgtcgtgagcgaattgtggcagagtgtaatgctgtccgccaggccctgcaggacctgctttcggagtacatgggcaatgctggacgtaaagaaagaagtgatgcactcaattctgcaatagataaaatgaccaagaagaccagggacttgcgtagacagctccgcaaagctgtcatggaccacgtttcagattctttcctggaaaccaatgttccacttttggtattgattgaagctgcaaagaatggaaatgagaaagaagttaaggagtatgcccaagttttccgtgaacatgccaacaaattgattgaggttgccaacttggcctgttccatctcaaataatgaagaaggtgtaaagcttgttcgaatgtctgcaagccagttagaagccctctgtcctcaggttattaatgctgcactggctttagcagcaaaaccacagagtaaactggcccaagagaacatggatctttttaaagaacaatgggaaaaacaagtccgtgttctcacagatgctgtcgatgacattacttccattgatgacttcttggctgtctcagagaatcacattttggaagatgtgaacaaatgtgtcattgctctccaagagaaggatgtggatggcctggaccgcacagctggtgcaattcgaggccgggcagcccgggtcattcacgtagtcacctcagagatggacaactatgagccaggagtctacacagagaaggttctggaagccactaagctgctctccaacacagtcatgccacgttttactgagcaagtagaagcagccgtggaagccctcagctcggaccctgcccagcccatggatgagaatgagtttatcgatgcttcccgcctggtatatgatggcatccgggacatcaggaaagcagtgctgatgataaggacccctgaggagttggatgactctgactttgagacagaagattttgatgtcagaagcaggacgagcgtccagacagaagacgatcagctgatagctggccagagtgcccgggcgatcatggctcagcttccccaggagcaaaaagcgaagattgcggaacaggtggccagcttccaggaagaaaagagcaagctggatgctgaagtgtccaaatgggacgacagtggcaatgacatcattgtgctggccaagcagatgtgcatgattatgatggagatgacagactttacccgaggtaaaggaccactcaaaaatacatcggatgtcatcagtgctgccaagaaaattgctgaggcaggatccaggatggacaagcttggccgcaccattgcagaccattgccccgactcggcttgcaagcaggacctgctggcctacctgcaacgcatcgccctctactgccaccagctgaacatctgcagcaaggtcaaggccgaggtgcagaatctcggcggggagcttgttgtctctggggtggacagcgccatgtccctgatccaggcagccaagaacttgatgaatgctgtggtgcagacagtgaaggcatcctacgtcgcctctaccaaataccaaaagtcacagggtatggcttccctcaaccttcctgctgtgtcatggaagatgaaggcaccagagaaaaagccattggtgaagagagagaaacaggatgagacacagaccaagattaaacgggcatctcagaagaagcacgtgaacccggtgcaggccctcagcgagttcaaagctatggacagcatctaagtctgcccaggccggccgcccccacccctcggggctcctgaatatcagtcactgttcgtcactcaaatgaatttgctaaatacaacactgatactagattccacagggaaatgggcagactgaaccagtccaggtggtgaattttccaagaacatagtttaagttgattaaaaatgcttttagaatgcaggagcctacttctagctgtattttttgtatgcttaaataaaaataaaaattcataaccaaagagaatcccacattagcttgttagtaatgctctgaccaagccgagatgcccattctcttagtgatggcggcgttagggtttgagagaagggaatttggctcaacttcagttgagagggtgcagtccagacagcttgactgcttttaaatgaccaaagatgacctgtggtaagcaacctgggcatcttaggaagcagtccctggagaaggcatgttcccagaaaggtctctggagggacaaactcactcagtaaaacataatgtatcatgaagaaaactgattctctatgacatgaaatgaaaattttaatgcattgttataattactaatgtacgctgctgcaggacattaataaagttgcttttttaggctacagtgtctcgatgccataatcagaacacactttttttcctctttctcccagcttcaaatgcaaattcatcattgggctcacttctaataactgcagtgtttcccgccttgggcttgcagcagaaaaacctgacaacatagtgtttgctaaggcagtaatttagactttaccttatttgtgattactgtagtgattgattgattgattactattaactacaaggtataatttactatcaccttatttaaattttatgaattaatttgaatgttttttacactaactaacttttcccaataaagtccactatgaaaccacgaca

SEQ ID NO: 362174 - DNA, 3774 bp, Homo sapiens
  misc_feature (3459)..(3459): n is a, c, g, or t
  misc_feature (3465)..(3465): n is a, c, g, or t
  misc_feature (3679)..(3679): n is a, c, g, or t
cggcccatttcctcctcctagccggactggagggagacaaagcagcgcccgtctgcttcgggcctctggaatttagcgctcgcccagctagccgcagaaatgactgctgtccatgcaggcaacataaacttcaagtgggatcctaaaagtctagagatcaggactctggcagttgagagactgttggagcctcttgttacacaggttacaacccttgtaaacaccaatagtaaagggccctctaataagaagagaggtcgttctaagaaggcccatgttttggctgcatctgttgaacaagcaactgagaatttcttggagaagggggataaaattgcgaaggagagccagtttctcaaggaggagcttgtggctgctgtagaagatgttcgaaaacaaggtgatttgatgaaggctgctgcaggagagttcgcagatgatccctgctcttctgtgaagcgaggcaacatggttcgggcagctcgagctttgctctctgctgttacccggttgctgattttggctgacatggcagatgtctacaaattacttgttcagctgaaagttgtggaagatggtatcttgaagttgaggaatgctggcaatgaacaagacttaggaatccagtataaagccctaaaacctgaagtggataagctgaacattatggcagccaaaagacaacaggaattgaaagatgttggccatcgtgatcagatggctgcagctagaggaatcctgcagaagaacgttccgatcctctatactgcatcccaggcatgcctacagcaccctgatgtcgcagcctataaggccaacagggacctgatatacaagcagctgcagcaggcggtcacaggcatttccaatgcagcccaggccactgcctcagacgatgcctcacagcaccagggtggaggaggaggagaactggcatatgcactcaataactttgacaaacaaatcattgtggaccccttgagcttcagcgaggagcgctttaggccttccctggaggagcgtctggaaagcatcattagtggggctgccttgatggccgactcgtcctgcacgcgtgatgaccgtcgtgagcgaattgtggcagagtgtaatgctgtccgccaggccctgcaggacctgctttcggagtacatgggcaatgctggacgtaaagaaagaagtgatgcactcaattctgcaatagataaaatgaccaagaagaccagggacttgcgtagacagctccgcaaagctgtcatggaccacgtttcagattctttcctggaaaccaatgttccacttttggtattgattgaagctgcaaagaatggaaatgagaaagaagttaaggagtatgcccaagttttccgtgaacatgccaacaaattgattgaggttgccaacttggcctgttccatctcaaataatgaagaaggtgtaaagcttgttcgaatgtctgcaagccagttagaagccctctgtcctcaggttattaatgctgcactggctttagcagcaaaaccacagagtaaactggcccaagagaacatggatctttttaaagaacaatgggaaaaacaagtccgtgttctcacagatgctgtcgatgacattacttccattgatgacttcttggctgtctcagagaatcacattttggaagatgtgaacaaatgtgtcattgctctccaagagaaggatgtggatggcctggaccgcacagctggtgcaattcgaggccgggcagcccgggtcattcacgtagtcacctcagagatggacaactatgagccaggagtctacacagagaaggttctggaagccactaagctgctctccaacacagtcatgccacgttttactgagcaagtagaagcagccgtggaagccctcagctcggaccctgcccagcccatggatgagaatgagtttatcgatgcttcccgcctggtatatgatggcatccgggacatcaggaaagcagtgctgatgataaggacccctgaggagttggatgactctgactttgagacagaagattttgatgtcagaagcaggacgagcgtccagacagaagacgatcagctgatagctggccagagtgcccgggcgatcatggctcagcttccccaggagcaaaaagcgaagattgcggaacaggtggccagcttccaggaagaaaagagcaagctggatgctgaagtgtccaaatgggacgacagtggcaatgacatcattgtgctggccaagcagatgtgcatgattatgatggagatgacagactttacccgaggtaaaggaccactcaaaaatacatcggatgtcatcagtgctgccaagaaaattgctgaggcaggatccaggatggacaagcttggccgcaccattgcagaccattgccccgactcggcttgcaagcaggacctgctggcctacctgcaacgcatcgccctctactgccaccagctgaacatctgcagcaaggtcaaggccgaggtgcagaatctcggcggggagcttgttgtctctggggtggacagcgccatgtccctgatccaggcagccaagaacttgatgaatgctgtggtgcagacagtgaaggcatcctacgtcgcctctaccaaataccaaaagtcacagggtatggcttccctcaaccttcctgctgtgtcatggaagatgaaggcaccagagaaaaagccattggtgaagagagagaaacaggatgagacacagaccaagattaaacgggcatctcagaagaagcacgtgaacccggtgcaggccctcagcgagttcaaagctatggacagcatctaagtctgcccaggccggccgcccccacccctcggggctcctgaatatcagtcactgttcgtcactcaaatgaatttgctaaatacaacactgatactagattccacagggaaatgggcagactgaaccagtccaggtggtgaattttccaagaacatagtttaagttgattaaaaatgcttttagaatgcaggagcctacttctagctgtattttttgtatgcttaaataaaaataaaaattcataaccaaagagaatcccacattagcttgttagtaatgctctgaccaagccgagatgcccattctcttagtgatggcggcgttagggtttgagagaagggaatttggctcaacttcagttgagagggtgcagtccagacagcttgactgcttttaaatgaccaaagatgacctgtggtaagcaacctgggcatcttaggaagcagtccctggagaaggcatgttcccagaaaggtctctggagggacaaactcactcagtaaaacataatgtatcatgaagaaaactgattctctatgacatgaaatgaaaattttaatgcattgttataattactaatgtacgctgctgcaggacattaataaagttgcttttttaggctaaaaaaaaaaaaaaatnaaaaanaaaaaaaaaaatcgggggttctaatggggggggcgggacaaaacggggtacatggaatgggcccattgggccatagctggtcttcctgacccagggtttttctttgtgtacaacggtgggcagaaactggcggcgggtcccccctaatagggaggccgaattaaattccggaaaaggccggggttaacccgggcttagatgcttcggaaaaaantatacataacacgaacgcatacctccacacacactccaatcaacacaatccattgccctcacactcaaacacatccgcaatcacaacaacaaaat

SEQ ID NO: 362175 - DNA, 3450 bp, Homo sapiens
gagctcggtaccccacaccacctgagtcggagggaattttgtacttttagaggccaatattagtgtttttcccactatgaagctcctgtgtaattgctgtttaaatgttagaagaccatgcgcaaactcgagagctaagtttgggttgctttttgagtagttgttaacaggaatgaaaattcctaggatgccatcttctttacagacctacattcagaatttttgggttttggggtctttcttattttataggtggaagatggtatcttgaagttgaggaatgctggcaatgaacaagacttaggaatccagtataaagccctaaaacctgaagtggataagctgaacattatggcagccaaaagacaacaggaattgaaagatgttggccatcgtgatcagatggctgcagctagaggaatcctgcagaagaacgttccgatcctctatactgcatcccaggcatgcctacagcaccctgatgtcgcagcctataaggccaacagggacctgatatacaagcagctgcagcaggcggtcacaggcatttccaatgcagcccaggccactgcctcagacgatgcctcacagcaccagggtggaggaggaggagaactggcatatgcactcaataactttgacaaacaaatcattgtggaccccttgagcttcagcgaggagcgctttaggccttccctggaggagcgtctggaaagcatcattagtggggctgccttgatggccgactcgtcctgcacgcgtgatgaccgtcgtgagcgaattgtggcagagtgtaatgctgtccgccaggccctgcaggacctgctttcggagtacatgggcaatgctggacgtaaagaaagaagtgatgcactcaattctgcaatagataaaatgaccaagaagaccagggacttgcgtagacagctccgcaaagctgtcatggaccacgtttcagattctttcctggaaaccaatgttccacttttggtattgattgaagctgcaaagaatggaaatgagaaagaagttaaggagtatgcccaagttttccgtgaacatgccaacaaattgattgaggttgccaacttggcctgttccatctcaaataatgaagaaggtgtaaagcttgttcgaatgtctgcaagccagttagaagccctctgtcctcaggttattaatgctgcactggctttagcagcaaaaccacagagtaaactggcccaagagaacatggatctttttaaagaacaatgggaaaaacaagtccgtgttctcacagatgctgtcgatgacattacttccattgatgacttcttggctgtctcagagaatcacattttggaagatgtgaacaaatgtgtcattgctctccaagagaaggatgtggatggcctggaccgcacagctggtgcaattcgaggccgggcagcccgggtcattcacgtagtcacctcagagatggacaactatgagccaggagtctacacagagaaggttctggaagccactaagctgctctccaacacagtcatgccacgttttactgagcaagtagaagcagccgtggaagccctcagctcggaccctgcccagcccatggatgagaatgagtttatcgatgcttcccgcctggtatatgatggcatccgggacatcaggaaagcagtgctgatgataaggacccctgaggagttggatgactctgactttgagacagaagattttgatgtcagaagcaggacgagcgtccagacagaagacgatcagctgatagctggccagagtgcccgggcgatcatggctcagcttccccaggagcaaaaagcgaagattgcggaacaggtggccagcttccaggaagaaaagagcaagctggatgctgaagtgtccaaatgggacgacagtggcaatgacatcattgtgctggccaagcagatgtgcatgattatgatggagatgacagactttacccgaggtaaaggaccactcaaaaatacatcggatgtcatcagtgctgccaagaaaattgctgaggcaggatccaggatggacaagcttggccgcaccattgcagaccattgccccgactcggcttgcaagcaggacctgctggcctacctgcaacgcatcgccctctactgccaccagctgaacatctgcagcaaggtcaaggccgaggtgcagaatctcggcggggagcttgttgtctctggggtggacagcgccatgtccctgatccaggcagccaagaacttgatgaatgctgtggtgcagacagtgaaggcatcctacgtcgcctctaccaaataccaaaagtcacagggtatggcttccctcaaccttcctgctgtgtcatggaagatgaaggcaccagagaaaaagccattggtgaagagagagaaacaggatgagacacagaccaagattaaacgggcatctcagaagaagcacgtgaacccggtgcaggccctcagcgagttcaaagctatggacagcatctaagtctgcccaggccggccgcccccacccctcggggctcctgaatatcagtcactgttcgtcactcaaatgaatttgctaaatacaacactgatactagattccacagggaaatgggcagactgaaccagtccaggtggtgaattttccaagaacatagtttaagttgattaaaaatgcttttagaatgcaggagcctacttctagctgtattttttgtatgcttaaataaaaataaaaattcataaccaaagagaatcccacattagcttgttagtaatgctctgaccaagccgagatgcccattctcttagtgatggcggcgttagggtttgagagaagggaatttggctcaacttcagttgagagggtgcagtccagacagcttgactgcttttaaatgaccaaagatgacctgtggtaagcaacctgggcatcttaggaagcagtccctggagaaggcatgttcccagaaaggtctctggagggacaaactcactcagtaaaacataatgtatcatgaagaaaactgattctctatgacatgaaatgaaaattttaatgcattgttataattactaatgtacgctgctgcaggacattaataaagttgcttttttaggctacagtgtctcgatgccataatcagaacacactttttttcctctttctcccagcttcaaatgcaaattcatcattgggctcacttctaataactgcagtgtttcccgccttgggcttgcagcagaaaaacctgacaacatagtgtttgctaaggcagtaatttagactttaccttatttgtgattactgtagtgattgattgattgattactattaactacaaggtataatttactatcaccttatttaaattttatgaattaatttgaatgttttttacactaactaacttttcccaataaagtccactatgaaaccacgaca

SEQ ID NO: 362176 - DNA, 3493 bp, Homo sapiens
cggcccatttcctcctcctagccggactggagggagacaaagcagcgcccgtctgcttcgggcctctggaatttagcgctcgcccagctagccgcagaaatgactgctgtccatgcaggcaacataaacttcaagtgggatcctaaaagtctagagatcaggactctggcagttgagagactgttggagcctcttgttacacaggttacaacccttgtaaacaccaatagtaaagggccctctaataagaagagaggtcgttctaagaaggcccatgttttggctgcatctgttgaacaagcaactgagaatttcttggagaagggggataaaattgcgaaggagagccagtttctcaaggaggagcttgtggctgctgtagaagatgttcgaaaacaaggtgatttgatgaaggctgctgcaggagagttcgcagatgatccctgctcttctgtgaagcgaggcaacatggttcgggcagctcgagctttgctctctgctgttacccggttgctgattttggctgacatggcagatgtctacaaattacttgttcagctgaaagttgtggaagatggtatcttgaagttgaggaatgctggcaatgaacaagacttaggaatccagtataaagccctaaaacctgaagtggataagctgaacattatggcagccaaaagacaacaggaattgaaagatgttggccatcgtgatcagatggctgcagctagaggaatcctgcagaagaacgttccgatcctctatactgcatcccaggcatgcctacagcaccctgatgtcgcagcctataaggccaacagggacctgatatacaagcagctgcagcaggcggtcacaggcatttccaatgcagcccaggccactgcctcagacgatgcctcacagcaccagggtggaggaggaggagaactggcatatgcactcaataactttgacaaacaaatcattgtggaccccttgagcttcagcgaggagcgctttaggccttccctggaggagcgtctggaaagcatcattagtggggctgccttgatggccgactcgtcctgcacgcgtgatgaccgtcgtgagcgaattgtggcagagtgtaatgctgtccgccaggccctgcaggacctgctttcggagtacatgggcaatgctggacgtaaagaaagaagtgatgcactcaattctgcaatagataaaatgaccaagaagaccagggacttgcgtagacagctccgcaaagctgtcatggaccacgtttcagattctttcctggaaaccaatgttccacttttggtattgattgaagctgcaaagaatggaaatgagaaagaagttaaggagtatgcccaagttttccgtgaacatgccaacaaattgattgaggttgccaacttggcctgttccatctcaaataatgaagaaggtgtaaagcttgttcgaatgtctgcaagccagttagaagccctctgtcctcaggttattaatgctgcactggctttagcagcaaaaccacagagtaaactggcccaagagaacatggatctttttaaagaacaatgggaaaaacaagtccgtgttctcacagatgctgtcgatgacattacttccattgatgacttcttggctgtctcagagaatcacattttggaagatgtgaacaaatgtgtcattgctctccaagagaaggatgtggatggcctggaccgcacagctggtgcaattcgaggccgggcagcccgggtcattcacgtagtcacctcagagatggacaactatgagccaggagtctacacagagaaggttctggaagccactaagctgctctccaacacagtcatgccacgttttactgagcaagtagaagcagccgtggaagccctcagctcggaccctgcccagcccatggatgagaatgagtttatcgatgcttcccgcctggtatatgatggcatccgggacatcaggaaagcagtgctgatgataaggacccctgaggagttggatgactctgactttgagacagaagattttgatgtcagaagcaggacgagcgtccagacagaagacgatcagctgatagctggccagagtgcccgggcgatcatggctcagcttccccaggagcaaaaagcgaagattgcggaacaggtggccagcttccaggaagaaaagagcaagctggatgctgaagtgtccaaatgggacgacagtggcaatgacatcattgtgctggccaagcagatgtgcatgattatgatggagatgacagactttacccgaggtaaaggaccactcaaaaatacatcggatgtcatcagtgctgccaagaaaattgctgaggcaggatccaggatggacaagcttggccgcaccattgcagaccattgccccgactcggcttgcaagcaggacctgctggcctacctgcaacgcatcgccctctactgccaccagctgaacatctgcagcaaggtcaaggccgaggtgcagaatctcggcggggagcttgttgtctctggggtggacagcgccatgtccctgatccaggcagccaagaacttgatgaatgctgtggtgcagacagtgaaggcatcctacgtcgcctctaccaaataccaaaagtcacagggtatggcttccctcaaccttcctgctgtgtcatggaagatgaaggcaccagagaaaaagccattggtgaagagagagaaacaggatgagacacagaccaagattaaacgggcatctcagaagaagcacgtgaacccggtgcaggccctcagcgagttcaaagctatggacagcatctaagtctgcccaggccggccgcccccacccctcggggctcctgaatatcagtcactgttcgtcactcaaatgaatttgctaaatacaacactgatactagattccacagggaaatgggcagactgaaccagtccaggtggtgaattttccaagaacatagtttaagttgattaaaaatgcttttagaatgcaggagcctacttctagctgtattttttgtatgcttaaataaaaataaaaattcataaccaaagagaatcccacattagcttgttagtaatgctctgaccaagccgagatgcccattctcttagtgatggcggcgttagggtttgagagaagggaatttggctcaacttcagttgagagggtgcagtccagacagcttgactgcttttaaatgaccaaagatgacctgtggtaagcaacctgggcatcttaggaagcagtccctggagaaggcatgttcccagaaaggtctctggagggacaaactcactcagtaaaacataatgtatcatgaagaaaactgattctctatgacatgaaatgaaaattttaatgcattgttataattactaatgtacgctgctgcaggacattaataaagttgcttttttaggctaccagtgtctcgattgcctcattcagcgactggctggggtaccgacgctcg

SEQ ID NO: 362177 - DNA, 3111 bp, Homo sapiens
  misc_feature (50)..(50): n is a, c, g, or t
gaaatatgctttatatacatgatggaatgctattcacctatcaaaagccnaaattctgttctttgccataacatggatgaacctagaggacactgtgttaagtgaaataagccaagcacagaaagataaatgctgcatgatctcaccccatatgtaaaacctaaaaagtatatcccataccagcagctgcagcaggcggtcacaggcatttccaatgcagcccaggccactgcctcagacgatgcctcacagcaccagggtggaggaggaggagaactggcatatgcactcaataactttgacaaacaaatcattgtggaccccttgagcttcagcgaggagcgctttaggccttccctggaggagcgtctggaaagcatcattagtggggctgccttgatggccgactcgtcctgcacgcgtgatgaccgtcgtgagcgaattgtggcagagtgtaatgctgtccgccaggccctgcaggacctgctttcggagtacatgggcaatgctggacgtaaagaaagaagtgatgcactcaattctgcaatagataaaatgaccaagaagaccagggacttgcgtagacagctccgcaaagctgtcatggaccacgtttcagattctttcctggaaaccaatgttccacttttggtattgattgaagctgcaaagaatggaaatgagaaagaagttaaggagtatgcccaagttttccgtgaacatgccaacaaattgattgaggttgccaacttggcctgttccatctcaaataatgaagaaggtgtaaagcttgttcgaatgtctgcaagccagttagaagccctctgtcctcaggttattaatgctgcactggctttagcagcaaaaccacagagtaaactggcccaagagaacatggatctttttaaagaacaatgggaaaaacaagtccgtgttctcacagatgctgtcgatgacattacttccattgatgacttcttggctgtctcagagaatcacattttggaagatgtgaacaaatgtgtcattgctctccaagagaaggatgtggatggcctggaccgcacagctggtgcaattcgaggccgggcagcccgggtcattcacgtagtcacctcagagatggacaactatgagccaggagtctacacagagaaggttctggaagccactaagctgctctccaacacagtcatgccacgttttactgagcaagtagaagcagccgtggaagccctcagctcggaccctgcccagcccatggatgagaatgagtttatcgatgcttcccgcctggtatatgatggcatccgggacatcaggaaagcagtgctgatgataaggacccctgaggagttggatgactctgactttgagacagaagattttgatgtcagaagcaggacgagcgtccagacagaagacgatcagctgatagctggccagagtgcccgggcgatcatggctcagcttccccaggagcaaaaagcgaagattgcggaacaggtggccagcttccaggaagaaaagagcaagctggatgctgaagtgtccaaatgggacgacagtggcaatgacatcattgtgctggccaagcagatgtgcatgattatgatggagatgacagactttacccgaggtaaaggaccactcaaaaatacatcggatgtcatcagtgctgccaagaaaattgctgaggcaggatccaggatggacaagcttggccgcaccattgcagaccattgccccgactcggcttgcaagcaggacctgctggcctacctgcaacgcatcgccctctactgccaccagctgaacatctgcagcaaggtcaaggccgaggtgcagaatctcggcggggagcttgttgtctctggggtggacagcgccatgtccctgatccaggcagccaagaacttgatgaatgctgtggtgcagacagtgaaggcatcctacgtcgcctctaccaaataccaaaagtcacagggtatggcttccctcaaccttcctgctgtgtcatggaagatgaaggcaccagagaaaaagccattggtgaagagagagaaacaggatgagacacagaccaagattaaacgggcatctcagaagaagcacgtgaacccggtgcaggccctcagcgagttcaaagctatggacagcatctaagtctgcccaggccggccgcccccacccctcggggctcctgaatatcagtcactgttcgtcactcaaatgaatttgctaaatacaacactgatactagattccacagggaaatgggcagactgaaccagtccaggtggtgaattttccaagaacatagtttaagttgattaaaaatgcttttagaatgcaggagcctacttctagctgtattttttgtatgcttaaataaaaataaaaattcataaccaaagagaatcccacattagcttgttagtaatgctctgaccaagccgagatgcccattctcttagtgatggcggcgttagggtttgagagaagggaatttggctcaacttcagttgagagggtgcagtccagacagcttgactgcttttaaatgaccaaagatgacctgtggtaagcaacctgggcatcttaggaagcagtccctggagaaggcatgttcccagaaaggtctctggagggacaaactcactcagtaaaacataatgtatcatgaagaaaactgattctctatgacatgaaatgaaaattttaatgcattgttataattactaatgtacgctgctgcaggacattaataaagttgcttttttaggctacagtgtctcgatgccataatcagaacacactttttttcctctttctcccagcttcaaatgcaaattcatcattgggctcacttctaataactgcagtgtttcccgccttgggcttgcagcagaaaaacctgacaacatagtgtttgctaaggcagtaatttagactttaccttatttgtgattactgtagtgattgattgattgattactattaactacaaggtataatttactatcaccttatttaaattttatgaattaatttgaatgttttttacactaactaacttttcccaataaagtccactatgaaaccacgaca

SEQ ID NO: 362178 - DNA, 3726 bp, Homo sapiens
cggcccatttcctcctcctagccggactggagggagacaaagcagcgcccgtctgcttcgggcctctggaatttagcgctcgcccagctagccgcagaaatgactgctgtccatgcaggcaacataaacttcaagtgggatcctaaaagtctagagatcaggactctggcagttgagagactgttggagcctcttgttacacaggttacaacccttgtaaacaccaatagtaaagggccctctaataagaagagaggtcgttctaagaaggcccatgttttggctgcatctgttgaacaagcaactgagaatttcttggagaagggggataaaattgcgaaggagagccagtttctcaaggaggagcttgtggctgctgtagaagatgttcgaaaacaaggtgatttgatgaaggctgctgcaggagagttcgcagatgatccctgctcttctgtgaagcgaggcaacatggttcgggcagctcgagctttgctctctgctgttacccggttgctgattttggctgacatggcagatgtctacaaattacttgttcagctgaaagttgtggaagatggtatcttgaagttgaggaatgctggcaatgaacaagacttaggaatccagtataaagccctaaaacctgaagtggataagctgaacattatggcagccaaaagacaacaggaattgaaagatgttggccatcgtgatcagatggctgcagctagaggaatcctgcagaagaacgttccgatcctctatactgcatcccaggcatgcctacagcaccctgatgtcgcagcctataaggccaacagggacctgatatacaagcagctgcagcaggcggtcacaggcatttccaatgcagcccaggccactgcctcagacgatgcctcacagcaccagggtggaggaggaggagaactggcatatgcactcaataactttgacaaacaaatcattgtggaccccttgagcttcagcgaggagcgctttaggccttccctggaggagcgtctggaaagcatcattagtggggctgccttgatggccgactcgtcctgcacgcgtgatgaccgtcgtgagcgaattgtggcagagtgtaatgctgtccgccaggccctgcaggacctgctttcggagtacatgggcaatgctggacgtaaagaaagaagtgatgcactcaattctgcaatagataaaatgaccaagaagaccagggacttgcgtagacagctccgcaaagctgtcatggaccacgtttcagattctttcctggaaaccaatgttccacttttggtattgattgaagctgcaaagaatggaaatgagaaagaagttaaggagtatgcccaagttttccgtgaacatgccaacaaattgattgaggttgccaacttggcctgttccatctcaaataatgaagaaggtgtaaagcttgttcgaatgtctgcaagccagttagaagccctctgtcctcaggttattaatgctgcactggctttagcagcaaaaccacagagtaaactggcccaagagaacatggatctttttaaagaacaatgggaaaaacaagtccgtgttctcacagatgctgtcgatgacattacttccattgatgacttcttggctgtctcagagaatcacattttggaagatgtgaacaaatgtgtcattgctctccaagagaaggatgtggatggcctggaccgcacagctggtgcaattcgaggccgggcagcccgggtcattcacgtagtcacctcagagatggacaactatgagccaggagtctacacagagaaggttctggaagccactaagctgctctccaacacagtcatgccacgttttactgagcaagtagaagcagccgtggaagccctcagctcggaccctgcccagcccatggatgagaatgagtttatcgatgcttcccgcctggtatatgatggcatccgggacatcaggaaagcagtgctgatgataaggacccctgaggagttggatgactctgactttgagacagaagattttgatgtcagaagcaggacgagcgtccagacagaagacgatcagctgatagctggccagagtgcccgggcgatcatggctcagcttccccaggagcaaaaagcgaagattgcggaacaggtggccagcttccaggaagaaaagagcaagctggatgctgaagtgtccaaatgggacgacagtggcaatgacatcattgtgctggccaagcagatgtgcatgattatgatggagatgacagactttacccgaggtaaaggaccactcaaaaatacatcggatgtcatcagtgctgccaagaaaattgctgaggcaggatccaggatggacaagcttggccgcaccattgcagaccattgccccgactcggcttgcaagcaggacctgctggcctacctgcaacgcatcgccctctactgccaccagctgaacatctgcagcaaggtcaaggccgaggtgcagaatctcggcggggagcttgttgtctctggggtggacagcgccatgtccctgatccaggcagccaagaacttgatgaatgctgtggtgcagacagtgaaggcatcctacgtcgcctctaccaaataccaaaagtcacagggtatggcttccctcaaccttcctgctgtgtcatggaagatgaaggcaccagagaaaaagccattggtgaagagagagaaacaggatgagacacagaccaagattaaacgggcatctcagaagaagcacgtgaacccggtgcaggccctcagcgagttcaaagctatggacagcatctaagtctgcccaggccggccgcccccacccctcggggctcctgaatatcagtcactgttcgtcactcaaatgaatttgctaaatacaacactgatactagattccacagggaaatgggcagactgaaccagtccaggtggtgaattttccaagaacatagtttaagttgattaaaaatgcttttagaatgcaggagcctacttctagctgtattttttgtatgcttaaataaaaataaaaattcataaccaaagagaatcccacattagcttgttagtaatgctctgaccaagccgagatgcccattctcttagtgatggcggcgttagggtttgagagaagggaatttggctcaacttcagttgagagggtgcagtccagacagcttgactgcttttaaatgaccaaagatgacctgtggtaagcaacctgggcatcttaggaagcagtccctggagaaggcatgttcccagaaaggtctctggagggacaaactcactcagtaaagaaatgaaaattttaatgcattgttataattactaatgtacgctgctgcaggacattaataaagttgcttttttaggctacagtgtctcgatgccataatcagaacacactttttttcctctttctcccagcttcaaatgcaaattcatcattgggctcacttctaataactgcagtgtttcccgccttgggcttgcagcagaaaaacctgacaacatagtgtttgctaaggcagtaatttagactttaccttatttgtgattactgtagtgattgattgattgattactattaactacaaggtataatttactatcaccttatttaaattttatgaattaatttgaatgttttttacactaactaacttttcccaataaagtccactatgaaaccacgaca

SEQ ID NO: 362179 - DNA, 3543 bp, Homo sapiens
  misc_feature (3365)..(3365): n is a, c, g, or t
cggcccatttcctcctcctagccggactggagggagacaaagcagcgcccgtctgcttcgggcctctggaatttagcgctcgcccagctagccgcagaaatgactgctgtccatgcaggcaacataaacttcaagtgggatcctaaaagtctagagatcaggactctggcagttgagagactgttggagcctcttgttacacaggttacaacccttgtaaacaccaatagtaaagggccctctaataagaagagaggtcgttctaagaaggcccatgttttggctgcatctgttgaacaagcaactgagaatttcttggagaagggggataaaattgcgaaggagagccagtttctcaaggaggagcttgtggctgctgtagaagatgttcgaaaacaaggtgatttgatgaaggctgctgcaggagagttcgcagatgatccctgctcttctgtgaagcgaggcaacatggttcgggcagctcgagctttgctctctgctgttacccggttgctgattttggctgacatggcagatgtctacaaattacttgttcagctgaaagttgtggaagatggtatcttgaagttgaggaatgctggcaatgaacaagacttaggaatccagtataaagccctaaaacctgaagtggataagctgaacattatggcagccaaaagacaacaggaattgaaagatgttggccatcgtgatcagatggctgcagctagaggaatcctgcagaagaacgttccgatcctctatactgcatcccaggcatgcctacagcaccctgatgtcgcagcctataaggccaacagggacctgatatacaagcagctgcagcaggcggtcacaggcatttccaatgcagcccaggccactgcctcagacgatgcctcacagcaccagggtggaggaggaggagaactggcatatgcactcaataactttgacaaacaaatcattgtggaccccttgagcttcagcgaggagcgctttaggccttccctggaggagcgtctggaaagcatcattagtggggctgccttgatggccgactcgtcctgcacgcgtgatgaccgtcgtgagcgaattgtggcagagtgtaatgctgtccgccaggccctgcaggacctgctttcggagtacatgggcaatgctggacgtaaagaaagaagtgatgcactcaattctgcaatagataaaatgaccaagaagaccagggacttgcgtagacagctccgcaaagctgtcatggaccacgtttcagattctttcctggaaaccaatgttccacttttggtattgattgaagctgcaaagaatggaaatgagaaagaagttaaggagtatgcccaagttttccgtgaacatgccaacaaattgattgaggttgccaacttggcctgttccatctcaaataatgaagaaggtgtaaagcttgttcgaatgtctgcaagccagttagaagccctctgtcctcaggttattaatgctgcactggctttagcagcaaaaccacagagtaaactggcccaagagaacatggatctttttaaagaacaatgggaaaaacaagtccgtgttctcacagatgctgtcgatgacattacttccattgatgacttcttggctgtctcagagaatcacattttggaagatgtgaacaaatgtgtcattgctctccaagagaaggatgtggatggcctggaccgcacagctggtgcaattcgaggccgggcagcccgggtcattcacgtagtcacctcagagatggacaactatgagccaggagtctacacagagaaggttctggaagccactaagctgctctccaacacagtcatgccacgttttactgagcaagtagaagcagccgtggaagccctcagctcggaccctgcccagcccatggatgagaatgagtttatcgatgcttcccgcctggtatatgatggcatccgggacatcaggaaagcagtgctgatgataaggacccctgaggagttggatgactctgactttgagacagaagattttgatgtcagaagcaggacgagcgtccagacagaagacgatcagctgatagctggccagagtgcccgggcgatcatggctcagcttccccaggagcaaaaagcgaagattgcggaacaggtggccagcttccaggaagaaaagagcaagctggatgctgaagtgtccaaatgggacgacagtggcaatgacatcattgtgctggccaagcagatgtgcatgattatgatggagatgacagactttacccgaggtaaaggaccactcaaaaatacatcggatgtcatcagtgctgccaagaaaattgctgaggcaggatccaggatggacaagcttggccgcaccattgcagaccattgccccgactcggcttgcaagcaggacctgctggcctacctgcaacgcatcgccctctactgccaccagctgaacatctgcagcaaggtcaaggccgaggtgcagaatctcggcggggagcttgttgtctctggggtggacagcgccatgtccctgatccaggcagccaagaacttgatgaatgctgtggtgcagacagtgaaggcatcctacgtcgcctctaccaaataccaaaagtcacagggtatggcttccctcaaccttcctgctgtgtcatggaagatgaaggcaccagagaaaaagccattggtgaagagagagaaacaggatgagacacagaccaagattaaacgggcatctcagaagaagcacgtgaacccggtgcaggccctcagcgagttcaaagctatggacagcatctaagtctgcccaggccggccgcccccacccctcggggctcctgaatatcagtcactgttcgtcactcaaatgaatttgctaaatacaacactgatactagattccacagggaaatgggcagactgaaccagtccaggtggtgaattttccaagaacatagtttaagttgattaaaaatgcttttagaatgcaggagcctacttctagctgtattttttgtatgcttaaataaaaataaaaattcataaccaaagagaatcccacattagcttgttagtaatgctctgaccaagccgagatgcccattctcttagtgatggcggcgttagggtttgagagaagggaatttggctcaacttcagttgagagggtgcagtccagacagcttgactgcttttaaatgaccaaagatgacctgtggtaagcaacctgggcatcttaggaagcagtccctggagaaggcatgttcccagaaaggtctctggagggacaaactcactcagtaaaacataatgtatcatgaagaaaactgattctctatgacatgnaatgaagagtggtggtgcatgttatgatgactaatgggctgcttctgtatgggtttttttttatgtttgttgtgtgttggttgtgttggtttgtgttgtgttgtttgttgtgttgtgtttttggtgtgtgtttgttttgtgtgtgtgtgtgtttttgttggttgtgtgtgtgggtgtg

SEQ ID NO: 362180 - DNA, 3495 bp, Homo sapiens
cggcccatttcctcctcctagccggactggagggagacaaagcagcgcccgtctgcttcgggcctctggaatttagcgctcgcccagctagccgcagaaatgactgctgtccatgcaggcaacataaacttcaagtgggatcctaaaagtctagagatcaggactctggcagttgagagactgttggagcctcttgttacacaggttacaacccttgtaaacaccaatagtaaagggccctctaataagaagagaggtcgttctaagaaggcccatgttttggctgcatctgttgaacaagcaactgagaatttcttggagaagggggataaaattgcgaaggagagccagtttctcaaggaggagcttgtggctgctgtagaagatgttcgaaaacaaggtgatttgatgaaggctgctgcaggagagttcgcagatgatccctgctcttctgtgaagcgaggcaacatggttcgggcagctcgagctttgctctctgctgttacccggttgctgattttggctgacatggcagatgtctacaaattacttgttcagctgaaagttgtggaagatggtatcttgaagttgaggaatgctggcaatgaacaagacttaggaatccagtataaagccctaaaacctgaagtggataagctgaacattatggcagccaaaagacaacaggaattgaaagatgttggccatcgtgatcagatggctgcagctagaggaatcctgcagaagaacgttccgatcctctatactgcatcccaggcatgcctacagcaccctgatgtcgcagcctataaggccaacagggacctgatatacaagcagctgcagcaggcggtcacaggcatttccaatgcagcccaggccactgcctcagacgatgcctcacagcaccagggtggaggaggaggagaactggcatatgcactcaataactttgacaaacaaatcattgtggaccccttgagcttcagcgaggagcgctttaggccttccctggaggagcgtctggaaagcatcattagtggggctgccttgatggccgactcgtcctgcacgcgtgatgaccgtcgtgagcgaattgtggcagagtgtaatgctgtccgccaggccctgcaggacctgctttcggagtacatgggcaatgctggacgtaaagaaagaagtgatgcactcaattctgcaatagataaaatgaccaagaagaccagggacttgcgtagacagctccgcaaagctgtcatggaccacgtttcagattctttcctggaaaccaatgttccacttttggtattgattgaagctgcaaagaatggaaatgagaaagaagttaaggagtatgcccaagttttccgtgaacatgccaacaaattgattgaggttgccaacttggcctgttccatctcaaataatgaagaaggtgtaaagcttgttcgaatgtctgcaagccagttagaagccctctgtcctcaggttattaatgctgcactggctttagcagcaaaaccacagagtaaactggcccaagagaacatggatctttttaaagaacaatgggaaaaacaagtccgtgttctcacagatgctgtcgatgacattacttccattgatgacttcttggctgtctcagagaatcacattttggaagatgtgaacaaatgtgtcattgctctccaagagaaggatgtggatggcctggaccgcacagctggtgcaattcgaggccgggcagcccgggtcattcacgtagtcacctcagagatggacaactatgagccaggagtctacacagagaaggttctggaagccactaagctgctctccaacacagtcatgccacgttttactgagcaagtagaagcagccgtggaagccctcagctcggaccctgcccagcccatggatgagaatgagtttatcgatgcttcccgcctggtatatgatggcatccgggacatcaggaaagcagtgctgatgataaggacccctgaggagttggatgactctgactttgagacagaagattttgatgtcagaagcaggacgagcgtccagacagaagacgatcagctgatagctggccagagtgcccgggcgatcatggctcagcttccccaggagcaaaaagcgaagattgcggaacaggtggccagcttccaggaagaaaagagcaagctggatgctgaagtgtccaaatgggacgacagtggcaatgacatcattgtgctggccaagcagatgtgcatgattatgatggagatgacagactttacccgaggtaaaggaccactcaaaaatacatcggatgtcatcagtgctgccaagaaaattgctgaggcaggatccaggatggacaagcttggccgcaccattgcagaccattgccccgactcggcttgcaagcaggacctgctggcctacctgcaacgcatcgccctctactgccaccagctgaacatctgcagcaaggtcaaggccgaggtgcagaatctcggcggggagcttgttgtctctggggtggacagcgccatgtccctgatccaggcagccaagaacttgatgaatgctgtggtgcagacagtgaaggcatcctacgtcgcctctaccaaataccaaaagtcacagggtatggcttccctcaaccttcctgctgtgtcatggaagatgaaggcaccagagaaaaagccattggtgaagagagagaaacaggatgagacacagaccaagattaaacgggcatctcagaagaagcacgtgaacccggtgcaggccctcagcgagttcaaagctatggacagcatctaagtctgcccaggccggccgcccccacccctcggggctcctgaatatcagtcactgttcgtcactcaaatgaatttgctaaatacaacactgatactagattccacagggaaatgggcagactgaaccagtccaggtggtgaattttccaagaacatagtttaagttgattaaaaatgcttttagaatgcaggagcctacttctagctgtattttttgtatgcttaaataaaaataaaaattcataaccaaagagaatcccacattagcttgttagtaatgctctgaccaagccgagatgcccattctcttagtgatggcggcgttagggtttgagagaagggaatttggctcaacttcagttgagagggtgcagtccagacagcttgactgcttttaaatgaccaaagatgacctgtggtaagcaacctgggcatcttaggaagcagtccctggagaaggcatgttcccagaaaggtctctggagggacaaactcactcagtaaactctaatttatcatcctgggcgccgctccaccacgccccgctctcgctcactttgttccttctctcttgctcaaaaaaaaacaaacaagaaacaacatccactcgggtttggcgttgtggtgacatggacccccctgccaaaacccgccgatcctctcaattcagagccgg

SEQ ID NO: 362181 - DNA, 2749 bp, Homo sapiens
gctccgtacccgacgctctctctgtggggctgccttgatggccgactcgtcctgcacgcgtgatgaccgtcgtgagcgaattgtggcagagtgtaatgctgtccgccaggccctgcaggacctgctttcggagtacatgggcaatgctggacgtaaagaaagaagtgatgcactcaattctgcaatagataaaatgaccaagaagaccagggacttgcgtagacagctccgcaaagctgtcatggaccacgtttcagattctttcctggaaaccaatgttccacttttggtattgattgaagctgcaaagaatggaaatgagaaagaagttaaggagtatgcccaagttttccgtgaacatgccaacaaattgattgaggttgccaacttggcctgttccatctcaaataatgaagaaggtgtaaagcttgttcgaatgtctgcaagccagttagaagccctctgtcctcaggttattaatgctgcactggctttagcagcaaaaccacagagtaaactggcccaagagaacatggatctttttaaagaacaatgggaaaaacaagtccgtgttctcacagatgctgtcgatgacattacttccattgatgacttcttggctgtctcagagaatcacattttggaagatgtgaacaaatgtgtcattgctctccaagagaaggatgtggatggcctggaccgcacagctggtgcaattcgaggccgggcagcccgggtcattcacgtagtcacctcagagatggacaactatgagccaggagtctacacagagaaggttctggaagccactaagctgctctccaacacagtcatgccacgttttactgagcaagtagaagcagccgtggaagccctcagctcggaccctgcccagcccatggatgagaatgagtttatcgatgcttcccgcctggtatatgatggcatccgggacatcaggaaagcagtgctgatgataaggacccctgaggagttggatgactctgactttgagacagaagattttgatgtcagaagcaggacgagcgtccagacagaagacgatcagctgatagctggccagagtgcccgggcgatcatggctcagcttccccaggagcaaaaagcgaagattgcggaacaggtggccagcttccaggaagaaaagagcaagctggatgctgaagtgtccaaatgggacgacagtggcaatgacatcattgtgctggccaagcagatgtgcatgattatgatggagatgacagactttacccgaggtaaaggaccactcaaaaatacatcggatgtcatcagtgctgccaagaaaattgctgaggcaggatccaggatggacaagcttggccgcaccattgcagaccattgccccgactcggcttgcaagcaggacctgctggcctacctgcaacgcatcgccctctactgccaccagctgaacatctgcagcaaggtcaaggccgaggtgcagaatctcggcggggagcttgttgtctctggggtggacagcgccatgtccctgatccaggcagccaagaacttgatgaatgctgtggtgcagacagtgaaggcatcctacgtcgcctctaccaaataccaaaagtcacagggtatggcttccctcaaccttcctgctgtgtcatggaagatgaaggcaccagagaaaaagccattggtgaagagagagaaacaggatgagacacagaccaagattaaacgggcatctcagaagaagcacgtgaacccggtgcaggccctcagcgagttcaaagctatggacagcatctaagtctgcccaggccggccgcccccacccctcggggctcctgaatatcagtcactgttcgtcactcaaatgaatttgctaaatacaacactgatactagattccacagggaaatgggcagactgaaccagtccaggtggtgaattttccaagaacatagtttaagttgattaaaaatgcttttagaatgcaggagcctacttctagctgtattttttgtatgcttaaataaaaataaaaattcataaccaaagagaatcccacattagcttgttagtaatgctctgaccaagccgagatgcccattctcttagtgatggcggcgttagggtttgagagaagggaatttggctcaacttcagttgagagggtgcagtccagacagcttgactgcttttaaatgaccaaagatgacctgtggtaagcaacctgggcatcttaggaagcagtccctggagaaggcatgttcccagaaaggtctctggagggacaaactcactcagtaaaacataatgtatcatgaagaaaactgattctctatgacatgaaatgaaaattttaatgcattgttataattactaatgtacgctgctgcaggacattaataaagttgcttttttaggctacagtgtctcgatgccataatcagaacacactttttttcctctttctcccagcttcaaatgcaaattcatcattgggctcacttctaataactgcagtgtttcccgccttgggcttgcagcagaaaaacctgacaacatagtgtttgctaaggcagtaatttagactttaccttatttgtgattactgtagtgattgattgattgattactattaactacaaggtataatttactatcaccttatttaaattttatgaattaatttgaatgttttttacactaactaacttttcccaataaagtccactatgaaaccacgaca

SEQ ID NO: 362182 - DNA, 2368 bp, Homo sapiens
ggcttaggtcgaggccggggttaatcggccgaggagaggtgtaaagcttgttcgaatgtctgcaagccagttagaagccctctgtcctcaggttattaatgctgcactggctttagcagcaaaaccacagagtaaactggcccaagagaacatggatctttttaaagaacaatgggaaaaacaagtccgtgttctcacagatgctgtcgatgacattacttccattgatgacttcttggctgtctcagagaatcacattttggaagatgtgaacaaatgtgtcattgctctccaagagaaggatgtggatggcctggaccgcacagctggtgcaattcgaggccgggcagcccgggtcattcacgtagtcacctcagagatggacaactatgagccaggagtctacacagagaaggttctggaagccactaagctgctctccaacacagtcatgccacgttttactgagcaagtagaagcagccgtggaagccctcagctcggaccctgcccagcccatggatgagaatgagtttatcgatgcttcccgcctggtatatgatggcatccgggacatcaggaaagcagtgctgatgataaggacccctgaggagttggatgactctgactttgagacagaagattttgatgtcagaagcaggacgagcgtccagacagaagacgatcagctgatagctggccagagtgcccgggcgatcatggctcagcttccccaggagcaaaaagcgaagattgcggaacaggtggccagcttccaggaagaaaagagcaagctggatgctgaagtgtccaaatgggacgacagtggcaatgacatcattgtgctggccaagcagatgtgcatgattatgatggagatgacagactttacccgaggtaaaggaccactcaaaaatacatcggatgtcatcagtgctgccaagaaaattgctgaggcaggatccaggatggacaagcttggccgcaccattgcagaccattgccccgactcggcttgcaagcaggacctgctggcctacctgcaacgcatcgccctctactgccaccagctgaacatctgcagcaaggtcaaggccgaggtgcagaatctcggcggggagcttgttgtctctggggtggacagcgccatgtccctgatccaggcagccaagaacttgatgaatgctgtggtgcagacagtgaaggcatcctacgtcgcctctaccaaataccaaaagtcacagggtatggcttccctcaaccttcctgctgtgtcatggaagatgaaggcaccagagaaaaagccattggtgaagagagagaaacaggatgagacacagaccaagattaaacgggcatctcagaagaagcacgtgaacccggtgcaggccctcagcgagttcaaagctatggacagcatctaagtctgcccaggccggccgcccccacccctcggggctcctgaatatcagtcactgttcgtcactcaaatgaatttgctaaatacaacactgatactagattccacagggaaatgggcagactgaaccagtccaggtggtgaattttccaagaacatagtttaagttgattaaaaatgcttttagaatgcaggagcctacttctagctgtattttttgtatgcttaaataaaaataaaaattcataaccaaagagaatcccacattagcttgttagtaatgctctgaccaagccgagatgcccattctcttagtgatggcggcgttagggtttgagagaagggaatttggctcaacttcagttgagagggtgcagtccagacagcttgactgcttttaaatgaccaaagatgacctgtggtaagcaacctgggcatcttaggaagcagtccctggagaaggcatgttcccagaaaggtctctggagggacaaactcactcagtaaaacataatgtatcatgaagaaaactgattctctatgacatgaaatgaaaattttaatgcattgttataattactaatgtacgctgctgcaggacattaataaagttgcttttttaggctacagtgtctcgatgccataatcagaacacactttttttcctctttctcccagcttcaaatgcaaattcatcattgggctcacttctaataactgcagtgtttcccgccttgggcttgcagcagaaaaacctgacaacatagtgtttgctaaggcagtaatttagactttaccttatttgtgattactgtagtgattgattgattgattactattaactacaaggtataatttactatcaccttatttaaattttatgaattaatttgaatgttttttacactaactaacttttcccaataaagtccactatgaaaccacgaca

SEQ ID NO: 362183 - DNA, 4075 bp, Homo sapiens
  misc_feature (2869)..(2869): n is a, c, g, or t
  misc_feature (2982)..(2982): n is a, c, g, or t
cggcccatttcctcctcctagccggactggagggagacaaagcagcgcccgtctgcttcgggcctctggaatttagcgctcgcccagctagccgcagaaatgactgctgtccatgcaggcaacataaacttcaagtgggatcctaaaagtctagagatcaggactctggcagttgagagactgttggagcctcttgttacacaggttacaacccttgtaaacaccaatagtaaagggccctctaataagaagagaggtcgttctaagaaggcccatgttttggctgcatctgttgaacaagcaactgagaatttcttggagaagggggataaaattgcgaaggagagccagtttctcaaggaggagcttgtggctgctgtagaagatgttcgaaaacaaggtgatttgatgaaggctgctgcaggagagttcgcagatgatccctgctcttctgtgaagcgaggcaacatggttcgggcagctcgagctttgctctctgctgttacccggttgctgattttggctgacatggcagatgtctacaaattacttgttcagctgaaagttgtggaagatggtatcttgaagttgaggaatgctggcaatgaacaagacttaggaatccagtataaagccctaaaacctgaagtggataagctgaacattatggcagccaaaagacaacaggaattgaaagatgttggccatcgtgatcagatggctgcagctagaggaatcctgcagaagaacgttccgatcctctatactgcatcccaggcatgcctacagcaccctgatgtcgcagcctataaggccaacagggacctgatatacaagcagctgcagcaggcggtcacaggcatttccaatgcagcccaggccactgcctcagacgatgcctcacagcaccagggtggaggaggaggagaactggcatatgcactcaataactttgacaaacaaatcattgtggaccccttgagcttcagcgaggagcgctttaggccttccctggaggagcgtctggaaagcatcattagtggggctgccttgatggccgactcgtcctgcacgcgtgatgaccgtcgtgagcgaattgtggcagagtgtaatgctgtccgccaggccctgcaggacctgctttcggagtacatgggcaatgctggacgtaaagaaagaagtgatgcactcaattctgcaatagataaaatgaccaagaagaccagggacttgcgtagacagctccgcaaagctgtcatggaccacgtttcagattctttcctggaaaccaatgttccacttttggtattgattgaagctgcaaagaatggaaatgagaaagaagttaaggagtatgcccaagttttccgtgaacatgccaacaaattgattgaggttgccaacttggcctgttccatctcaaataatgaagaaggtgtaaagcttgttcgaatgtctgcaagccagttagaagccctctgtcctcaggttattaatgctgcactggctttagcagcaaaaccacagagtaaactggcccaagagaacatggatctttttaaagaacaatgggaaaaacaagtccgtgttctcacagatgctgtcgatgacattacttccattgatgacttcttggctgtctcagagaatcacattttggaagatgtgaacaaatgtgtcattgctctccaagagaaggatgtggatggcctggaccgcacagctggtgcaattcgaggccgggcagcccgggtcattcacgtagtcacctcagagatggacaactatgagccaggagtctacacagagaaggttctggaagccactaagctgctctccaacacagtcatgccacgttttactgagcaagtagaagcagccgtggaagccctcagctcggaccctgcccagcccatggatgagaatgagtttatcgatgcttcccgcctggtatatgatggcatccgggacatcaggaaagcagtgctgatgataaggacccctgaggagttggatgactctgactttgagacagaagattttgatgtcagaagcaggacgagcgtccagacagaagacgatcagctgatagctggccagagtgcccgggcgatcatggctcagcttccccaggagcaaaaagcgaagattgcggaacaggtggccagcttccaggaagaaaagagcaagctggatgctgaagtgtccaaatgggacgacagtggcaatgacatcattgtgctggccaagcagatgtgcatgattatgatggagatgacagactttacccgaggtaaaggaccactcaaaaatacatcggatgtcatcagtgctgccaagaaaattgctgaggcaggatccaggatggacaagcttggccgcaccattgcagaccattgccccgactcggcttgcaagcaggacctgctggcctacctgcaacgcatcgccctctactgccaccagctgaacatctgcagcaaggtcaaggccgaggtgcagaatctcggcggggagcttgttgtctctggggtggacagcgccatgtccctgatccaggcagccaagaacttgatgaatgctgtggtgcagacagtgaaggcatcctacgtcgcctctaccaaataccaaaagtcacagggtatggcttccctcaaccttcctgctgtgtcatggaagatgaaggcaccagagaaaaagccattggtgaagagagagaaacaggatgagacacagaccaagattaaacgggcatctcagaagaagcacgtgaacccggtgcaggccctcagcgagttcaaagctatggacagcatctaagtctgcccaggccggccgcttgcagaccattgccccgatcggcttgcangcaggacctgctggcctacctgcaacgcatcgccctctactgccaccagctgaacatctgcagcaaggtcaaggccgaggtgcagaatctcggcgcgggagcttgtgtctctnggggtggacagcgccatgtcctgatccacggcagccaagcaacgttgatgacatgctgctggctgcagacagctgcaacggcactccatacgctcgcctcctaccaaactaccacaacagctcacacgggctactggccttccgctcacacctctccctgccatgcagctcactgcgacacgactcgcaacggcaaccaagcacgcacacacaacgccccactctggctgcacagcacgcagcacgcaaaccacgcgactggaagaccaacagaaacccacacgcacttacacaccgggcgccagtcctacaagcccacgcacagccacacgctggacacccccagggctcgccccagcggccccctccacccacgaacgctctcacaccacgccctcactcggcggaccatgccccactacttcacacgactccctgtcccccccacggagacctccggtgcccgcaagacacggcacaccgagacgcactgacttatcgcgcgtgaccatcccacttgcaacagctaaattcaagcgtatcgaccttggcatctcatgactcccagcctttccaaaatttgaaaaattattggccattagacattatccaacaccagcattgcaatctacccgttaggaagctttatccgcagtcgatcaggggggtaacaacacctggcgtgcccactggcacctacttggctaacacctccacgccctccgccacagcgccatggccgcatgcaacaagcttttctatccgcacatacggaaaaaccactgtaaccgcgtactctaagaccgcctactgacaccgtgtcaactcacacacttgggccctatcctataacaccacacttggccacagtggcagtggccccgcttaagcctgtatgcgcataaagggccactgaataacatttacaatacaccggggcacagcttggccccttttacaaacatttcctttgtcaacccctcatggcaacgccacaacatccctagtcgaccgtgaccaccattctggccttcaacaacaactagttgtcaccccataagcgcttgcgctgccccgaccatgagccattagt

SEQ ID NO: 362184 - DNA, 1720 bp, Homo sapiens
ggtgagacgcgcttcgaggatattgtgaccgatgagcatgatcgctggcgccagtgctcagaggtcatcctggttcaactgccgcagacaatgccaagcgaagattgcggaacaggtggccagcttccaggaagaaaagagcaagctggatgctgaagtgtccaaatgggacgacagtggcaatgacatcattgtgctggccaagcagatgtgcatgattatgatggagatgacagactttacccgaggtaaaggaccactcaaaaatacatcggatgtcatcagtgctgccaagaaaattgctgaggcaggatccaggatggacaagcttggccgcaccattgcagaccattgccccgactcggcttgcaagcaggacctgctggcctacctgcaacgcatcgccctctactgccaccagctgaacatctgcagcaaggtcaaggccgaggtgcagaatctcggcggggagcttgttgtctctggggtggacagcgccatgtccctgatccaggcagccaagaacttgatgaatgctgtggtgcagacagtgaaggcatcctacgtcgcctctaccaaataccaaaagtcacagggtatggcttccctcaaccttcctgctgtgtcatggaagatgaaggcaccagagaaaaagccattggtgaagagagagaaacaggatgagacacagaccaagattaaacgggcatctcagaagaagcacgtgaacccggtgcaggccctcagcgagttcaaagctatggacagcatctaagtctgcccaggccggccgcccccacccctcggggctcctgaatatcagtcactgttcgtcactcaaatgaatttgctaaatacaacactgatactagattccacagggaaatgggcagactgaaccagtccaggtggtgaattttccaagaacatagtttaagttgattaaaaatgcttttagaatgcaggagcctacttctagctgtattttttgtatgcttaaataaaaataaaaattcataaccaaagagaatcccacattagcttgttagtaatgctctgaccaagccgagatgcccattctcttagtgatggcggcgttagggtttgagagaagggaatttggctcaacttcagttgagagggtgcagtccagacagcttgactgcttttaaatgaccaaagatgacctgtggtaagcaacctgggcatcttaggaagcagtccctggagaaggcatgttcccagaaaggtctctggagggacaaactcactcagtaaaacataatgtatcatgaagaaaactgattctctatgacatgaaatgaaaattttaatgcattgttataattactaatgtacgctgctgcaggacattaataaagttgcttttttaggctacagtgtctcgatgccataatcagaacacactttttttcctctttctcccagcttcaaatgcaaattcatcattgggctcacttctaataactgcagtgtttcccgccttgggcttgcagcagaaaaacctgacaacatagtgtttgctaaggcagtaatttagactttaccttatttgtgattactgtagtgattgattgattgattactattaactacaaggtataatttactatcaccttatttaaattttatgaattaatttgaatgttttttacactaactaacttttcccaataaagtccactatgaaaccacgaca

SEQ ID NO: 362185 - DNA, 1773 bp, Homo sapiens
  misc_feature (19)..(19): n is a, c, g, or t
  misc_feature (22)..(22): n is a, c, g, or t
acggctaggtacgaggctnggngttgaatcggccgaggctggtatatgatggcatccgggacatcaggaaagcagtgctgatgataaggacccctgaggagttggatgactctgactttgagacagaagattttgatgtcagaagcaggacgagcgtccagacagaagacgatcagcttccaggaagaaaagagcaagctggatgctgaagtgtccaaatgggacgacagtggcaatgacatcattgtgctggccaagcagatgtgcatgattatgatggagatgacagactttacccgaggtaaaggaccactcaaaaatacatcggatgtcatcagtgctgccaagaaaattgctgaggcaggatccaggatggacaagcttggccgcaccattgcagaccattgccccgactcggcttgcaagcaggacctgctggcctacctgcaacgcatcgccctctactgccaccagctgaacatctgcagcaaggtcaaggccgaggtgcagaatctcggcggggagcttgttgtctctggggtggacagcgccatgtccctgatccaggcagccaagaacttgatgaatgctgtggtgcagacagtgaaggcatcctacgtcgcctctaccaaataccaaaagtcacagggtatggcttccctcaaccttcctgctgtgtcatggaagatgaaggcaccagagaaaaagccattggtgaagagagagaaacaggatgagacacagaccaagattaaacgggcatctcagaagaagcacgtgaacccggtgcaggccctcagcgagttcaaagctatggacagcatctaagtctgcccaggccggccgcccccacccctcggggctcctgaatatcagtcactgttcgtcactcaaatgaatttgctaaatacaacactgatactagattccacagggaaatgggcagactgaaccagtccaggtggtgaattttccaagaacatagtttaagttgattaaaaatgcttttagaatgcaggagcctacttctagctgtattttttgtatgcttaaataaaaataaaaattcataaccaaagagaatcccacattagcttgttagtaatgctctgaccaagccgagatgcccattctcttagtgatggcggcgttagggtttgagagaagggaatttggctcaacttcagttgagagggtgcagtccagacagcttgactgcttttaaatgaccaaagatgacctgtggtaagcaacctgggcatcttaggaagcagtccctggagaaggcatgttcccagaaaggtctctggagggacaaactcactcagtaaaacataatgtatcatgaagaaaactgattctctatgacatgaaatgaaaattttaatgcattgttataattactaatgtacgctgctgcaggacattaataaagttgcttttttaggctacagtgtctcgatgccataatcagaacacactttttttcctctttctcccagcttcaaatgcaaattcatcattgggctcacttctaataactgcagtgtttcccgccttgggcttgcagcagaaaaacctgacaacatagtgtttgctaaggcagtaatttagactttaccttatttgtgattactgtagtgattgattgattgattactattaactacaaggtataatttactatcaccttatttaaattttatgaattaatttgaatgttttttacactaactaacttttcccaataaagtccactatgaaaccacgaca

SEQ ID NO: 362186 - DNA, 2441 bp, Homo sapiens
  misc_feature (2438)..(2438): n is a, c, g, or t
cggcccatttcctcctcctagccggactggagggagacaaagcagcgcccgtctgcttcgggcctctggaatttagcgctcgcccagctagccgcagaaatgactgctgtccatgcaggcaacataaacttcaagtgggatcctaaaagtctagagatcaggactctggcagttgagagactgttggagcctcttgttacacaggttacaacccttgtaaacaccaatagtaaagggccctctaataagaagagaggtcgttctaagaaggcccatgttttggctgcatctgttgaacaagcaactgagaatttcttggagaagggggataaaattgcgaaggagagccagtttctcaaggaggagcttgtggctgctgtagaagatgttcgaaaacaaggtgatttgatgaaggctgctgcaggagagttcgcagatgatccctgctcttctgtgaagcgaggcaacatggttcgggcagctcgagctttgctctctgctgttacccggttgctgattttggctgacatggcagatgtctacaaattacttgttcagctgaaagttgtggaagatggtatcttgaagttgaggaatgctggcaatgaacaagacttaggaatccagtataaagccctaaaacctgaagtggataagctgaacattatggcagccaaaagacaacaggaattgaaagatgttggccatcgtgatcagatggctgcagctagaggaatcctgcagaagaacgttccgatcctctatactgcatcccaggcatgcctacagcaccctgatgtcgcagcctataaggccaacagggacctgatatacaagcagctgcagcaggcggtcacaggcatttccaatgcagcccaggccactgcctcagacgatgcctcacagcaccagggtggaggaggaggagaactggcatatgcactcaataactttgacaaacaaatcattgtggaccccttgagcttcagcgaggagcgctttaggccttccctggaggagcgtctggaaagcatcattagtggggctgccttgatggccgactcgtcctgcacgcgtgatgaccgtcgtgagcgaattgtggcagagtgtaatgctgtccgccaggccctgcaggacctgctttcggagtacatgggcaatgctggacgtaaagaaagaagtgatgcactcaattctgcaatagataaaatgaccaagaagaccagggacttgcgtagacagctccgcaaagctgtcatggaccacgtttcagattctttcctggaaaccaatgttccacttttggtattgattgaagctgcaaagaatggaaatgagaaagaagttaaggagtatgcccaagttttccgtgaacatgccaacaaattgattgaggttgccaacttggcctgttccatctcaaataatgaagaaggtgtaaagcttgttcgaatgtctgcaagccagttagaagccctctgtcctcaggttattaatgctgcactggctttagcagcaaaaccacagagtaaactggcccaagagaacatggatctttttaaagaacaatgggaaaaacaagtccgtgttctcacagatgctgtcgatgacattacttccattgatgacttcttggctgtctcagagaatcacattttggaagatgtgaacaaatgtgtcattgctctccaagagaaggatgtggatggcctggaccgcacagctggtgcaattcgaggccgggcagcccgggtcattcacgtagtcacctcagagatggacaactatgagccaggagtctacacagagaaggttctggaagccactaagctgctctccaacacagtcatgccacgttttactgagcaagtagaagcagccgtggaagccctcagctcggaccctgcccagcccatggatgagaatgagtttatcgatgcttcccgcctggtatatgatggcatccgggacatcaggaaagcagtgctgatgataaggacccctgaggagttggatgactctgactttgagacagaagattttgatgtcagaagcaggacgagcgtccagacagaagacgatcagctgatagctggccagagtgcccgggcgatcatggctcagcttccccaggagcaaaaagcgaagattgcggaacaggtggccagcttccaggaagaaaagagcaagctggatgctgaagtgtccaaatgggacgacagtggcaatgacatcattgtgctggccaagcagatgtgcatgattatgatggagatgacagactttacccgaggtaaaggaccactcaaaaatacatcggatgtcatcagtgctgccaagaaaattgctgaggcaggatccaggatggacaagcttggccgcaccattgcagaccattgccccatcgcttgcagcaggactgtggctactgacgatgnctt

SEQ ID NO: 362187 - DNA, 1953 bp, Homo sapiens
gtcagtctaagtccgcgtgaaagccctcctgctcggcacctgcacagcctctggctgacactgacctttatcgccattgcttaccgcttgtgattgtagtggcatcggtgcgagattaggaatacttagcatgttgaattaggagccctgtaggattcggttgtgaccgggtttgatacacatgatttggatttgtccgatagcacgtttgacgtgtcacatgtctcatgtacgatcggctctaccgctgtgcaagtgcctgtgcgaactctgagtatcttgtgttcccctgtatcttcatccctaaaatctagcggtgcagcaacgtgtggtgtcccccttctgcgaatgctagagcagtctaggagtagacgggactgttcgctccaatttcgatgtgagtgtgtgatgtttcattgtagacttagagactcgtctcctagtgtcatgattatgatggagatgacagactttacccgaggtaaaggaccactcaaaaatacatcggatgtcatcagtgctgccaagaaaattgctgaggcaggatccaggatggacaagcttggccgcaccattgcagaccattgccccgactcggcttgcaagcaggacctgctggcctacctgcaacgcatcgccctctactgccaccagctgaacatctgcagcaaggtcaaggccgaggtgcagaatctcggcggggagcttgttgtctctggggtggacagcgccatgtccctgatccaggcagccaagaacttgatgaatgctgtggtgcagacagtgaaggcatcctacgtcgcctctaccaaataccaaaagtcacagggtatggcttccctcaaccttcctgctgtgtcatggaagatgaaggcaccagagaaaaagccattggtgaagagagagaaacaggatgagacacagaccaagattaaacgggcatctcagaagaagcacgtgaacccggtgcaggccctcagcgagttcaaagctatggacagcatctaagtctgcccaggccggccgcccccacccctcggggctcctgaatatcagtcactgttcgtcactcaaatgaatttgctaaatacaacactgatactagattccacagggaaatgggcagactgaaccagtccaggtggtgaattttccaagaacatagtttaagttgattaaaaatgcttttagaatgcaggagcctacttctagctgtattttttgtatgcttaaataaaaataaaaattcataaccaaagagaatcccacattagcttgttagtaatgctctgaccaagccgagatgcccattctcttagtgatggcggcgttagggtttgagagaagggaatttggctcaacttcagttgagagggtgcagtccagacagcttgactgcttttaaatgaccaaagatgacctgtggtaagcaacctgggcatcttaggaagcagtccctggagaaggcatgttcccagaaaggtctctggagggacaaactcactcagtaaaacataatgtatcatgaagaaaactgattctctatgacatgaaatgaaaattttaatgcattgttataattactaatgtacgctgctgcaggacattaataaagttgcttttttaggctacagtgtctcgatgccataatcagaacacactttttttcctctttctcccagcttcaaatgcaaattcatcattgggctcacttctaataactgcagtgtttcccgccttgggcttgcagcagaaaaacctgacaacatagtgtttgctaaggcagtaatttagactttaccttatttgtgattactgtagtgattgattgattgattactattaactacaaggtataatttactatcaccttatttaaattttatgaattaatttgaatgttttttacactaactaacttttcccaataaagtccactatgaaaccacgaca

SEQ ID NO: 362188 - DNA, 1328 bp, Homo sapiens
aagttcggcacgacggtgcacgcagcatgaacagtctgcagcagaggtcaaggccagaggtgcagaatctcggcggggagcttgttgtctctggggtggacagcgccatgtccctgatccaggcagccaagaacttgatgaatgctgtggtgcagacagtgaaggcatcctacgtcgcctctaccaaataccaaaagtcacagggtatggcttccctcaaccttcctgctgtgtcatggaagatgaaggcaccagagaaaaagccattggtgaagagagagaaacaggatgagacacagaccaagattaaacgggcatctcagaagaagcacgtgaacccggtgcaggccctcagcgagttcaaagctatggacagcatctaagtctgcccaggccggccgcccccacccctcggggctcctgaatatcagtcactgttcgtcactcaaatgaatttgctaaatacaacactgatactagattccacagggaaatgggcagactgaaccagtccaggtggtgaattttccaagaacatagtttaagttgattaaaaatgcttttagaatgcaggagcctacttctagctgtattttttgtatgcttaaataaaaataaaaattcataaccaaagagaatcccacattagcttgttagtaatgctctgaccaagccgagatgcccattctcttagtgatggcggcgttagggtttgagagaagggaatttggctcaacttcagttgagagggtgcagtccagacagcttgactgcttttaaatgaccaaagatgacctgtggtaagcaacctgggcatcttaggaagcagtccctggagaaggcatgttcccagaaaggtctctggagggacaaactcactcagtaaaacataatgtatcatgaagaaaactgattctctatgacatgaaatgaaaattttaatgcattgttataattactaatgtacgctgctgcaggacattaataaagttgcttttttaggctacagtgtctcgatgccataatcagaacacactttttttcctctttctcccagcttcaaatgcaaattcatcattgggctcacttctaataactgcagtgtttcccgccttgggcttgcagcagaaaaacctgacaacatagtgtttgctaaggcagtaatttagactttaccttatttgtgattactgtagtgattgattgattgattactattaactacaaggtataatttactatcaccttatttaaattttatgaattaatttgaatgttttttacactaactaacttttcccaataaagtccactatgaaaccacgaca

SEQ ID NO: 362189 - DNA, 1345 bp, Homo sapiens
ctagctccccgcggagattctgcaccccggccttgaccttgctgctgatgttcagctggtggcagtagagggcgatgcgttgcaggtaggccagcaggtcctgcttgcaagccgagtcggggcaatggtctgcaatggtgcggccaagaacttgatgaatgctgtggtgcagacagtgaaggcatcctacgtcgcctctaccaaataccaaaagtcacagggtatggcttccctcaaccttcctgctgtgtcatggaagatgaaggcaccagagaaaaagccattggtgaagagagagaaacaggatgagacacagaccaagattaaacgggcatctcagaagaagcacgtgaacccggtgcaggccctcagcgagttcaaagctatggacagcatctaagtctgcccaggccggccgcccccacccctcggggctcctgaatatcagtcactgttcgtcactcaaatgaatttgctaaatacaacactgatactagattccacagggaaatgggcagactgaaccagtccaggtggtgaattttccaagaacatagtttaagttgattaaaaatgcttttagaatgcaggagcctacttctagctgtattttttgtatgcttaaataaaaataaaaattcataaccaaagagaatcccacattagcttgttagtaatgctctgaccaagccgagatgcccattctcttagtgatggcggcgttagggtttgagagaagggaatttggctcaacttcagttgagagggtgcagtccagacagcttgactgcttttaaatgaccaaagatgacctgtggtaagcaacctgggcatcttaggaagcagtccctggagaaggcatgttcccagaaaggtctctggagggacaaactcactcagtaaaacataatgtatcatgaagaaaactgattctctatgacatgaaatgaaaattttaatgcattgttataattactaatgtacgctgctgcaggacattaataaagttgcttttttaggctacagtgtctcgatgccataatcagaacacactttttttcctctttctcccagcttcaaatgcaaattcatcattgggctcacttctaataactgcagtgtttcccgccttgggcttgcagcagaaaaacctgacaacatagtgtttgctaaggcagtaatttagactttaccttatttgtgattactgtagtgattgattgattgattactattaactacaaggtataatttactatcaccttatttaaattttatgaattaatttgaatgttttttacactaactaacttttcccaataaagtccactatgaaaccacgaca

SEQ ID NO: 362190 - DNA, 1650 bp, Homo sapiens
  misc_feature (19)..(19): n is a, c, g, or t
  misc_feature (22)..(22): n is a, c, g, or t
acggctaggtacgaggctnggngttgaatcggccgaggcgtctgcttcgggcctctggaatttagcgctcgcccagctagccgcagaaatgactgctgtccatgcaggcaacataaacttcaagtgggatcctaaaagtctagagatcaggactctggcagttgagagactgttggagcctcttgttacacaggttacaacccttgtaaacaccaatagtaaagggccctctaataagaagagaggtcgttctaagaaggcccatgttttggctgcatctgttgaacaagcaactgagaatttcttggagaagggggataaaattgcgaaggagagccagtttctcaaggaggagcttgtggctgctgtagaagatgttcgaaaacaaggtgatttgatgaaggctgctgcaggagagttcgcagatgatccctgctcttctgtgaagcgaggcaacatggttcgggcagctcgagctttgctctctgctgttacccggttgctgattttggctgacatggcagatgtctacaaattacttgttcagctgaaagttgtggaagatggtatcttgaagttgaggaatgctggcaatgaacaagacttaggaatccagtataaagccctaaaacctgaagtggataagctgaacattatggcagccaaaagacaacaggaattgaaagatgttggccatcgtgatcagatggctgcagctagaggaatcctgcagaagaacgttccgatcctctatactgcatcccaggcatgcctacagcaccctgatgtcgcagcctataaggccaacagggacctgatatacaagcagctgcagcaggcggtcacaggcatttccaatgcagcccaggccactgcctcagacgatgcctcacagcaccagggtggaggaggaggagaactggcatatgcactcaataactttgacaaacaaatcattgtggaccccttgagcttcagcgaggagcgctttaggccttccctggaggagcgtctggaaagcatcattagtggggctgccttgatggccgactcgtcctgcacgcgtgatgaccgtcgtgagcgaattgtggcagagtgtaatgctgtccgccaggccctgcaggacctgctttcggagtacatgggcaatgctggacgtaaagaaagaagtgatgcactcaattctgcaatagataaaatgaccaagaagaccagggacttgcgtagacagctccgcaaagctgtcatggaccacgtttcagattctttcctggaaaccaatgttccacttttggtattgattgaagctgcaaagaatggaaatgagaaagaagttaaggagtatgcccaagttttccgtgaacatgccaacaaattgattgaggttgccaacttggcctgttccatctcaaataatgaagaagtgtttcccgccttgggcttgcagcagaaaaacctgacaacatagtgtttgctaaggcagtaatttagactttaccttatttgtgattactgtagtgattgattgattgattactattaactacaaggtataatttactatcaccttatttaaattttatgaattaatttgaatgttttttacactaactaacttttcccaataaagtccactatgaaaccacgaca

SEQ ID NO: 362191 - DNA, 1519 bp, Homo sapiens
  misc_feature (19)..(19): n is a, c, g, or t
  misc_feature (22)..(22): n is a, c, g, or t
acggctaggtacgaggctnggngttgaatcggccgaggcgtctgcttcgggcctctggaatttagcgctcgcccagctagccgcagaaatgactgctgtccatgcaggcaacataaacttcaagtgggatcctaaaagtctagagatcaggactctggcagttgagagactgttggagcctcttgttacacaggttacaacccttgtaaacaccaatagtaaagggccctctaataagaagagaggtcgttctaagaaggcccatgttttggctgcatctgttgaacaagcaactgagaatttcttggagaagggggataaaattgcgaaggagagccagtttctcaaggaggagcttgtggctgctgtagaagatgttcgaaaacaaggtgatttgatgaaggctgctgcaggagagttcgcagatgatccctgctcttctgtgaagcgaggcaacatggttcgggcagctcgagctttgctctctgctgttacccggttgctgattttggctgacatggcagatgtctacaaattacttgttcagctgaaagttgtggaagatggtatcttgaagttgaggaatgctggcaatgaacaagacttaggaatccagtataaagccctaaaacctgaagtggataagctgaacattatggcagccaaaagacaacaggaattgaaagatgttggccatcgtgatcagatggctgcagctagaggaatcctgcagaagaacgttccgatcctctatactgcatcccaggcatgcctacagcaccctgatgtcgcagcctataaggccaacagggacctgatatacaagcagctgcagcaggcggtcacaggcatttccaatgcagcccaggccactgcctcagacgatgcctcacagcaccagggtggaggaggaggagaactggcatatgcactcaataactttgacaaacaaatcattgtggaccccttgagcttcagcgaggagcgctttaggccttccctggaggagcgtctggaaagcatcattagtggggctgccttgatggccgactcgtcctgcacgcgtgatgaccgtcgtgagcgaattgtggcagagtgtaatgctgtccgccaggccctgcaggacctgctttcggagtacatgggcaatgctggacgtaaagaaagaagtgatgcactcaattctgcaatagataaaatgaccaagaagaccagggacttgcgtagacagctccgcaaagctgtcatggaccacgtttcagattctttcctggaaaccaatgttccacttttggtattgattgaagctgcaaagaatggaaatgagaaagaagttaaggagtatgcccaagttttccgtgaacatgccaacaaattgattgaggttaagtgaattagcagtttcattgacttgtaggcaacttggtgaagtgtggtgagttttaatcacattatttaatcagttaaaatttgtaagggctcgcttaacatacaacatgtctgagatgatagtctttca

SEQ ID NO: 362192 - DNA, 1100 bp, Homo sapiens
  misc_feature (19)..(19): n is a, c, g, or t
  misc_feature (22)..(22): n is a, c, g, or t
acggctaggtacgaggctnggngttgaatcggccgaggcgtctgcttcgggcctctggaatttagcgctcgcccagctagccgcagaaatgactgctgtccatgcaggcaacataaacttcaagtgggatcctaaaagtctagagatcaggactctggcagttgagagactgttggagcctcttgttacacaggttacaacccttgtaaacaccaatagtaaagggccctctaataagaagagaggtcgttctaagaaggcccatgttttggctgcatctgttgaacaagcaactgagaatttcttggagaagggggataaaattgcgaaggagagccagtttctcaaggaggagcttgtggctgctgtagaagatgttcgaaaacaaggtgatttgatgaaggctgctgcaggagagttcgcagatgatccctgctcttctgtgaagcgaggcaacatggttcgggcagctcgagctttgctctctgctgttacccggttgctgattttggctgacatggcagatgtctacaaattacttgttcagctgaaagttgtggaagatggtatcttgaagttgaggaatgctggcaatgaacaagacttaggaatccagtataaagccctaaaacctgaagtggataagctgaacattatggcagccaaaagacaacaggaattgaaagatgttggccatcgtgatcagatggctgcagctagaggaatcctgcagaagaacgttccgatcctctatactgcatcccaggcatgcctacagcaccctgatgtcgcagcctataaggccaacagggacctgatatacaagcagctgcagcaggcggtcacaggcatttcgtggctgcccacgaagtgggggttcgggaaacgcaactcagcagcaaggtggtacagaagttggtcctgcccttggcggcgaactgaactacctgcccctggaaacagcaggtttatgccctggcttgagaggatccgggctcgggaagcagggggtgcaccccttggctacagtcaaccatctggatgtcactgtgccaaactggggtgcctgcccttaagagccctgcacttcggggggcaag

SEQ ID NO: 362193 - DNA, 1074 bp, Homo sapiens
  misc_feature (19)..(19): n is a, c, g, or t
  misc_feature (22)..(22): n is a, c, g, or t
acggctaggtacgaggctnggngttgaatcggccgaggcgtctgcttcgggcctctggaatttagcgctcgcccagctagccgcagaaatgactgctgtccatgcaggcaacataaacttcaagtgggatcctaaaagtctagagatcaggactctggcagttgagagactgttggagcctcttgttacacaggttacaacccttgtaaacaccaatagtaaagggccctctaataagaagagaggtcgttctaagaaggcccatgttttggctgcatctgttgaacaagcaactgagaatttcttggagaagggggataaaattgcgaaggagagccagtttctcaaggaggagcttgtggctgctgtagaagatgttcgaaaacaaggtgatttgatgaaggctgctgcaggagagttcgcagatgatccctgctcttctgtgaagcgaggcaacatggttcgggcagctcgagctttgctctctgctgttacccggttgctgattttggctgacatggcagatgtctacaaattacttgttcagctgaaagttgtggaagatggtatcttgaagttgaggaatgctggcaatgaacaagacttaggaatccagtataaagccctaaaacctgaagtggataagctgaacattatggcagccaaaagacaacaggaattgaaagatgttggccatcgtgatcagatggctgcagctagaggaatcctgcagaagaacgttccgatcctctatactgcatcccaggcatgcctacagcaccctgatgtcgcagcctataaggccaacagggacctgatatacaagcagacagcttgactgcttttaaatgaccaaagatgacctgtggtaagcaacctgggcatcttaggaagcagtccctggagaaggcatgttcccagaaaggtctctggagggacaaactcactcagtaaaacataatgtatcatgaagaaaactgattctctatgacatgaaatgaaaattttaatgcattgttataattactaatgtacgctgctgcaggacattaataaagttgcttttttaggcta

SEQ ID NO: 362194 - DNA, 957 bp, Homo sapiens
  misc_feature (46)..(46): n is a, c, g, or t
  misc_feature (642)..(642): n is a, c, g, or t
  misc_feature (648)..(648): n is a, c, g, or t
  misc_feature (862)..(862): n is a, c, g, or t
ggtcaagtagacgattatttgccagccgccccccaccctgggttcngattcatcatgttcgtcactcaaatgaatttgctaaatacaacactgatactagattccacagggaaatgggcagactgaaccagtccaggtggtgaattttccaagaacatagtttaagttgattaaaaatgcttttagaatgcaggagcctacttctagctgtattttttgtatgcttaaataaaaataaaaattcataaccaaagagaatcccacattagcttgttagtaatgctctgaccaagccgagatgcccattctcttagtgatggcggcgttagggtttgagagaagggaatttggctcaacttcagttgagagggtgcagtccagacagcttgactgcttttaaatgaccaaagatgacctgtggtaagcaacctgggcatcttaggaagcagtccctggagaaggcatgttcccagaaaggtctctggagggacaaactcactcagtaaaacataatgtatcatgaagaaaactgattctctatgacatgaaatgaaaattttaatgcattgttataattactaatgtacgctgctgcaggacattaataaagttgcttttttaggctaaaaaaaaaaaaaaatnaaaaanaaaaaaaaaaatcgggggttctaatggggggggcgggacaaaacggggtacatggaatgggcccattgggccatagctggtcttcctgacccagggtttttctttgtgtacaacggtgggcagaaactggcggcgggtcccccctaatagggaggccgaattaaattccggaaaaggccggggttaacccgggcttagatgcttcggaaaaaantatacataacacgaacgcatacctccacacacactccaatcaacacaatccattgccctcacactcaaacacatccgcaatcacaacaacaaaat

SEQ ID NO: 362195 - DNA, 863 bp, Homo sapiens
  misc_feature (19)..(19): n is a, c, g, or t
  misc_feature (22)..(22): n is a, c, g, or t
acggctaggtacgaggctnggngttgaatcggccgaggcgtctgcttcgggcctctggaatttagcgctcgcccagctagccgcagaaatgactgctgtccatgcaggcaacataaacttcaagtgggatcctaaaagtctagagatcaggactctggcagttgagagactgttggagcctcttgttacacaggttacaacccttgtaaacaccaatagtaaagggccctctaataagaagagaggtcgttctaagaaggcccatgttttggctgcatctgttgaacaagcaactgagaatttcttggagaagggggataaaattgcgaaggagagccagtttctcaaggaggagcttgtggctgctgtagaagatgttcgaaaacaaggtgatttgatgaaggctgctgcaggagagttcgcagatgatccctgctcttctgtgaagcgaggcaacatggttcgggcagctcgagctttgctctctgctgttacccggttgctgattttggctgacatggcagatgtctacaaattacttgttcagctgaaagttgtggaagatggtatcttgaagttgaggaatgctggcaatgaacaagacttaggaatccagtataaagccctaaaacctgaagtggataagctgaacattatggcagccttcagataaaatgggctgctatgattcatttttataagaaactatcaaactgttttccaaagtggctgtaccattttgaattcccgctatgagtatcccagcgtgccttgcatattcacaaccttgaggtaatggcagttttgtggatctgggccagtctggtggggcagcattcagataaaaggggatccttagagtc

SEQ ID NO: 362196 - DNA, 1168 bp, Homo sapiens
  misc_feature (19)..(19): n is a, c, g, or t
  misc_feature (22)..(22): n is a, c, g, or t
acggctaggtacgaggctnggngttgaatcggccgaggcgtctgcttcgggcctctggaatttagcgctcgcccagctagccgccagattgctgatttggtcaagatgtaaacatatcgtagagctccagcatgggggctcacgcctgtaatacaaacactttggaaggccaaggtgggagaatcactcaagcccaggagtttaagatcaacctgggcaacaaaatcaggccaagcaattctggccattgggacgtccattatactgctcacctggaaaaggcagcgcccagcacaaacgcagcatactccttcacgaggggctctgtgctgttcagcccattgatcaccacttgaagaccaccaaaggaaagcaggttgactgcatctgaagacattcatgataaaatatgcaagaaaatcgctctcccaaaggtttctgtctaagcctgtgctactggctagtggctatgtatcagacagtgcagaacatttctatcattacataaagttctattcaacagcattggtctaggctatcatttaagctccaaatccccaagtccggattctctcttttactctatagcggatctcattacccacagtttattagtaccctggaacaagacaactcgctttcctcagaaaggtcactggatcctgttttctacatgtacccgctacagtctccctcgaatatatctttgttgccacaaaggctgcatcttgcccatatgctaatcccacgctatcaatcatgaggaaaactcaggaagctgaagcccaacaactgtggctgctacccatctttctcctccagattccacagggccccttcccaactgcatccttgcctctctgaactaggagaggactctgacagagaaatcaagtgtgaggattggtatttgactgtgctagtgttttgtggtggcctagcctgttgttgccacttgaaaaatcatattcatacacatttggatggaatctccatgacagcaggggttttgtctgtctgtccacgcttgtagctccagggactaggatggtgctgagcatatggttaggtgttcaatgaataactgttgcattaatgagtatgaatttgatcagaaaagaatgttcctgaaataaagctccagtgtgaataaaaaggcaatctgggg

SEQ ID NO: 362197 - DNA, 890 bp, Homo sapiens
  misc_feature (19)..(19): n is a, c, g, or t
  misc_feature (22)..(22): n is a, c, g, or t
acggctaggtacgaggctnggngttgaatcggccgaggcgtctgcttcgggcctctggaatttagcgctcgcccagctagccgccagattgctgatttggtcaagatgtaaacatatcgtagagctccagcatgggggctcacgcctgtaatacaaacactttggaaggccaaggtgggagaatcactcaagcccaggagtttaagatcaacctgggcaacaaaaatttctctcactttcttacagggctaccacataaagaatatgacattattaaattcccctgcagttacacagagcagtggctctacagtttcttgttggctgaattaagcatttaaagaaatgtttaagtatttaatacaacatcttcaggtatttgaactaagagagtttcttgggaaatgtgctatttgatagattgagaagtctcccagtgctgttttgctttgtttcatcactcactatttaaatgttaattacaaaaataatacatactcactggaagaaaaatcaaacaaactcaaagcacagaaaaattttaaagcctccttgctcttggtggctttctttctcccaccaatttttggtgacttcaatttttgtgttagaccatttatgttcaaagcatccacatgaaacttaccctctataaggtgctgtgagcaccacagacttgaataccagttcccatgctcaagaagccttcaatcttgttgaggagatagatgaaagaactggcttacaacagagaagtagatgtattaaagagtcagttttcccagcactctgggaggctgaggcaggtggatcacctgaggtctggagttcgagaccagcctgaccaacatggagaaaccccatctctactaaaaatacaaaattagccg

SEQ ID NO: 362198 - DNA, 767 bp, Homo sapiens
  misc_feature (19)..(19): n is a, c, g, or t
  misc_feature (22)..(22): n is a, c, g, or t
acggctaggtacgaggctnggngttgaatcggccgaggcgtctgcttcgggcctctggaatttagcgctcgcccagctagccgcagagacagagtttcaccgtgtttcccaggctggtctcaaactcctgagctcaagtgatccacctgccttggcctcccaaagagctgagattacaggcgtgacccactgcgcctggcccactttgaagtcctaaagaaatttaggttattattctatgcatgttggaggatttaagtcttattagcagcttctgttttctgtaaggaaaaagttaaaacacatctggaagagtctcatagagcagcactttctgaaacttgcctgggtaccagtatgcctgcttccagaccttgaagatattacatgtactgcttggtgatctgccctgtcccccacatgttgtgggcctggattgaatggactgaacagtgtggggaattagtccagcgtgacttgccttgtctcatgctgtttgctcacttgtgagagcactatactgaattatccattattgaaagttccaagtgtgcaaagaaccacacttcaaaaataaaatgtcaacattgccctttctctgttagagccttaaatgttcattattttctttagtttttttttataactatcaaacttatttttctccatgtggaagtatgccacaactccatttctaatggagcttgaaattagcatgtatttccacttacttgttgatgggctgtcatcgatcaacccctcttttt

SEQ ID NO: 362199 - DNA, 426 bp, Homo sapiens
  misc_feature (19)..(19): n is a, c, g, or t
  misc_feature (22)..(22): n is a, c, g, or t
acggctaggtacgaggctnggngttgaatcggccgaggcgtctgcttcgggcctctggaatttagcgctcgcccagctagccgccagattgctgatttggtcaagatgtaaacatatcgtagagctccagcatgggggctcacgcctgtaatacaaacactttggaaggccaaggtgggagaatcactcaagcccaggagtttaagatcaacctgggcaacaaagtaagaccctgtctctacaaaacaataaaaagtaaaaactagccaggcatggagcatatgcctgtggtctcagctagacaggaggctgaggcaggagactgagtctgcagtaagccgtgtttgcaccactgcactctaggcttgggtgatacagcaagatctgtctcaaaaaataaaacaaaaagtacatacattgtaacta

SEQ ID NO: 362200 - DNA, 442 bp, Homo sapiens
accagggtggaggaggaggagaactggcatatgcactcaataactttgacgtaagttatgcttgggtggaaatttccagctcttgaccatcccccaaaagataacagatttctggggaaaagtgatcaaggcttctgatgatagctcaatttccacttagatctttaatctaagtcaaaagaaattatgaatcatcagtctacttgattttaacttggcctaaaacatttatttttatttttgtttttagtttgaattaaacttctggattcttttatgtagcttgtgtttcctatgaggtcattctttactgaggatatgggtttggttcatttcaaccaagattttgaccttctggcagatgtgaagctatggtagatacagaaactaagtacacgtagggtcagccccctagaggctcgtggtctattgggagatagag

SEQ ID NO: 362201 - DNA, 366 bp, Homo sapiens
catgaaatatacaaagtttggattatttttatatttttaaaaatgtagatcagttatttgagttcattcttgctgagtttgtttttcattctgtaaaacaggtgatttgatgaaggctgctgcaggagagttcgcagatgatccctgctcttctgtgaagcgaggcaacatggttcgggcagctcgagctttgctctctgctgttacccggttgctgattttggctgacatggcagatgtctacaaattacttgttcagctgaaagttgtaagtatacaggcctatgtctgtaatttgttctatcacaggaagattgctactggccttccttagttcagtattccttaggatttagtttggttttg

SEQ ID NO: 362202 - DNA, 205 bp, Homo sapiens
caactgctttttttcttgctttactttactcacttgtcttccacctcagcctgcagtgagtggcttttgtcatcaggcattaataacgcaaagtgcctcagagcagaagagttaactatttgtttacttagctaaaaacatctggacttttctccatagccaggctcctgcttgctgagccggcttgttctcacctcgaggggca

SEQ ID NO: 362203 - DNA, 356 bp, Homo sapiens
cctatccgcataaacacctgccctgggaaagtgtgctgtgcagaaactccaagtcctgtcccagtctctggagaccaaggtctgtccatcatctgttccctgtaggaactgtgacacctgcggggcactgcaagggctgaaaggctggcctcctcccctttgctggccactcactgggtaggaatttttaaaaatcttccttgggaccgggcgtggtggcaggtacctgtaagtcccagctacttgggaggctgagacacaataattacttgagcctgggagatggaggttgcagtgagccgagatggcaccactgcactcccgtctgggcaacagaacaagactgtctcaaaaca

SEQ ID NO: 362204 - DNA, 427 bp, Homo sapiens
cagaacactgcacattaaaatccagaattctgggcctccgtgcacctggccaagaggctcagggtggctgggggctggtggcccagagatgtgtctgacctgtgatctttgtctgggtggcagacccctgaggagttggatgactctgactttgagacagaagattttgatgtcagaagcaggacgagcgtccagacagaagacgatcagctgatagctggccagagtgcccgggtaaggaagcgctccgtggggcagttcagcttgtgctgccgactttccctgtcccctttcttgtttccaggaaaacaccctcagtattcagaacaccgtttctctctctctgtctctctggcagtagactgaagttaaactaagttgtggcacctgctagtcaaatgtagcctcctcagctagaggcagacca

SEQ ID NO: 362205 - DNA, 571 bp, Homo sapiens
ttttaaaaacctggaatgaagattgttattcttgggggtgataacaggtttagtttctgtctctgtcactagtcactggtctctccaatgaagtatatgtaaaactttcagcactgtggctggcaccaagcaaacaataaatgatagatgccagcttacagttgccaccttttcatagaaagcctccttcctcattcaactttttgcttgttctccagagaatcacattttggaagatgtgaacaaatgtgtcattgctctccaagagaaggatgtggatggcctggaccgcacagctggtgcaattcgaggccgggcagcccgggtcattcacgtagtcacctcagagatggacaactatgagccaggagtctacacagagaaggttctggaagccactaagctgctctccaacacaggtacgggaactctccctttccagtgctcgcacacaccgcagcctcagtgaggcaggccaccccattagcccagccctgtggtgaggaaggaggagttgggaactcagatttggtctcatggcacatcgggctcctgagaagctggtcatagc

SEQ ID NO: 362206 - DNA, 3443 bp, Homo sapiens
cggcccatttcctcctcctagccggactggagggagacaaagcagcgcccgtctgcttcgggcctctggaatttagcgctcgcccagctagccgcagaaatgactgctgtccatgcaggcaacataaacttcaagtgggatcctaaaagtctagagatcaggactctggcagttgagagactgttggagcctcttgttacacaggttacaacccttgtaaacaccaatagtaaagggccctctaataagaagagaggtcgttctaagaaggcccatgttttggctgcatctgttgaacaagcaactgagaatttcttggagaagggggataaaattgcgaaggagagccagtttctcaaggaggagcttgtggctgctgtagaagatgttcgaaaacaaggtgatttgatgaaggctgctgcaggagagttcgcagatgatccctgctcttctgtgaagcgaggcaacatggttcgggcagctcgagctttgctctctgctgttacccggttgctgattttggctgacatggcagatgtctacaaattacttgttcagctgaaagttgtggaagatggtatcttgaagttgaggaatgctggcaatgaacaagacttaggaatccagtataaagccctaaaacctgaagtggataagctgaacattatggcagccaaaagacaacaggaattgaaagatgttggccatcgtgatcagatggctgcagctagaggaatcctgcagaagaacgttccgatcctctatactgcatcccaggcatgcctacagcaccctgatgtcgcagcctataaggccaacagggacctgatatacaagcagctgcagcaggcggtcacaggcatttccaatgcagcccaggccactgcctcagacgatgcctcacagcaccagggtggaggaggaggagaactggcatatgcactcaataactttgacaaacaaatcattgtggaccccttgagcttcagcgaggagcgctttaggccttccctggaggagcgtctggaaagcatcattagtggggctgccttgatggccgactcgtcctgcacgcgtgatgaccgtcgtgagcgaattgtggcagagtgtaatgctgtccgccaggccctgcaggacctgctttcggagtacatgggcaatgctggacgtaaagaaagaagtgatgcactcaattctgcaatagataaaatgaccaagaagaccagggacttgcgtagacagctccgcaaagctgtcatggaccacgtttcagattctttcctggaaaccaatgttccacttttggtattgattgaagctgcaaagaatggaaatgagaaagaagttaaggagtatgcccaagttttccgtgaacatgccaacaaattgattgaggttgccaacttggcctgttccatctcaaataatgaagaaggtgtaaagcttgttcgaatgtctgcaagccagttagaagccctctgtcctcaggttattaatgctgcactggctttagcagcaaaaccacagagtaaactggcccaagagaacatggatctttttaaagaacaatgggaaaaacaagtccgtgttctcacagatgctgtcgatgacattacttccattgatgacttcttggctgtctcagagaatcacattttggaagatgtgaacaaatgtgtcattgctctccaagagaaggatgtggatggcctggaccgcacagctggtgcaattcgaggccgggcagcccgggtcattcacgtagtcacctcagagatggacaactatgagccaggagtctacacagagaaggttctggaagccactaagctgctctccaacacagtcatgccacgttttactgagcaagtagaagcagccgtggaagccctcagctcggaccctgcccagcccatggatgagaatgagtttatcgatgcttcccgcctggtatatgatggcatccgggacatcaggaaagcagtgctgatgataaggacccctgaggagttggatgactctgactttgagacagaagattttgatgtcagaagcaggacgagcgtccagacagaagacgatcagctgatagctggccagagtgcccgggcgatcatggctcagcttccccaggagcaaaaagcgaagattgcggaacaggtggccagcttccaggaagaaaagagcaagctggatgctgaagtgtccaaatgggacgacagtggcaatgacatcattgtgctggccaagcagatgtgcatgattatgatggagatgacagactttacccgaggtaaaggaccactcaaaaatacatcggatgtcatcagtgctgccaagaaaattgctgaggcaggatccaggatggacaagcttggccgcaccattgcagaccattgccccgactcggcttgcaagcaggacctgctggcctacctgcaacgcatcgccctctactgccaccagctgaacatctgcagcaaggtcaaggccgaggtgcagaatctcggcggggagcttgttgtctctggggtggacagcgccatgtccctgatccaggcagccaagaacttgatgaatgctgtggtgcagacagtgaaggcatcctacgtcgcctctaccaaataccaaaagtcacagggtatggcttccctcaaccttcctgctgtgtcatggaagatgaaggcaccagagaaaaagccattggtgaagagagagaaacaggatgagacacagaccaagattaaacgggcatctcagaagaagcacgtgaacccggtgcaggccctcagcgagttcaaagctatggacagcatctaagtctgcccaggccggccgcccccacccctcggggctcctgaatatcagtcactgttcgtcactcaaatgaatttgctaaatacaacactgatactagattccacagggaaatgggcagactgaaccagtccaggtggtgaattttccaagaacatagtttaagttgattaaaaatgcttttagaatgcaggagcctacttctagctgtattttttgtatgcttaaataaaaataaaaattcataaccaaagagaatcccacattagcttgttagtaatgctctgaccaagccgagatgcccattctcttagtgatggcggcgttagggtttgagagaagggaatttggctcaacttcagttgagagggtgcagtccagacagcttgactgcttttaaatgaccaaagatgacctgtggtaagcaacctgggcatcttaggaagcagtccctggagaaggcatgttcccagaaaggtctctggagggacaaactcactcagtaaaacataatgtatcatgaagaaaactgattctctatgacatgaaatgaaaattttaatgcattgttataattactaatgtacgctgctgcaggacattaataaagttgcttttttaggcta

SEQ ID NO: 362207 - DNA, 3754 bp, Homo sapiens
  misc_feature (19)..(19): n is a, c, g, or t
  misc_feature (22)..(22): n is a, c, g, or t
acggctaggtacgaggctnggngttgaatcggccgaggcgtctgcttcgggcctctggaatttagcgctcgcccagctagccgcagaaatgactgctgtccatgcaggcaacataaacttcaagtgggatcctaaaagtctagagatcaggactctggcagttgagagactgttggagcctcttgttacacaggttacaacccttgtaaacaccaatagtaaagggccctctaataagaagagaggtcgttctaagaaggcccatgttttggctgcatctgttgaacaagcaactgagaatttcttggagaagggggataaaattgcgaaggagagccagtttctcaaggaggagcttgtggctgctgtagaagatgttcgaaaacaaggtgatttgatgaaggctgctgcaggagagttcgcagatgatccctgctcttctgtgaagcgaggcaacatggttcgggcagctcgagctttgctctctgctgttacccggttgctgattttggctgacatggcagatgtctacaaattacttgttcagctgaaagttgtggaagatggtatcttgaagttgaggaatgctggcaatgaacaagacttaggaatccagtataaagccctaaaacctgaagtggataagctgaacattatggcagccaaaagacaacaggaattgaaagatgttggccatcgtgatcagatggctgcagctagaggaatcctgcagaagaacgttccgatcctctatactgcatcccaggcatgcctacagcaccctgatgtcgcagcctataaggccaacagggacctgatatacaagcagctgcagcaggcggtcacaggcatttccaatgcagcccaggccactgcctcagacgatgcctcacagcaccagggtggaggaggaggagaactggcatatgcactcaataactttgacaaacaaatcattgtggaccccttgagcttcagcgaggagcgctttaggccttccctggaggagcgtctggaaagcatcattagtggggctgccttgatggccgactcgtcctgcacgcgtgatgaccgtcgtgagcgaattgtggcagagtgtaatgctgtccgccaggccctgcaggacctgctttcggagtacatgggcaatgctggacgtaaagaaagaagtgatgcactcaattctgcaatagataaaatgaccaagaagaccagggacttgcgtagacagctccgcaaagctgtcatggaccacgtttcagattctttcctggaaaccaatgttccacttttggtattgattgaagctgcaaagaatggaaatgagaaagaagttaaggagtatgcccaagttttccgtgaacatgccaacaaattgattgaggttgccaacttggcctgttccatctcaaataatgaagaaggtgtaaagcttgttcgaatgtctgcaagccagttagaagccctctgtcctcaggttattaatgctgcactggctttagcagcaaaaccacagagtaaactggcccaagagaacatggatctttttaaagaacaatgggaaaaacaagtccgtgttctcacagatgctgtcgatgacattacttccattgatgacttcttggctgtctcagagaatcacattttggaagatgtgaacaaatgtgtcattgctctccaagagaaggatgtggatggcctggaccgcacagctggtgcaattcgaggccgggcagcccgggtcattcacgtagtcacctcagagatggacaactatgagccaggagtctacacagagaaggttctggaagccactaagctgctctccaacacagtcatgccacgttttactgagcaagtagaagcagccgtggaagccctcagctcggaccctgcccagcccatggatgagaatgagtttatcgatgcttcccgcctggtatatgatggcatccgggacatcaggaaagcagtgctgatgataaggacccctgaggagttggatgactctgactttgagacagaagattttgatgtcagaagcaggacgagcgtccagacagaagacgatcagctgatagctggccagagtgcccgggcgatcatggctcagcttccccaggagcaaaaagcgaagattgcggaacaggtggccagcttccaggaagaaaagagcaagctggatgctgaagtgtccaaatgggacgacagtggcaatgacatcattgtgctggccaagcagatgtgcatgattatgatggagatgacagactttacccgaggtaaaggaccactcaaaaatacatcggatgtcatcagtgctgccaagaaaattgctgaggcaggatccaggatggacaagcttggccgcaccattgcagaccattgccccgactcggcttgcaagcaggacctgctggcctacctgcaacgcatcgccctctactgccaccagctgaacatctgcagcaaggtcaaggccgaggtgcagaatctcggcggggagcttgttgtctctggggtggacagcgccatgtccctgatccaggcagccaagaacttgatgaatgctgtggtgcagacagtgaaggcatcctacgtcgcctctaccaaataccaaaagtcacagggtatggcttccctcaaccttcctgctgtgtcatggaagatgaaggcaccagagaaaaagccattggtgaagagagagaaacaggatgagacacagaccaagattaaacgggcatctcagaagaagcacgtgaacccggtgcaggccctcagcgagttcaaagctatggacagcatctaagtctgcccaggccggccgcccccacccctcggggctcctgaatatcagtcactgttcgtcactcaaatgaatttgctaaatacaacactgatactagattccacagggaaatgggcagactgaaccagtccaggtggtgaattttccaagaacatagtttaagttgattaaaaatgcttttagaatgcaggagcctacttctagctgtattttttgtatgcttaaataaaaataaaaattcataaccaaagagaatcccacattagcttgttagtaatgctctgaccaagccgagatgcccattctcttagtgatggcggcgttagggtttgagagaagggaatttggctcaacttcagttgagagggtgcagtccagacagcttgactgcttttaaatgaccaaagatgacctgtggtaagcaacctgggcatcttaggaagcagtccctggagaaggcatgttcccagaaaggtctctggagggacaaactcactcagtaaaacataatgtatcatgaagaaaactgattctctatgacatgaaatgaaaattttaatgcattgttataattactaatgtacgctgctgcaggacattaataaagttgcttttttaggctacagtgtctcgatgccataatcagaacacactttttttcctctttctcccagcttcaaatgcaaattcatcattgggctcacttctaataactgcagtgtttcccgccttgggcttgcagcagaaaaacctgacaacatagtgtttgctaaggcagtaatttagactttaccttatttgtgattactgtagtgattgattgattgattactattaactacaaggtataatttactatcaccttatttaaattttatgaattaatttgaatgttttttacactaactaacttttcccaataaagtccactatgaaaccacgaca

SEQ ID NO: 362208 - DNA, 6141 bp, Homo sapiens
  misc_feature (4526)..(4526): n is a, c, g, or t
  misc_feature (4573)..(4573): n is a, c, g, or t
cggcccatttcctcctcctagccggactggagggagacaaagcagcgcccgtctgcttcgggcctctggaatttagcgctcgcccagctagccgcagaaatgactgctgtccatgcaggcaacataaacttcaagtgggatcctaaaagtctagagatcaggactctggcagttgagagactgttggagcctcttgttacacaggttacaacccttgtaaacaccaatagtaaagggccctctaataagaagagaggtcgttctaagaaggcccatgttttggctgcatctgttgaacaagcaactgagaatttcttggagaagggggataaaattgcgaaggagagccagtttctcaaggaggagcttgtggctgctgtagaagatgttcgaaaacaaggtgatttgatgaaggctgctgcaggagagttcgcagatgatccctgctcttctgtgaagcgaggcaacatggttcgggcagctcgagctttgctctctgctgttacccggttgctgattttggctgacatggcagatgtctacaaattacttgttcagctgaaagttgtggaagatggtatcttgaagttgaggaatgctggcaatgaacaagacttaggaatccagtataaagccctaaaacctgaagtggataagctgaacattatggcagccaaaagacaacaggaattgaaagatgttggccatcgtgatcagatggctgcagctagaggaatcctgcagaagaacgttccgatcctctatactgcatcccaggcatgcctacagcaccctgatgtcgcagcctataaggccaacagggacctgatatacaagcagctgcagcaggcggtcacaggcatttccaatgcagcccaggccactgcctcagacgatgcctcacagcaccagggtggaggaggaggagaactggcatatgcactcaataactttgacaaacaaatcattgtggaccccttgagcttcagcgaggagcgctttaggccttccctggaggagcgtctggaaagcatcattagtggggctgccttgatggccgactcgtcctgcacgcgtgatgaccgtcgtgagcgaattgtggcagagtgtaatgctgtccgccaggccctgcaggacctgctttcggagtacatgggcaatgctggacgtaaagaaagaagtgatgcactcaattctgcaatagataaaatgaccaagaagaccagggacttgcgtagacagctccgcaaagctgtcatggaccacgtttcagattctttcctggaaaccaatgttccacttttggtattgattgaagctgcaaagaatggaaatgagaaagaagttaaggagtatgcccaagttttccgtgaacatgccaacaaattgattgaggttgccaacttggcctgttccatctcaaataatgaagaaggtgtaaagcttgttcgaatgtctgcaagccagttagaagccctctgtcctcaggttattaatgctgcactggctttagcagcaaaaccacagagtaaactggcccaagagaacatggatctttttaaagaacaatgggaaaaacaagtccgtgttctcacagatgctgtcgatgacattacttccattgatgacttcttggctgtctcagagaatcacattttggaagatgtgaacaaatgtgtcattgctctccaagagaaggatgtggatggcctggaccgcacagctggtgcaattcgaggccgggcagcccgggtcattcacgtagtcacctcagagatggacaactatgagccaggagtctacacagagaaggttctggaagccactaagctgctctccaacacagtcatgccacgttttactgagcaagtagaagcagccgtggaagccctcagctcggaccctgcccagcccatggatgagaatgagtttatcgatgcttcccgcctggtatatgatggcatccgggacatcaggaaagcagtgctgatgataaggacccctgaggagttggatgactctgactttgagacagaagattttgatgtcagaagcaggacgagcgtccagacagaagacgatcagctgatagctggccagagtgcccgggcgatcatggctcagcttccccaggagcaaaaagcgaagattgcggaacaggtggccagcttccaggaagaaaagagcaagctggatgctgaagtgtccaaatgggacgacagtggcaatgacatcattgtgctggccaagcagatgtgcatgattatgatggagatgacagactttacccgaggtaaaggaccactcaaaaatacatcggatgtcatcagtgctgccaagaaaattgctgaggcaggatccaggatggacaagcttggccgcaccattgcagaccattgccccgactcggcttgcaagcaggacctgctggcctacctgcaacgcatcgccctctactgccaccagctgaacatctgcagcaaggtcaaggccgaggtgcagaatctcggcggggagcttgttgtctctggggtggacagcgccatgtccctgatccaggcagccaagaacttgatgaatgctgtggtgcagacagtgaaggcatcctacgtcgcctctaccaaataccaaaagtcacagggtatggcttccctcaaccttcctgctgtgtcatggaagatgaaggcaccagagaaaaagccattggtgaagagagagaaacaggatgagacacagaccaagattaaacgggcatctcagaagaagcacgtgaacccggtgcaggccctcagcgagttcaaagctatggacagcatctaagtctgcccaggccggccgcccccacccctcggggctcctgaatatcagtcactgttcgtcactcaaatgaatttgctaaatacaacactgatactagattccacagggaaatgggcagactgaaccagtccaggtggtgaattttccaagaacatagtttaagttgattaaaaatgcttttagaatgcaggagcctacttctagctgtattttttgtatgcttaaataaaaataaaaattcataaccaaagagaatcccacattagcttgttagtaatgctctgaccaagccgagatgcccattctcttagtgatggcggcgttagggtttgagagaagggaatttggctcaacttcagttgagagggtgcagtccagacagcttgactgcttttaaatgaccaaagatgacctgtggtaagcaacctgggcatcttaggaagcagtccctggagaaggcatgttcccagaaaggtctctggagggacaaactcactcagtaaaacataatgtatcatgaagaaaactgattctctatgacatgaaatgaaaattttaatgcattgttataattactaatgtacgctgctgcaggacattaataaagttgcttttttaggctacagtgtctcgatgccataatcagaacacactttttttcctctttctcccagcttcaaatgcaaattcatcattgggctcacttctaataactgcagtgtttcccgccttgggcttgcagcagaaaaacctgacaacatagtgtttgctaaggcagtaatttagactttaccttatttgtgattactgtagtgattgattgattgattactattaactacaaggtataatttactatcaccttatttaaattttatgaattaatttgaatgttttttacactaactaacttttcccaataaagtccactatgaaaccacgacatccaagagcccaaagtcgtcttctctgccttcaagtcatagatttgcccgcagtatctgtggtgctctgggccctcccggtgtccgtctcttccaggatggggatgcccgggagggaaactgtctgtggctctaggctgcacggctcgtgccaacccatcagggagggccatgcccgttgtcctattgagtgccccaccctgcacccccaccttgggaattcacatgtccattccttgaggttcatgtcaacctcggaggcatccctgtcttcattatagctgacccctctcctgcgtccttctgtcagcatatcccttctgcatccttcccgtcacacatacataccaagctatgatgattgattgatagtggccttcgagatgaaaaccatccttaaccccatgatccttcccagctggcatccccaccctaagcaaggttccctaaagagaagcttgttgacattttctccccttcctcacttacagtcagctgtcaccttgctccctccacctcccctcgtcaaggtgactgccttccactgccagccacactggcaattgtcttgagacctcaccgtgcaagcggcctgggggcgtggcggggaggaggaggaggacaaggactcctgaacgctgctcactcggcttccaggacaccccgctcaggttctgcctgccttactgggggctccttctcctttcctggggctgagaggttgtgtctgtgcccactctcctgagctcagccagaatctcncatgtaaagacatccaaatgccgacttcttctccccagagcctggcntttataactgactgccgcctcacgctccattcggatgtctaatgaatctctcagacttgacctgtccaaactgcttgccacctctactcgccaccgcccacccccacaccctccataccgttttccccacgtcactgcccctcccccccttcctcttgccaaatgcctaaaaataaaaattctgaggtggatctgtagcacaatgggcttctagtgacaaatcaaaattctgatctttaaaatgtatgcacaatttacctgttaccgcctggcctaagccatcctgctgttactgctgtgtagcaagttgcagccaaagcgacctcacacggctcctgaaggtcaagaatctgggagcagctcagctggatggctgtgactcggggtctcatgaagtggccaagatgccagctaaggctgccgtctctgaaggcttgacctggcgaggatttgcttccagactcactcgcgtggctattgacagaaggctcagttccatgccacatggcccgttccacagagcagctcacagcttggtagtagctggcttccccagagcggtatctgcgagcagcgtccagatggaagccatggtgttcccttaaaacctgatatggagggtgattccccatcatgtctgtattctgtgggtcacacagaccaaggccggtccactgtggaaggcaaggacgaggttgccagtgcccggcggtgggtggccacagccagcctccctgccagtgtcccccacagacaagttgtccctgtaagacaggtcagctcaggtcattccgagctcagaccttccaacggcgtccatgtccctcagtaaaagccagagtcctaaaggcctcttgcctgctctggcctcctctcaccattctctgccatcctccatctgcccctggtgtccctgaagtcttgaacatgccgagcacatcctgcctcgtatgcttcctggcctggaatgcacttgccccgggacaccctgtgctggctttagtgtttccttcctgtctcctcaagtcaccttattatcaaaaggactccgacaggctaagtgtggtggctcatgcctgtagtcccagcactcgggaaggccgaggtgggaggatcgcttgagcccaggagttcaggacctgcctgggcaacatggcaaaactttgtctctcttaaaaaaaaaaaaaaaaaaaaaaaaaaagagagaatttggggggggattgggcttggaaaggtttctataacacccattccggttggggcgcgcggggcgccatatgtggttcacgtgggaccctgtgggcaaatcagggtgtggccccaaggagaaactccggggcacgtggactagagggcctggggtttttcaccaaattaaaaaaaacgggcccggggggggggaaacacgcgaagcgcggttccgggaacacaaacctccccagagaaagtggaggtccacaggaggggccacaaaacccgcggggcctcctattcacacacgggggaggtccccaacagaagaagctctcaaattttccacaatttaacccccacaccggcggtgggga

SEQ ID NO: 362209 - DNA, 3920 bp, Homo sapiens
  misc_feature (3781)..(3781): n is a, c, g, or t
  misc_feature (3787)..(3787): n is a, c, g, or t
cggcccatttcctcctcctagccggactggagggagacaaagcagcgcccgtctgcttcgggcctctggaatttagcgctcgcccagctagccgcagaaatgactgctgtccatgcaggcaacataaacttcaagtgggatcctaaaagtctagagatcaggactctggcagttgagagactgttggagcctcttgttacacaggttacaacccttgtaaacaccaatagtaaagggccctctaataagaagagaggtcgttctaagaaggcccatgttttggctgcatctgttgaacaagcaactgagaatttcttggagaagggggataaaattgcgaaggagagccagtttctcaaggaggagcttgtggctgctgtagaagatgttcgaaaacaaggtgatttgatgaaggctgctgcaggagagttcgcagatgatccctgctcttctgtgaagcgaggcaacatggttcgggcagctcgagctttgctctctgctgttacccggttgctgattttggctgacatggcagatgtctacaaattacttgttcagctgaaagttgtggaagatggtatcttgaagttgaggaatgctggcaatgaacaagacttaggaatccagtataaagccctaaaacctgaagtggataagctgaacattatggcagccaaaagacaacaggaattgaaagatgttggccatcgtgatcagatggctgcagctagaggaatcctgcagaagaacgttccgatcctctatactgcatcccaggcatgcctacagcaccctgatgtcgcagcctataaggccaacagggacctgatatacaagcagctgcagcaggcggtcacaggcatttccaatgcagcccaggccactgcctcagacgatgcctcacagcaccagggtggaggaggaggagaactggcatatgcactcaataactttgacaaacaaatcattgtggaccccttgagcttcagcgaggagcgctttaggccttccctggaggagcgtctggaaagcatcattagtggggctgccttgatggccgactcgtcctgcacgcgtgatgaccgtcgtgagcgaattgtggcagagtgtaatgctgtccgccaggccctgcaggacctgctttcggagtacatgggcaatgctggacgtaaagaaagaagtgatgcactcaattctgcaatagataaaatgaccaagaagaccagggacttgcgtagacagctccgcaaagctgtcatggaccacgtttcagattctttcctggaaaccaatgttccacttttggtattgattgaagctgcaaagaatggaaatgagaaagaagttaaggagtatgcccaagttttccgtgaacatgccaacaaattgattgaggttgccaacttggcctgttccatctcaaataatgaagaaggtgtaaagcttgttcgaatgtctgcaagccagttagaagccctctgtcctcaggttattaatgctgcactggctttagcagcaaaaccacagagtaaactggcccaagagaacatggatctttttaaagaacaatgggaaaaacaagtccgtgttctcacagatgctgtcgatgacattacttccattgatgacttcttggctgtctcagagaatcacattttggaagatgtgaacaaatgtgtcattgctctccaagagaaggatgtggatggcctggaccgcacagctggtgcaattcgaggccgggcagcccgggtcattcacgtagtcacctcagagatggacaactatgagccaggagtctacacagagaaggttctggaagccactaagctgctctccaacacagtcatgccacgttttactgagcaagtagaagcagccgtggaagccctcagctcggaccctgcccagcccatggatgagaatgagtttatcgatgcttcccgcctggtatatgatggcatccgggacatcaggaaagcagtgctgatgataaggacccctgaggagttggatgactctgactttgagacagaagattttgatgtcagaagcaggacgagcgtccagacagaagacgatcagctgatagctggccagagtgcccgggcgatcatggctcagcttccccaggagcaaaaagcgaagattgcggaacaggtggccagcttccaggaagaaaagagcaagctggatgctgaagtgtccaaatgggacgacagtggcaatgacatcattgtgctggccaagcagatgtgcatgattatgatggagatgacagactttacccgaggtaaaggaccactcaaaaatacatcggatgtcatcagtgctgccaagaaaattgctgaggcaggatccaggatggacaagcttggccgcaccattgcagaccattgccccgactcggcttgcaagcaggacctgctggcctacctgcaacgcatcgccctctactgccaccagctgaacatctgcagcaaggtcaaggccgaggtgcagaatctcggcggggagcttgttgtctctggggtggacagcgccatgtccctgatccaggcagccaagaacttgatgaatgctgtggtgcagacagtgaaggcatcctacgtcgcctctaccaaataccaaaagtcacagggtatggcttccctcaaccttcctgctgtgtcatggaagatgaaggcaccagagaaaaagccattggtgaagagagagaaacaggatgagacacagaccaagattaaacgggcatctcagaagaagcacgtgaacccggtgcaggccctcagcgagttcaaagctatggacagcatctaagtctgcccaggccggccgcccccacccctcggggctcctgaatatcagtcactgttcgtcactcaaatgaatttgctaaatacaacactgatactagattccacagggaaatgggcagactgaaccagtccaggtggtgaattttccaagaacatagtttaagttgattaaaaatgcttttagaatgcaggagcctacttctagctgtattttttgtatgcttaaataaaaataaaaattcataaccaaagagaatcccacattagcttgttagtaatgctctgaccaagccgagatgcccattctcttagtgatggcggcgttagggtttgagagaagggaatttggctcaacttcagttgagagggtgcagtccagacagcttgactgcttttaaatgaccaaagatgacctgtggtaagcaacctgggcatcttaggaagcagtccctggagaaggcatgttcccagaaaggtctctggagggacaaactcactcagtaaaacataatgtatcatgaagaaaactgattctctatgacatgaaatgaaaattttaatgcattgttataattactaatgtacgctgctgcaggacattaataaagttgcttttttaggctacagtgtctcgatgccataatcagaacacactttttttcctctttctcccagcttcaaatgcaaattcatcattgggctcacttctaataactgcagtgtttcccgccttgggcttgcagcagaaaaacctgacaacatagtgtttgctaaggcagtaatttagactttaccttatttgtgattactgtagtgattgattgattgattactattaactacaaggtataatttactatcaccttatttaaattttatgaattaatttgaatgttttttacactaactaacttttcccaataaagtccactatgaaaccacgacaaaaaaaaaaaaaaatnaaaaanaaaaaaacatacatccttcactctatcctttttactcctatctccctcctcacccttctcattctcatccttatcaaaatcctccgcccccattttaccttcctttgctcatattcctctatagggtggccct

SEQ ID NO: 362210 - DNA, 3638 bp, Homo sapiens
cggcccatttcctcctcctagccggactggagggagacaaagcagcgcccgtctgcttcgggcctctggaatttagcgctcgcccagctagccgcagaaatgactgctgtccatgcaggcaacataaacttcaagtgggatcctaaaagtctagagatcaggactctggcagttgagagactgttggagcctcttgttacacaggttacaacccttgtaaacaccaatagtaaagggccctctaataagaagagaggtcgttctaagaaggcccatgttttggctgcatctgttgaacaagcaactgagaatttcttggagaagggggataaaattgcgaaggagagccagtttctcaaggaggagcttgtggctgctgtagaagatgttcgaaaacaaggtgatttgatgaaggctgctgcaggagagttcgcagatgatccctgctcttctgtgaagcgaggcaacatggttcgggcagctcgagctttgctctctgctgttacccggttgctgattttggctgacatggcagatgtctacaaattacttgttcagctgaaagttgtggaagatggtatcttgaagttgaggaatgctggcaatgaacaagacttaggaatccagtataaagccctaaaacctgaagtggataagctgaacattatggcagccaaaagacaacaggaattgaaagatgttggccatcgtgatcagatggctgcagctagaggaatcctgcagaagaacgttccgatcctctatactgcatcccaggcatgcctacagcaccctgatgtcgcagcctataaggccaacagggacctgatatacaagcagctgcagcaggcggtcacaggcatttccaatgcagcccaggccactgcctcagacgatgcctcacagcaccagggtggaggaggaggagaactggcatatgcactcaataactttgacaaacaaatcattgtggaccccttgagcttcagcgaggagcgctttaggccttccctggaggagcgtctggaaagcatcattagtggggctgccttgatggccgactcgtcctgcacgcgtgatgaccgtcgtgagcgaattgtggcagagtgtaatgctgtccgccaggccctgcaggacctgctttcggagtacatgggcaatgctggacgtaaagaaagaagtgatgcactcaattctgcaatagataaaatgaccaagaagaccagggacttgcgtagacagctccgcaaagctgtcatggaccacgtttcagattctttcctggaaaccaatgttccacttttggtattgattgaagctgcaaagaatggaaatgagaaagaagttaaggagtatgcccaagttttccgtgaacatgccaacaaattgattgaggttgccaacttggcctgttccatctcaaataatgaagaaggtgtaaagcttgttcgaatgtctgcaagccagttagaagccctctgtcctcaggttattaatgctgcactggctttagcagcaaaaccacagagtaaactggcccaagagaacatggatctttttaaagaacaatgggaaaaacaagtccgtgttctcacagatgctgtcgatgacattacttccattgatgacttcttggctgtctcagagaatcacattttggaagatgtgaacaaatgtgtcattgctctccaagagaaggatgtggatggcctggaccgcacagctggtgcaattcgaggccgggcagcccgggtcattcacgtagtcacctcagagatggacaactatgagccaggagtctacacagagaaggttctggaagccactaagctgctctccaacacagtcatgccacgttttactgagcaagtagaagcagccgtggaagccctcagctcggaccctgcccagcccatggatgagaatgagtttatcgatgcttcccgcctggtatatgatggcatccgggacatcaggaaagcagtgctgatgataaggacccctgaggagttggatgactctgactttgagacagaagattttgatgtcagaagcaggacgagcgtccagacagaagacgatcagctgatagctggccagagtgcccgggcgatcatggctcagcttccccaggagcaaaaagcgaagattgcggaacaggtggccagcttccaggaagaaaagagcaagctggatgctgaagtgtccaaatgggacgacagtggcaatgacatcattgtgctggccaagcagatgtgcatgattatgatggagatgacagactttacccgaggtaaaggaccactcaaaaatacatcggatgtcatcagtgctgccaagaaaattgctgaggcaggatccaggatggacaagcttggccgcaccattgcagaccattgccccgggtggacagcgccatgtccctgatccaggcagccaagaacttgatgaatgctgtggtgcagacagtgaaggcatcctacgtcgcctctaccaaataccaaaagtcacagggtatggcttccctcaaccttcctgctgtgtcatggaagatgaaggcaccagagaaaaagccattggtgaagagagagaaacaggatgagacacagaccaagattaaacgggcatctcagaagaagcacgtgaacccggtgcaggccctcagcgagttcaaagctatggacagcatctaagtctgcccaggccggccgcccccacccctcggggctcctgaatatcagtcactgttcgtcactcaaatgaatttgctaaatacaacactgatactagattccacagggaaatgggcagactgaaccagtccaggtggtgaattttccaagaacatagtttaagttgattaaaaatgcttttagaatgcaggagcctacttctagctgtattttttgtatgcttaaataaaaataaaaattcataaccaaagagaatcccacattagcttgttagtaatgctctgaccaagccgagatgcccattctcttagtgatggcggcgttagggtttgagagaagggaatttggctcaacttcagttgagagggtgcagtccagacagcttgactgcttttaaatgaccaaagatgacctgtggtaagcaacctgggcatcttaggaagcagtccctggagaaggcatgttcccagaaaggtctctggagggacaaactcactcagtaaaacataatgtatcatgaagaaaactgattctctatgacatgaaatgaaaattttaatgcattgttataattactaatgtacgctgctgcaggacattaataaagttgcttttttaggctacagtgtctcgatgccataatcagaacacactttttttcctctttctcccagcttcaaatgcaaattcatcattgggctcacttctaataactgcagtgtttcccgccttgggcttgcagcagaaaaacctgacaacatagtgtttgctaaggcagtaatttagactttaccttatttgtgattactgtagtgattgattgattgattactattaactacaaggtataatttactatcaccttatttaaattttatgaattaatttgaatgttttttacactaactaacttttcccaataaagtccactatgaaaccacgaca

SEQ ID NO: 362211 - DNA, 3392 bp, Homo sapiens
tcgcttgttggtcgtctctcaggatcccattttatctgaaggctgctgcaggagagttcgcagatgatccctgctcttctgtgaagcgaggcaacatggttcgggcagctcgagctttgctctctgctgttacccggttgctgattttggctgacatggcagatgtctacaaattacttgttcagctgaaagttgtggaagatggtatcttgaagttgaggaatgctggcaatgaacaagacttaggaatccagtataaagccctaaaacctgaagtggataagctgaacattatggcagccaaaagacaacaggaattgaaagatgttggccatcgtgatcagatggctgcagctagaggaatcctgcagaagaacgttccgatcctctatactgcatcccaggcatgcctacagcaccctgatgtcgcagcctataaggccaacagggacctgatatacaagcagctgcagcaggcggtcacaggcatttccaatgcagcccaggccactgcctcagacgatgcctcacagcaccagggtggaggaggaggagaactggcatatgcactcaataactttgacaaacaaatcattgtggaccccttgagcttcagcgaggagcgctttaggccttccctggaggagcgtctggaaagcatcattagtggggctgccttgatggccgactcgtcctgcacgcgtgatgaccgtcgtgagcgaattgtggcagagtgtaatgctgtccgccaggccctgcaggacctgctttcggagtacatgggcaatgctggacgtaaagaaagaagtgatgcactcaattctgcaatagataaaatgaccaagaagaccagggacttgcgtagacagctccgcaaagctgtcatggaccacgtttcagattctttcctggaaaccaatgttccacttttggtattgattgaagctgcaaagaatggaaatgagaaagaagttaaggagtatgcccaagttttccgtgaacatgccaacaaattgattgaggttgccaacttggcctgttccatctcaaataatgaagaaggtgtaaagcttgttcgaatgtctgcaagccagttagaagccctctgtcctcaggttattaatgctgcactggctttagcagcaaaaccacagagtaaactggcccaagagaacatggatctttttaaagaacaatgggaaaaacaagtccgtgttctcacagatgctgtcgatgacattacttccattgatgacttcttggctgtctcagagaatcacattttggaagatgtgaacaaatgtgtcattgctctccaagagaaggatgtggatggcctggaccgcacagctggtgcaattcgaggccgggcagcccgggtcattcacgtagtcacctcagagatggacaactatgagccaggagtctacacagagaaggttctggaagccactaagctgctctccaacacagtcatgccacgttttactgagcaagtagaagcagccgtggaagccctcagctcggaccctgcccagcccatggatgagaatgagtttatcgatgcttcccgcctggtatatgatggcatccgggacatcaggaaagcagtgctgatgataaggacccctgaggagttggatgactctgactttgagacagaagattttgatgtcagaagcaggacgagcgtccagacagaagacgatcagctgatagctggccagagtgcccgggcgatcatggctcagcttccccaggagcaaaaagcgaagattgcggaacaggtggccagcttccaggaagaaaagagcaagctggatgctgaagtgtccaaatgggacgacagtggcaatgacatcattgtgctggccaagcagatgtgcatgattatgatggagatgacagactttacccgaggtaaaggaccactcaaaaatacatcggatgtcatcagtgctgccaagaaaattgctgaggcaggatccaggatggacaagcttggccgcaccattgcagaccattgccccgactcggcttgcaagcaggacctgctggcctacctgcaacgcatcgccctctactgccaccagctgaacatctgcagcaaggtcaaggccgaggtgcagaatctcggcggggagcttgttgtctctggggtggacagcgccatgtccctgatccaggcagccaagaacttgatgaatgctgtggtgcagacagtgaaggcatcctacgtcgcctctaccaaataccaaaagtcacagggtatggcttccctcaaccttcctgctgtgtcatggaagatgaaggcaccagagaaaaagccattggtgaagagagagaaacaggatgagacacagaccaagattaaacgggcatctcagaagaagcacgtgaacccggtgcaggccctcagcgagttcaaagctatggacagcatctaagtctgcccaggccggccgcccccacccctcggggctcctgaatatcagtcactgttcgtcactcaaatgaatttgctaaatacaacactgatactagattccacagggaaatgggcagactgaaccagtccaggtggtgaattttccaagaacatagtttaagttgattaaaaatgcttttagaatgcaggagcctacttctagctgtattttttgtatgcttaaataaaaataaaaattcataaccaaagagaatcccacattagcttgttagtaatgctctgaccaagccgagatgcccattctcttagtgatggcggcgttagggtttgagagaagggaatttggctcaacttcagttgagagggtgcagtccagacagcttgactgcttttaaatgaccaaagatgacctgtggtaagcaacctgggcatcttaggaagcagtccctggagaaggcatgttcccagaaaggtctctggagggacaaactcactcagtaaaacataatgtatcatgaagaaaactgattctctatgacatgaaatgaaaattttaatgcattgttataattactaatgtacgctgctgcaggacattaataaagttgcttttttaggctacagtgtctcgatgccataatcagaacacactttttttcctctttctcccagcttcaaatgcaaattcatcattgggctcacttctaataactgcagtgtttcccgccttgggcttgcagcagaaaaacctgacaacatagtgtttgctaaggcagtaatttagactttaccttatttgtgattactgtagtgattgattgattgattactattaactacaaggtataatttactatcaccttatttaaattttatgaattaatttgaatgttttttacactaactaacttttcccaataaagtccactatgaaaccacgaca

SEQ ID NO: 362212 - DNA, 3661 bp, Homo sapiens
  misc_feature (19)..(19): n is a, c, g, or t
  misc_feature (22)..(22): n is a, c, g, or t
acggctaggtacgaggctnggngttgaatcggccgaggcgtctgcttcgggcctctggaatttagcgctcgcccagctagccgcagaaatgactgctgtccatgcaggcaacataaacttcaagtgggatcctaaaagtctagagatcaggactctggcagttgagagactgttggagcctcttgttacacaggttacaacccttgtaaacaccaatagtaaagggccctctaataagaagagaggtcgttctaagaaggcccatgttttggctgcatctgttgaacaagcaactgagaatttcttggagaagggggataaaattgcgaaggagagccagtttctcaaggaggagcttgtggctgctgtagaagatgttcgaaaacaaggtgatttgatgaaggctgctgcaggagagttcgcagatgatccctgctcttctgtgaagcgaggcaacatggttcgggcagctcgagctttgctctctgctgttacccggttgctgattttggctgacatggcagatgtctacaaattacttgttcagctgaaagttgtggaagatggtatcttgaagttgaggaatgctggcaatgaacaagacttaggaatccagtataaagccctaaaacctgaagtggataagctgaacattatggcagccaaaagacaacaggaattgaaagatgttggccatcgtgatcagatggctgcagctagaggaatcctgcagaagaacgttccgatcctctatactgcatcccaggcatgcctacagcaccctgatgtcgcagcctataaggccaacagggacctgatatacaagcagctgcagcaggcggtcacaggcatttccaatgcagcccaggccactgcctcagacgatgcctcacagcaccagggtggaggaggaggagaactggcatatgcactcaataactttgacaaacaaatcattgtggaccccttgagcttcagcgaggagcgctttaggccttccctggaggagcgtctggaaagcatcattagtggggctgccttgatggccgactcgtcctgcacgcgtgatgaccgtcgtgagcgaattgtggcagagtgtaatgctgtccgccaggccctgcaggacctgctttcggagtacatgggcaatgctggacgtaaagaaagaagtgatgcactcaattctgcaatagataaaatgaccaagaagaccagggacttgcgtagacagctccgcaaagctgtcatggaccacgtttcagattctttcctggaaaccaatgttccacttttggtattgattgaagctgcaaagaatggaaatgagaaagaagttaaggagtatgcccaagttttccgtgaacatgccaacaaattgattgaggttattaatgctgcactggctttagcagcaaaaccacagagtaaactggcccaagagaacatggatctttttaaagaacaatgggaaaaacaagtccgtgttctcacagatgctgtcgatgacattacttccattgatgacttcttggctgtctcagagaatcacattttggaagatgtgaacaaatgtgtcattgctctccaagagaaggatgtggatggcctggaccgcacagctggtgcaattcgaggccgggcagcccgggtcattcacgtagtcacctcagagatggacaactatgagccaggagtctacacagagaaggttctggaagccactaagctgctctccaacacagtcatgccacgttttactgagcaagtagaagcagccgtggaagccctcagctcggaccctgcccagcccatggatgagaatgagtttatcgatgcttcccgcctggtatatgatggcatccgggacatcaggaaagcagtgctgatgataaggacccctgaggagttggatgactctgactttgagacagaagattttgatgtcagaagcaggacgagcgtccagacagaagacgatcagctgatagctggccagagtgcccgggcgatcatggctcagcttccccaggagcaaaaagcgaagattgcggaacaggtggccagcttccaggaagaaaagagcaagctggatgctgaagtgtccaaatgggacgacagtggcaatgacatcattgtgctggccaagcagatgtgcatgattatgatggagatgacagactttacccgaggtaaaggaccactcaaaaatacatcggatgtcatcagtgctgccaagaaaattgctgaggcaggatccaggatggacaagcttggccgcaccattgcagaccattgccccgactcggcttgcaagcaggacctgctggcctacctgcaacgcatcgccctctactgccaccagctgaacatctgcagcaaggtcaaggccgaggtgcagaatctcggcggggagcttgttgtctctggggtggacagcgccatgtccctgatccaggcagccaagaacttgatgaatgctgtggtgcagacagtgaaggcatcctacgtcgcctctaccaaataccaaaagtcacagggtatggcttccctcaaccttcctgctgtgtcatggaagatgaaggcaccagagaaaaagccattggtgaagagagagaaacaggatgagacacagaccaagattaaacgggcatctcagaagaagcacgtgaacccggtgcaggccctcagcgagttcaaagctatggacagcatctaagtctgcccaggccggccgcccccacccctcggggctcctgaatatcagtcactgttcgtcactcaaatgaatttgctaaatacaacactgatactagattccacagggaaatgggcagactgaaccagtccaggtggtgaattttccaagaacatagtttaagttgattaaaaatgcttttagaatgcaggagcctacttctagctgtattttttgtatgcttaaataaaaataaaaattcataaccaaagagaatcccacattagcttgttagtaatgctctgaccaagccgagatgcccattctcttagtgatggcggcgttagggtttgagagaagggaatttggctcaacttcagttgagagggtgcagtccagacagcttgactgcttttaaatgaccaaagatgacctgtggtaagcaacctgggcatcttaggaagcagtccctggagaaggcatgttcccagaaaggtctctggagggacaaactcactcagtaaaacataatgtatcatgaagaaaactgattctctatgacatgaaatgaaaattttaatgcattgttataattactaatgtacgctgctgcaggacattaataaagttgcttttttaggctacagtgtctcgatgccataatcagaacacactttttttcctctttctcccagcttcaaatgcaaattcatcattgggctcacttctaataactgcagtgtttcccgccttgggcttgcagcagaaaaacctgacaacatagtgtttgctaaggcagtaatttagactttaccttatttgtgattactgtagtgattgattgattgattactattaactacaaggtataatttactatcaccttatttaaattttatgaattaatttgaatgttttttacactaactaacttttcccaataaagtccactatgaaaccacgaca

SEQ ID NO: 362213 - DNA, 3362 bp, Homo sapiens
cggcccatttcctcctcctagccggactggagggagacaaagcagcgcccgtctgcttcgggcctctggaatttagcgctcgcccagctagccgcagaaatgactgctgtccatgcaggcaacataaacttcaagtgggatcctaaaagtctagagatcaggactctggcagttgagagactgttggagcctcttgttacacaggttacaacccttgtaaacaccaatagtaaagggccctctaataagaagagaggtcgttctaagaaggcccatgttttggctgcatctgttgaacaagcaactgagaatttcttggagaagggggataaaattgcgaaggagagccagtttctcaaggaggagcttgtggctgctgtagaagatgttcgaaaacaaggtgatttgatgaaggctgctgcaggagagttcgcagatgatccctgctcttctgtgaagcgaggcaacatggttcgggcagctcgagctttgctctctgctgttacccggttgctgattttggctgacatggcagatgtctacaaattacttgttcagctgaaagttgtggaagatggtatcttgaagttgaggaatgctggcaatgaacaagacttaggaatccagtataaagccctaaaacctgaagtggataagctgaacattatggcagccaaaagacaacaggaattgaaagatgttggccatcgtgatcagatggctgcagctagaggaatcctgcagaagaacgttccgatcctctatactgcatcccaggcatgcctacagcaccctgatgtcgcagcctataaggccaacagggacctgatatacaagcagctgcagcaggcggtcacaggcatttccaatgcagcccaggccactgcctcagacgatgcctcacagcaccagggtggaggaggaggagaactggcatatgcactcaataactttgacaaacaaatcattgtggaccccttgagcttcagcgaggagcgctttaggccttccctggaggagcgtctggaaagcatcattagtggggctgccttgatggccgactcgtcctgcacgcgtgatgaccgtcgtgagcgaattgtggcagagtgtaatgctgtccgccaggccctgcaggacctgctttcggagtacatgggcaatgctggacgtaaagaaagaagtgatgcactcaattctgcaatagataaaatgaccaagaagaccagggacttgcgtagacagctccgcaaagctgtcatggaccacgtttcagattctttcctggaaaccaatgttccacttttggtattgattgaagctgcaaagaatggaaatgagaaagaagttaaggagtatgcccaagttttccgtgaacatgccaacaaattgattgaggttgccaacttggcctgttccatctcaaataatgaagaaggtgtaaagcttgttcgaatgtctgcaagccagttagaagccctctgtcctcaggttattaatgctgcactggctttagcagcaaaaccacagagtaaactggcccaagagaacatggatctttttaaagaacaatgggaaaaacaagtccgtgttctcacagatgctgtcgatgacattacttccattgatgacttcttggctgtctcagagaatcacattttggaagatgtgaacaaatgtgtcattgctctccaagagaaggatgtggatggcctggaccgcacagctggtgcaattcgaggccgggcagcccgggtcattcacgtagtcacctcagagatggacaactatgagccaggagtctacacagagaaggttctggaagccactaagctgctctccaacacagtcatgccacgttttactgagcaagtagaagcagccgtggaagccctcagctcggaccctgcccagcccatggatgagaatgagtttatcgatgcttcccgcctggtatatgatggcatccgggacatcaggaaagcagtgctgatgataaggacccctgaggagttggatgactctgactttgagacagaagattttgatgtcagaagcaggacgagcgtccagacagaagacgatcagctgatagctggccagagtgcccgggcgatcatggctcagcttccccaggagcaaaaagcgaagattgcggaacaggtggccagcttccaggaagaaaagagcaagctggatgctgaagtgtccaaatgggacgacagtggcaatgacatcattgtgctggccaagcagatgtgcatgattatgatggagatgacagactttacccgaggtaaaggaccactcaaaaatacatcggatgtcatcagtgctgccaagaaaattgctgaggcaggatccaggatggacaagcttggccgcaccattgcagaccattgccccgactcggcttgcaagcaggacctgctggcctacctgcaacgcatcgccctctactgccaccagctgaacatctgcagcaaggtcaaggccgaggtgcagaatctcggcggggagcttgttgtctctggggtggacagcgccatgtccctgatccaggcagccaagaacttgatgaatgctgtggtgcagacagtgaaggcatcctacgtcgcctctaccaaataccaaaagtcacagggtatggcttccctcaaccttcctgctgtgtcatggaagatgaaggcaccagagaaaaagccattggtgaagagagagaaacaggatgagacacagaccaagattaaacgggcatctcagaagaagcacgtgaacccggtgcaggccctcagcgagttcaaagctatggacagcatctaagtctgcccaggccggccgcccccacccctcggggctcctgaatatcagtcactgttcgtcactcaaatgaatttgctaaatacaacactgatactagattccacagggaaatgggcagactgaaccagtccaggtggtgaattttccaagaacatagtttaagttgattaaaaatgcttttagaatgcaggagcctacttctagctgtattttttgtatgcttaaataaaaataaaaattcataaccaaagagaatcccacattagcttgttagtaatgctctgaccaagccgagatgcccattctcttagtgatggcggcgttagggtttgagagaagggaatttggctcaacttcagttgagagggtgcagtccagacagcttgactgcttttaaatgaccaaagatgacctgtggtaagcaacctgggcatcttaggaagcagtccctggagaaggcatgttcccagaaaggtctctggagggacaaactcactcagtaaacattacgttcatgagcctgtgcagacattataaggtct

SEQ ID NO: 362214 - DNA, 2881 bp, Homo sapiens
aagatagagtgtttaataaatataagattcagatatactaccatctctcatcataatatggaaagcattaaagttgactaccgataatgggatcttcacattctctatcatggattaaatcagcccatagttcctctatatacttacgaccaaacccttgttaatcccttacttctggaatccatataggtgttttaggggggttttgggaggggttgtttttttttttaagaaacagggtctcattctgtcgcccaggctggagtacatgggcaatgctggacgtaaagaaagaagtgatgcactcaattctgcaatagataaaatgaccaagaagaccagggacttgcgtagacagctccgcaaagctgtcatggaccacgtttcagattctttcctggaaaccaatgttccacttttggtattgattgaagctgcaaagaatggaaatgagaaagaagttaaggagtatgcccaagttttccgtgaacatgccaacaaattgattgaggttgccaacttggcctgttccatctcaaataatgaagaaggtgtaaagcttgttcgaatgtctgcaagccagttagaagccctctgtcctcaggttattaatgctgcactggctttagcagcaaaaccacagagtaaactggcccaagagaacatggatctttttaaagaacaatgggaaaaacaagtccgtgttctcacagatgctgtcgatgacattacttccattgatgacttcttggctgtctcagagaatcacattttggaagatgtgaacaaatgtgtcattgctctccaagagaaggatgtggatggcctggaccgcacagctggtgcaattcgaggccgggcagcccgggtcattcacgtagtcacctcagagatggacaactatgagccaggagtctacacagagaaggttctggaagccactaagctgctctccaacacagtcatgccacgttttactgagcaagtagaagcagccgtggaagccctcagctcggaccctgcccagcccatggatgagaatgagtttatcgatgcttcccgcctggtatatgatggcatccgggacatcaggaaagcagtgctgatgataaggacccctgaggagttggatgactctgactttgagacagaagattttgatgtcagaagcaggacgagcgtccagacagaagacgatcagctgatagctggccagagtgcccgggcgatcatggctcagcttccccaggagcaaaaagcgaagattgcggaacaggtggccagcttccaggaagaaaagagcaagctggatgctgaagtgtccaaatgggacgacagtggcaatgacatcattgtgctggccaagcagatgtgcatgattatgatggagatgacagactttacccgaggtaaaggaccactcaaaaatacatcggatgtcatcagtgctgccaagaaaattgctgaggcaggatccaggatggacaagcttggccgcaccattgcagaccattgccccgactcggcttgcaagcaggacctgctggcctacctgcaacgcatcgccctctactgccaccagctgaacatctgcagcaaggtcaaggccgaggtgcagaatctcggcggggagcttgttgtctctggggtggacagcgccatgtccctgatccaggcagccaagaacttgatgaatgctgtggtgcagacagtgaaggcatcctacgtcgcctctaccaaataccaaaagtcacagggtatggcttccctcaaccttcctgctgtgtcatggaagatgaaggcaccagagaaaaagccattggtgaagagagagaaacaggatgagacacagaccaagattaaacgggcatctcagaagaagcacgtgaacccggtgcaggccctcagcgagttcaaagctatggacagcatctaagtctgcccaggccggccgcccccacccctcggggctcctgaatatcagtcactgttcgtcactcaaatgaatttgctaaatacaacactgatactagattccacagggaaatgggcagactgaaccagtccaggtggtgaattttccaagaacatagtttaagttgattaaaaatgcttttagaatgcaggagcctacttctagctgtattttttgtatgcttaaataaaaataaaaattcataaccaaagagaatcccacattagcttgttagtaatgctctgaccaagccgagatgcccattctcttagtgatggcggcgttagggtttgagagaagggaatttggctcaacttcagttgagagggtgcagtccagacagcttgactgcttttaaatgaccaaagatgacctgtggtaagcaacctgggcatcttaggaagcagtccctggagaaggcatgttcccagaaaggtctctggagggacaaactcactcagtaaaacataatgtatcatgaagaaaactgattctctatgacatgaaatgaaaattttaatgcattgttataattactaatgtacgctgctgcaggacattaataaagttgcttttttaggctacagtgtctcgatgccataatcagaacacactttttttcctctttctcccagcttcaaatgcaaattcatcattgggctcacttctaataactgcagtgtttcccgccttgggcttgcagcagaaaaacctgacaacatagtgtttgctaaggcagtaatttagactttaccttatttgtgattactgtagtgattgattgattgattactattaactacaaggtataatttactatcaccttatttaaattttatgaattaatttgaatgttttttacactaactaacttttcccaataaagtccactatgaaaccacgaca

SEQ ID NO: 362215 - DNA, 2993 bp, Homo sapiens
cggcccatttcctcctcctagccggactggagggagacaaagcagcgcccgtctgcttcgggcctctggaatttagcgctcgcccagctagccgcagaaatgactgctgtccatgcaggcaacataaacttcaagtgggatcctaaaagtctagagatcaggactctggcagttgagagactgttggagcctcttgttacacaggttacaacccttgtaaacaccaatagtaaagggccctctaataagaagagaggtcgttctaagaaggcccatgttttggctgcatctgttgaacaagcaactgagaatttcttggagaagggggataaaattgcgaaggagagccagtttctcaaggaggagcttgtggctgctgtagaagatgttcgaaaacaaggtgatttgatgaaggctgctgcaggagagttcgcagatgatccctgctcttctgtgaagcgaggcaacatggttcgggcagctcgagctttgctctctgctgttacccggttgctgattttggctgacatggcagatgtctacaaattacttgttcagctgaaagttgtggaagatggtatcttgaagttgaggaatgctggcaatgaacaagacttaggaatccagtataaagccctaaaacctgaagtggataagctgaacattatggcagccaaaagacaacaggaattgaaagatgttggccatcgtgatcagatggctgcagctagaggaatcctgcagaagaacgttccgatcctctatactgcatcccaggcatgcctacagcaccctgatgtcgcagcctataaggccaacagggacctgatatacaagcagctgcagcaggcggtcacaggcatttccaatgcagcccaggccactgcctcagacgatgcctcacagcaccagggtggaggaggaggagaactggcatatgcactcaataactttgacaaacaaatcattgtggaccccttgagcttcagcgaggagcgctttaggccttccctggaggagcgtctggaaagcatcattagtggggctgccttgatggccgactcgtcctgcacgcgtgatgaccgtcgtgagcgaattgtggcagagtgtaatgctgtccgccaggccctgcaggacctgctttcggagtacatgggcaatgctggacgtaaagaaagaagtgatgcactcaattctgcaatagataaaatgaccaagaagaccagggacttgcgtagacagctccgcaaagctgtcatggaccacgtttcagattctttcctggaaaccaatgttccacttttggtattgattgaagctgcaaagaatggaaatgagaaagaagttaaggagtatgcccaagttttccgtgaacatgccaacaaattgattgaggttgccaacttggcctgttccatctcaaataatgaagaaggtgtaaagcttgttcgaatgtctgcaagccagttagaagccctctgtcctcaggttattaatgctgcactggctttagcagcaaaaccacagagtaaactggcccaagagaacatggatctttttaaagaacaatgggaaaaacaagtccgtgttctcacagatgctgtcgatgacattacttccattgatgacttcttggctgtctcagagaatcacattttggaagatgtgaacaaatgtgtcattgctctccaagagaaggatgtggatggcctggaccgcacagctggtgcaattcgaggccgggcagcccgggtcattcacgtagtcacctcagagatggacaactatgagccaggagtctacacagagaaggttctggaagccactaagctgctctccaacacagtcatgccacgttttactgagcaagtagaagcagccgtggaagccctcagctcggaccctgcccagcccatggatgagaatgagtttatcgatgcttcccgcctggtatatgatggcatccgggacatcaggaaagcagtgctgatgataaggacccctgaggagttggatgactctgactttgagacagaagattttgatgtcagaagcaggacgagcgtccagacagaagacgatcagctgatagctggccagagtgcccgggcgatcatggctcagcttccccaggagcaaaaagcgaagattgcggaacaggtggccagcttccaggaagaaaagagcaagctggatgctgaagtgtccaaatgggacgacagtggcaatgacatcattgtgctggccaagcagatgtgcatgattatgatggagatgacagactttacccgaggtaaaggaccactcaaaaatacatcggatgtcatcagtgctgccaagaaaattgctgaggcaggatccaggatggacaagcttggccgcaccattgcagaccattgccccgactcggcttgcaagcaggacctgctggcctacctgcaacgcatcgccctctactgccaccagctgaacatctgcagcaaggtcaaggccgaggtgcagaatctcggcggggagcttgttgtctctggggtggacagcgccatgtccctgatccaggcagccaagaacttgatgaatgctgtggtgcagacagtgaaggcatcctacgtcgcctctaccaaataccaaaagtcacagggtatggcttccctcaaccttcctgctgtgtcatggaagatgaaggcaccagagaaaaagccattggtgaagagagagaaacaggatgagacacagaccaagattaaacgggcatctcagaagaagcacgtgaacccggtgcaggccctcagcgagttcaaagctatggacagcatctaagtctgcccaggccggccgcccccacccctcggggctcctgaatatcagtcactgttcgtcactcaaatgaatttgctaaatacaacactgatactagattccacagggaaatgggcagactgcccatttccctgtggaatctagtatcagtgttgtatttagcaaattcattt

SEQ ID NO: 362216 - DNA, 2188 bp, Homo sapiens
  misc_feature (35)..(35): n is a, c, g, or t
  misc_feature (41)..(41): n is a, c, g, or t
tatagaactcgagctggtaccctctctccacaccnctctcntaactggatgacttctggctgtctcagagaatcacattttggaagatgtgaacaaatgtgtcattgctctccaagagaaggatgtggatggcctggaccgcacagctggtgcaattcgaggccgggcagcccgggtcattcacgtagtcacctcagagatggacaactatgagccaggagtctacacagagaaggttctggaagccactaagctgctctccaacacagtcatgccacgttttactgagcaagtagaagcagccgtggaagccctcagctcggaccctgcccagcccatggatgagaatgagtttatcgatgcttcccgcctggtatatgatggcatccgggacatcaggaaagcagtgctgatgataaggacccctgaggagttggatgactctgactttgagacagaagattttgatgtcagaagcaggacgagcgtccagacagaagacgatcagctgatagctggccagagtgcccgggcgatcatggctcagcttccccaggagcaaaaagcgaagattgcggaacaggtggccagcttccaggaagaaaagagcaagctggatgctgaagtgtccaaatgggacgacagtggcaatgacatcattgtgctggccaagcagatgtgcatgattatgatggagatgacagactttacccgaggtaaaggaccactcaaaaatacatcggatgtcatcagtgctgccaagaaaattgctgaggcaggatccaggatggacaagcttggccgcaccattgcagaccattgccccgactcggcttgcaagcaggacctgctggcctacctgcaacgcatcgccctctactgccaccagctgaacatctgcagcaaggtcaaggccgaggtgcagaatctcggcggggagcttgttgtctctggggtggacagcgccatgtccctgatccaggcagccaagaacttgatgaatgctgtggtgcagacagtgaaggcatcctacgtcgcctctaccaaataccaaaagtcacagggtatggcttccctcaaccttcctgctgtgtcatggaagatgaaggcaccagagaaaaagccattggtgaagagagagaaacaggatgagacacagaccaagattaaacgggcatctcagaagaagcacgtgaacccggtgcaggccctcagcgagttcaaagctatggacagcatctaagtctgcccaggccggccgcccccacccctcggggctcctgaatatcagtcactgttcgtcactcaaatgaatttgctaaatacaacactgatactagattccacagggaaatgggcagactgaaccagtccaggtggtgaattttccaagaacatagtttaagttgattaaaaatgcttttagaatgcaggagcctacttctagctgtattttttgtatgcttaaataaaaataaaaattcataaccaaagagaatcccacattagcttgttagtaatgctctgaccaagccgagatgcccattctcttagtgatggcggcgttagggtttgagagaagggaatttggctcaacttcagttgagagggtgcagtccagacagcttgactgcttttaaatgaccaaagatgacctgtggtaagcaacctgggcatcttaggaagcagtccctggagaaggcatgttcccagaaaggtctctggagggacaaactcactcagtaaaacataatgtatcatgaagaaaactgattctctatgacatgaaatgaaaattttaatgcattgttataattactaatgtacgctgctgcaggacattaataaagttgcttttttaggctacagtgtctcgatgccataatcagaacacactttttttcctctttctcccagcttcaaatgcaaattcatcattgggctcacttctaataactgcagtgtttcccgccttgggcttgcagcagaaaaacctgacaacatagtgtttgctaaggcagtaatttagactttaccttatttgtgattactgtagtgattgattgattgattactattaactacaaggtataatttactatcaccttatttaaattttatgaattaatttgaatgttttttacactaactaacttttcccaataaagtccactatgaaaccacgaca

SEQ ID NO: 362217 - DNA, 2808 bp, Homo sapiens
  misc_feature (19)..(19): n is a, c, g, or t
  misc_feature (22)..(22): n is a, c, g, or t
acggctaggtacgaggctnggngttgaatcggccgaggcgtctgcttcgggcctctggaatttagcgctcgcccagctagccgcagaaatgactgctgtccatgcaggcaacataaacttcaagtgggatcctaaaagtctagagatcaggactctggcagttgagagactgttggagcctcttgttacacaggttacaacccttgtaaacaccaatagtaaagggccctctaataagaagagaggtcgttctaagaaggcccatgttttggctgcatctgttgaacaagcaactgagaatttcttggagaagggggataaaattgcgaaggagagccagtttctcaaggaggagcttgtggctgctgtagaagatgttcgaaaacaaggtgatttgatgaaggctgctgcaggagagttcgcagatgatccctgctcttctgtgaagcgaggcaacatggttcgggcagctcgagctttgctctctgctgttacccggttgctgattttggctgacatggcagatgtctacaaattacttgttcagctgaaagttgtggaagatggtatcttgaagttgaggaatgctggcaatgaacaagacttaggaatccagtataaagccctaaaacctgaagtggataagctgaacattatggcagccaaaagacaacaggaattgaaagatgttggccatcgtgatcagatggctgcagctagaggaatcctgcagaagaacgttccgatcctctatactgcatcccaggcatgcctacagcaccctgatgtcgcagcctataaggccaacagggacctgatatacaagcagctgcagcaggcggtcacaggcatttccaatgcagcccaggccactgcctcagacgatgcctcacagcaccagggtggaggaggaggagaactggcatatgcactcaataactttgacaaacaaatcattgtggaccccttgagcttcagcgaggagcgctttaggccttccctggaggagcgtctggaaagcatcattagtggggctgccttgatggccgactcgtcctgcacgcgtgatgaccgtcgtgagcgaattgtggcagagtgtaatgctgtccgccaggccctgcaggacctgctttcggagtacatgggcaatgctggacgtaaagaaagaagtgatgcactcaattctgcaatagataaaatgaccaagaagaccagggacttgcgtagacagctccgcaaagctgtcatggaccacgtttcagattctttcctggaaaccaatgttccacttttggtattgattgaagctgcaaagaatggaaatgagaaagaagttaaggagtatgcccaagttttccgtgaacatgccaacaaattgattgaggttgccaacttggcctgttccatctcaaataatgaagaaggtgtaaagcttgttcgaatgtctgcaagccagttagaagccctctgtcctcaggttattaatgctgcactggctttagcagcaaaaccacagagtaaactggcccaagagaacatggatctttttaaagaacaatgggaaaaacaagtccgtgttctcacagatgctgtcgatgacattacttccattgatgacttcttggctgtctcagagaatcacattttggaagatgtgaacaaatgtgtcattgctctccaagagaaggatgtggatggcctggaccgcacagctggtgcaattcgaggccgggcagcccgggtcattcacgtagtcacctcagagatggacaactatgagccaggagtctacacagagaaggttctggaagccactaagctgctctccaacacagtcatgccacgttttactgagcaagtagaagcagccgtggaagccctcagctcggaccctgcccagcccatggatgagaattgttcgtcactcaaatgaatttgctaaatacaacactgatactagattccacagggaaatgggcagactgaaccagtccaggtggtgaattttccaagaacatagtttaagttgattaaaaatgcttttagaatgcaggagcctacttctagctgtattttttgtatgcttaaataaaaataaaaattcataaccaaagagaatcccacattagcttgttagtaatgctctgaccaagccgagatgcccattctcttagtgatggcggcgttagggtttgagagaagggaatttggctcaacttcagttgagagggtgcagtccagacagcttgactgcttttaaatgaccaaagatgacctgtggtaagcaacctgggcatcttaggaagcagtccctggagaaggcatgttcccagaaaggtctctggagggacaaactcactcagtaaaacataatgtatcatgaagaaaactgattctctatgacatgaaatgaaaattttaatgcattgttataattactaatgtacgctgctgcaggacattaataaagttgcttttttaggctacagtgtctcgatgccataatcagaacacactttttttcctctttctcccagcttcaaatgcaaattcatcattgggctcacttctaataactgcagtgtttcccgccttgggcttgcagcagaaaaacctgacaacatagtgtttgctaaggcagtaatttagactttaccttatttgtgattactgtagtgattgattgattgattactattaactacaaggtataatttactatcaccttatttaaattttatgaattaatttgaatgttttttacactaactaacttttcccaataaagtccactatgaaaccacgaca

SEQ ID NO: 362218 - DNA, 1766 bp, Homo sapiens
ccgcgaatgtcaaaccggtctgctcaggtatggacccaagtccggggacgaagtgtagcgccgagggccacacagaagacgatcagctgatagctggccagagtgcccgggcgatcatggctcagcttccccaggagcaaaaagcgaagattgcggaacaggtggccagcttccaggaagaaaagagcaagctggatgctgaagtgtccaaatgggacgacagtggcaatgacatcattgtgctggccaagcagatgtgcatgattatgatggagatgacagactttacccgaggtaaaggaccactcaaaaatacatcggatgtcatcagtgctgccaagaaaattgctgaggcaggatccaggatggacaagcttggccgcaccattgcagaccattgccccgactcggcttgcaagcaggacctgctggcctacctgcaacgcatcgccctctactgccaccagctgaacatctgcagcaaggtcaaggccgaggtgcagaatctcggcggggagcttgttgtctctggggtggacagcgccatgtccctgatccaggcagccaagaacttgatgaatgctgtggtgcagacagtgaaggcatcctacgtcgcctctaccaaataccaaaagtcacagggtatggcttccctcaaccttcctgctgtgtcatggaagatgaaggcaccagagaaaaagccattggtgaagagagagaaacaggatgagacacagaccaagattaaacgggcatctcagaagaagcacgtgaacccggtgcaggccctcagcgagttcaaagctatggacagcatctaagtctgcccaggccggccgcccccacccctcggggctcctgaatatcagtcactgttcgtcactcaaatgaatttgctaaatacaacactgatactagattccacagggaaatgggcagactgaaccagtccaggtggtgaattttccaagaacatagtttaagttgattaaaaatgcttttagaatgcaggagcctacttctagctgtattttttgtatgcttaaataaaaataaaaattcataaccaaagagaatcccacattagcttgttagtaatgctctgaccaagccgagatgcccattctcttagtgatggcggcgttagggtttgagagaagggaatttggctcaacttcagttgagagggtgcagtccagacagcttgactgcttttaaatgaccaaagatgacctgtggtaagcaacctgggcatcttaggaagcagtccctggagaaggcatgttcccagaaaggtctctggagggacaaactcactcagtaaaacataatgtatcatgaagaaaactgattctctatgacatgaaatgaaaattttaatgcattgttataattactaatgtacgctgctgcaggacattaataaagttgcttttttaggctacagtgtctcgatgccataatcagaacacactttttttcctctttctcccagcttcaaatgcaaattcatcattgggctcacttctaataactgcagtgtttcccgccttgggcttgcagcagaaaaacctgacaacatagtgtttgctaaggcagtaatttagactttaccttatttgtgattactgtagtgattgattgattgattactattaactacaaggtataatttactatcaccttatttaaattttatgaattaatttgaatgttttttacactaactaacttttcccaataaagtccactatgaaaccacgaca

SEQ ID NO: 362219 - DNA, 2670 bp, Homo sapiens
cggcccatttcctcctcctagccggactggagggagacaaagcagcgcccgtctgcttcgggcctctggaatttagcgctcgcccagctagccgcagaaatgactgctgtccatgcaggcaacataaacttcaagtgggatcctaaaagtctagagatcaggactctggcagttgagagactgttggagcctcttgttacacaggttacaacccttgtaaacaccaatagtaaagggccctctaataagaagagaggtcgttctaagaaggcccatgttttggctgcatctgttgaacaagcaactgagaatttcttggagaagggggataaaattgcgaaggagagccagtttctcaaggaggagcttgtggctgctgtagaagatgttcgaaaacaaggtgatttgatgaaggctgctgcaggagagttcgcagatgatccctgctcttctgtgaagcgaggcaacatggttcgggcagctcgagctttgctctctgctgttacccggttgctgattttggctgacatggcagatgtctacaaattacttgttcagctgaaagttgtggaagatggtatcttgaagttgaggaatgctggcaatgaacaagacttaggaatccagtataaagccctaaaacctgaagtggataagctgaacattatggcagccaaaagacaacaggaattgaaagatgttggccatcgtgatcagatggctgcagctagaggaatcctgcagaagaacgttccgatcctctatactgcatcccaggcatgcctacagcaccctgatgtcgcagcctataaggccaacagggacctgatatacaagcagctgcagcaggcggtcacaggcatttccaatgcagcccaggccactgcctcagacgatgcctcacagcaccagggtggaggaggaggagaactggcatatgcactcaataactttgacaaacaaatcattgtggaccccttgagcttcagcgaggagcgctttaggccttccctggaggagcgtctggaaagcatcattagtggggctgccttgatggccgactcgtcctgcacgcgtgatgaccgtcgtgagcgaattgtggcagagtgtaatgctgtccgccaggccctgcaggacctgctttcggagtacatgggcaatgctggacgtaaagaaagaagtgatgcactcaattctgcaatagataaaatgaccaagaagaccagggacttgcgtagacagctccgcaaagctgtcatggaccacgtttcagattctttcctggaaaccaatgttccacttttggtattgattgaagctgcaaagaatggaaatgagaaagaagttaaggagtatgcccaagttttccgtgaacatgccaacaaattgattgaggttgccaacttggcctgttccatctcaaataatgaagaaggtgtaaagcttgttcgaatgtctgcaagccagttagaagccctctgtcctcaggttattaatgctgcactggctttagcagcaaaaccacagagtaaactggcccaagagaacatggatctttttaaagaacaatgggaaaaacaagtccgtgttctcacagatgctgtcgatgacattacttccattgatgacttcttggctgtctcagagaatcacattttggaagatgtgaacaaatgtgtcattgctctccaagagaaggatgtggatggcctggaccgcacagctggtgcaattcgaggccgggcagcccgggtcattcacgtagtcacctcagagatggacaactatgagccaggagtctacacagagaaggttctggaagccactaagctgctctccaacacagtcatgccacgttttactgagcaagtagaagcagccgtggaagccctcagctcggaccctgcccagcccatggatgagaatgagtttatcgatgcttcccgcctggtatatgatggcatccgggacatcaggaaagcagtgctgatgataaggacccctgaggagttggatgactctgactttgagacagaagattttgatgtcagaagcaggacgagcgtccagacagaagacgatcagctgatagctggccagagtgcccgggcgatcatggctcagcttccccaggagcaaaaagcgaagattgcggaacaggtggccagcttccaggaagaaaagagcaagctggatgctgaagtgtccaaatgggacgacagtggcaatgacatcattgtgctggccaagcagatgtgcatgattatgatggagatgacagactttacccgaggtaaaggaccactcaaaaatacatcggatgtcatcagtgctgccaagaaaattgctgaggcaggatccaggatggacaagcttggccgcaccattgcagaccattgccccgactcggcttgcaagcaggacctgctggcctacctgcaacgcatcgccctctactgccaccagctgaaaaaacctgacaacatagtgtttgctaaggcagtaatttagactttaccttatttgtgattactgtagtgattgattgattgattactattaactacaaggtataatttactatcaccttatttaaattttatgaattaatttgaatgttttttacactaactaacttttcccaataaagtccactatgaaaccacgaca

SEQ ID NO: 362220 - DNA, 2398 bp, Homo sapiens
cggcccatttcctcctcctagccggactggagggagacaaagcagcgcccgtctgcttcgggcctctggaatttagcgctcgcccagctagccgcagaaatgactgctgtccatgcaggcaacataaacttcaagtgggatcctaaaagtctagagatcaggactctggcagttgagagactgttggagcctcttgttacacaggttacaacccttgtaaacaccaatagtaaagggccctctaataagaagagaggtcgttctaagaaggcccatgttttggctgcatctgttgaacaagcaactgagaatttcttggagaagggggataaaattgcgaaggagagccagtttctcaaggaggagcttgtggctgctgtagaagatgttcgaaaacaaggtgatttgatgaaggctgctgcaggagagttcgcagatgatccctgctcttctgtgaagcgaggcaacatggttcgggcagctcgagctttgctctctgctgttacccggttgctgattttggctgacatggcagatgtctacaaattacttgttcagctgaaagttgtggaagatggtatcttgaagttgaggaatgctggcaatgaacaagacttaggaatccagtataaagccctaaaacctgaagtggataagctgaacattatggcagccaaaagacaacaggaattgaaagatgttggccatcgtgatcagatggctgcagctagaggaatcctgcagaagaacgttccgatcctctatactgcatcccaggcatgcctacagcaccctgatgtcgcagcctataaggccaacagggacctgatatacaagcagctgcagcaggcggtcacaggcatttccaatgcagcccaggccactgcctcagacgatgcctcacagcaccagggtggaggaggaggagaactggcatatgcactcaataactttgacaaacaaatcattgtggaccccttgagcttcagcgaggagcgctttaggccttccctggaggagcgtctggaaagcatcattagtggggctgccttgatggccgactcgtcctgcacgcgtgatgaccgtcgtgagcgaattgtggcagagtgtaatgctgtccgccaggccctgcaggacctgctttcggagtacatgggcaatgctggacgtaaagaaagaagtgatgcactcaattctgcaatagataaaatgaccaagaagaccagggacttgcgtagacagctccgcaaagctgtcatggaccacgtttcagattctttcctggaaaccaatgttccacttttggtattgattgaagctgcaaagaatggaaatgagaaagaagttaaggagtatgcccaagttttccgtgaacatgccaacaaattgattgaggttgccaacttggcctgttccatctcaaataatgaagaaggtgtaaagcttgttcgaatgtctgcaagccagttagaagccctctgtcctcaggttattaatgctgcactggctttagcagcaaaaccacagagtaaactggcccaagagaacatggatctttttaaagaacaatgggaaaaacaagtccgtgttctcacagatgctgtcgatgacattacttccattgatgacttcttggctgtctcagagaatcacattttggaagatgtgaacaaatgtgtcattgctctccaagagaaggatgtggatggcctggaccgcacagctggtgcaattcgaggccgggcagcccgggtcattcacgtagtcacctcagagatggacaactatgagccaggagtctacacagagaaggttctggaagccactaagctgctctccaacacagtcatgccacgttttactgagcaagtagaagcagccgtggaagccctcagctcggaccctgcccagcccatggatgagaatgagtttatcgatgcttcccgcctggtatatgatggcatccgggacatcaggaaagcagtgctgatgataaggacccctgaggagttggatgactctgactttgagacagaagattttgatgtcagaagcaggacgagcgtccagacagaagacgatcagctgatagctggccagagtgcccgggcgatcatggctcagcttccccaggagcaaattcatcattgggctcacttctaataactgcagtgtttcccgccttgggcttgcagcagaaaaacctgacaacatagtgtttgctaaggcagtaatttagactttaccttatttgtgattactgtagtgattgattgattgattactattaactacaaggtataatttactatcaccttatttaaattttatgaattaatttgaatgttttttacactaactaacttttcccaataaagtccactatgaaaccacgaca

SEQ ID NO: 362221 - DNA, 3683 bp, Homo sapiens
  misc_feature (19)..(19): n is a, c, g, or t
  misc_feature (22)..(22): n is a, c, g, or t
  misc_feature (2071)..(2071): n is a, c, g, or t
  misc_feature (2082)..(2082): n is a, c, g, or t
  misc_feature (2118)..(2118): n is a, c, g, or t
  misc_feature (2477)..(2477): n is a, c, g, or t
  misc_feature (2590)..(2590): n is a, c, g, or t
acggctaggtacgaggctnggngttgaatcggccgaggcgtctgcttcgggcctctggaatttagcgctcgcccagctagccgcagaaatgactgctgtccatgcaggcaacataaacttcaagtgggatcctaaaagtctagagatcaggactctggcagttgagagactgttggagcctcttgttacacaggttacaacccttgtaaacaccaatagtaaagggccctctaataagaagagaggtcgttctaagaaggcccatgttttggctgcatctgttgaacaagcaactgagaatttcttggagaagggggataaaattgcgaaggagagccagtttctcaaggaggagcttgtggctgctgtagaagatgttcgaaaacaaggtgatttgatgaaggctgctgcaggagagttcgcagatgatccctgctcttctgtgaagcgaggcaacatggttcgggcagctcgagctttgctctctgctgttacccggttgctgattttggctgacatggcagatgtctacaaattacttgttcagctgaaagttgtggaagatggtatcttgaagttgaggaatgctggcaatgaacaagacttaggaatccagtataaagccctaaaacctgaagtggataagctgaacattatggcagccaaaagacaacaggaattgaaagatgttggccatcgtgatcagatggctgcagctagaggaatcctgcagaagaacgttccgatcctctatactgcatcccaggcatgcctacagcaccctgatgtcgcagcctataaggccaacagggacctgatatacaagcagctgcagcaggcggtcacaggcatttccaatgcagcccaggccactgcctcagacgatgcctcacagcaccagggtggaggaggaggagaactggcatatgcactcaataactttgacaaacaaatcattgtggaccccttgagcttcagcgaggagcgctttaggccttccctggaggagcgtctggaaagcatcattagtggggctgccttgatggccgactcgtcctgcacgcgtgatgaccgtcgtgagcgaattgtggcagagtgtaatgctgtccgccaggccctgcaggacctgctttcggagtacatgggcaatgctggacgtaaagaaagaagtgatgcactcaattctgcaatagataaaatgaccaagaagaccagggacttgcgtagacagctccgcaaagctgtcatggaccacgtttcagattctttcctggaaaccaatgttccacttttggtattgattgaagctgcaaagaatggaaatgagaaagaagttaaggagtatgcccaagttttccgtgaacatgccaacaaattgattgaggttgccaacttggcctgttccatctcaaataatgaagaaggtgtaaagcttgttcgaatgtctgcaagccagttagaagccctctgtcctcaggttattaatgctgcactggctttagcagcaaaaccacagagtaaactggcccaagagaacatggatctttttaaagaacaatgggaaaaacaagtccgtgttctcacagatgctgtcgatgacattacttccattgatgacttcttggctgtctcagagaatcacattttggaagatgtgaacaaatgtgtcattgctctccaagagaaggatgtggatggcctggaccgcacagctggtgcaattcgaggccgggcagcccgggtcattcacgtagtcacctcagagatggacaactatgagccaggagtctacacagagaaggttctggaagccactaagctgctctccaacacagtcatgccacgttttactgagcaagtagaagcagccgtggaagccctcagctcggaccctgcccagcccatggatgagaatgagtttatcgatgcttcccgcctggtatatgatggcatccgggacatcaggaaagcagtgctgatgataaggacccctgaggagttggatgactctgaatctaagagaacacgaacgactctgtgtggagtgatcacggaacgcgagtgcatgagncgatcctcgcnagccagtgagagactgatgcaggcttgaatagacantggcctacgtagtctgcccgggacgtactcagtgggcgtcatccttcctccaggtagacacaacacaagcgaagattgcggaacaggtggccagcttccaggaagaaaagagcaagctggatgctgaagtgtccaaatgggacgacagtggcaatgacatcattgtgctggccaagcagatgtgcatgattatgatggagatgacagactttacccgaggtaaaggaccactcaaaaatacatcggatgtcatcagtgctgccaagaaaattgctgaggcaggatccaggatggacaagcttggccgcaccattgcagaccattgccccttgcagaccattgccccgatcggcttgcangcaggacctgctggcctacctgcaacgcatcgccctctactgccaccagctgaacatctgcagcaaggtcaaggccgaggtgcagaatctcggcgcgggagcttgtgtctctnggggtggacagcgccatgtcctgatccacggcagccaagcaacgttgatgacatgctgctggctgcagacagctgcaacggcactccatacgctcgcctcctaccaaactaccacaacagctcacacgggctactggccttccgctcacacctctccctgccatgcagctcactgcgacacgactcgcaacggcaaccaagcacgcacacacaacgccccactctggctgcacagcacgcagcacgcaaaccacgcgactggaagaccaacagaaacccacacgcacttacacaccgggcgccagtcctacaagcccacgcacagccacacgctggacacccccagggctcgccccagcggccccctccacccacgaacgctctcacaccacgccctcactcggcggaccatgccccactacttcacacgactccctgtcccccccacggagacctccggtgcccgcaagacacggcacaccgagacgcactgacttatcgcgcgtgaccatcccacttgcaacagctaaattcaagcgtatcgaccttggcatctcatgactcccagcctttccaaaatttgaaaaattattggccattagacattatccaacaccagcattgcaatctacccgttaggaagctttatccgcagtcgatcaggggggtaacaacacctggcgtgcccactggcacctacttggctaacacctccacgccctccgccacagcgccatggccgcatgcaacaagcttttctatccgcacatacggaaaaaccactgtaaccgcgtactctaagaccgcctactgacaccgtgtcaactcacacacttgggccctatcctataacaccacacttggccacagtggcagtggccccgcttaagcctgtatgcgcataaagggccactgaataacatttacaatacaccggggcacagcttggccccttttacaaacatttcctttgtcaacccctcatggcaacgccacaacatccctagtcgaccgtgaccaccattctggccttcaacaacaactagttgtcaccccataagcgcttgcgctgccccgaccatgagccattagt

SEQ ID NO: 362222 - DNA, 1829 bp, Homo sapiens
  misc_feature (19)..(19): n is a, c, g, or t
  misc_feature (22)..(22): n is a, c, g, or t
acggctaggtacgaggctnggngttgaatcggccgaggcgtctgcttcgggcctctggaatttagcgctcgcccagctagccgcagaaatgactgctgtccatgcaggcaacataaacttcaagtgggatcctaaaagtctagagatcaggactctggcagttgagagactgttggagcctcttgttacacaggttacaacccttgtaaacaccaatagtaaagggccctctaataagaagagaggtcgttctaagaaggcccatgttttggctgcatctgttgaacaagcaactgagaatttcttggagaagggggataaaattgcgaaggagagccagtttctcaaggaggagcttgtggctgctgtagaagatgttcgaaaacaaggtgatttgatgaaggctgctgcaggagagttcgcagatgatccctgctcttctgtgaagcgaggcaacatggttcgggcagctcgagctttgctctctgctgttacccggttgctgattttggctgacatggcagatgtctacaaattacttgttcagctgaaagttgtggaagatggtatcttgaagttgaggaatgctggcaatgaacaagacttaggaatccagtataaagccctaaaacctgaagtggataagctgaacattatggcagccaaaagacaacaggaattgaaagatgttggccatcgtgatcagatggctgcagctagaggaatcctgcagaagaacgttccgatcctctatactgcatcccaggcatgcctacagcaccctgatgtcgcagcctataaggccaacagggacctgatatacaagcagctgcagcaggcggtcacaggcatttccaatgcagcccaggccactgcctcagacgatgcctcacagcaccagggtggaggaggaggagaactggcatatgcactcaataactttgacaaacaaatcattgtggaccccttgagcttcagcgaggagcgctttaggccttccctggaggagcgtctggaaagcatcattagtggggctgccttgatggccgactcgtcctgcacgcgtgatgaccgtcgtgagcgaattgtggcagagtgtaatgctgtccgccaggccctgcaggacctgctttcggagtacatgggcaatgctggacgtaaagaaagaagtgatgcactcaattctgcaatagataaaatgaccaagaagaccagggacttgcgtagacagctccgcaaagctgtcatggaccacgtttcagattctttcctggaaaccaatgttccacttttggtattgattgaagctgcaaagaatggaaatgagaaagaagttaaggagtatgcccaagttttccgtgaacatgccaacaaattgattgaggttgccaacttggcctgttccatctcaaataatgaagaaggtgtaaagcttgttcgaatgtctgcaagccagttagaagccctctgtcctcaggttaaagtacaactgacactggtgacagcataaccaaattaaattttgattcaagtggagatgaggtttattttgttaagttttgttttgtttttaggattttagatggaagtcttggggacagatcactgacacagaacccacatagtttggaatattttttgtttaacattaagtgacatttgcacgggagattacatgttactcctggcccttcattgaaaatgcacagtgggctgggcacggtggctcacgcctgtaatcgcagcactttgggatcccaaagtggatgggtcagttgagcccaggaatctgagaccagcctgggcaacatagcaaaacaccatctctt

SEQ ID NO: 362223 - DNA, 885 bp, Homo sapiens
  misc_feature (19)..(19): n is a, c, g, or t
  misc_feature (22)..(22): n is a, c, g, or t
acggctaggtacgaggctnggngttgaatcggccgaggcgtctgcttcgggcctctggaatttagcgctcgcccagctagccgcagaaatgactgctgtccatgcaggcaacataaacttcaagtgggatcctaaaagtctagagatcaggactctggcagttgagagactgttggagcctcttgttacacaggttacaacccttgtaaacaccaatagtaaagggccctctaataagaagagaggtcgttctaagaaggcccatgttttggcgagaagggaatttggctcaacttcagttgagagggtgcagtccagacagcttgactgcttttaaatgaccaaagatgacctgtggtaagcaacctgggcatcttaggaagcagtccctggagaaggcatgttcccagaaaggtctctggagggacaaactcactcagtaaaacataatgtatcatgaagaaaactgattctctatgacatgaaatgaaaattttaatgcattgttataattactaatgtacgctgctgcaggacattaataaagttgcttttttaggctacagtgtctcgatgccataatcagaacacactttttttcctctttctcccagcttcaaatgcaaattcatcattgggctcacttctaataactgcagtgtttcccgccttgggcttgcagcagaaaaacctgacaacatagtgtttgctaaggcagtaatttagactttaccttatttgtgattactgtagtgattgattgattgattactattaactacaaggtataatttactatcaccttatttaaattttatgaattaatttgaatgttttttacactaactaacttttcccaataaagtccactatgaaaccacgaca

SEQ ID NO: 362224 - DNA, 895 bp, Homo sapiens
  misc_feature (19)..(19): n is a, c, g, or t
  misc_feature (22)..(22): n is a, c, g, or t
  misc_feature (849)..(849): n is a, c, g, or t
  misc_feature (856)..(856): n is a, c, g, or t
  misc_feature (883)..(883): n is a, c, g, or t
acggctaggtacgaggctnggngttgaatcggccgaggcgtctgcttcgggcctctggaatttagcgctcgcccagctagccgcagaaatgactgctgtccatgcaggcaacataaacttcaagtgggatcctaaaagtctagagatcaggactctggcagttgagagactgttggagcctcttgttacacaggttacaacccttgtaaacaccaatagtaaagggccctctaataagaagagaggtcgttctaagaaggcccatgttttggctgcatctgttgaacaagcaactgagaatttcttggagaagggggataaaattgcgaaggagagccagtttctcaaggaggagcttgtggctgctgtagaagatgttcgaaaacaaggtgatttgatgaaggctgctgcaggagagttcgcagatgatccctgctcttctgtgaagcgaggcaacatggttcgggcagctcgagctttgctctctgctgttacccggttgctgattttggctgacatggcagatgtctacaaattacttgttcagctgaaagttgtggaagatggtatcttgaagttgaggaatgctggcaatgaacaagacttaggaatccagtataaagccctaaaacctgaagtggataagctgaacattatggcagccaaaagacaacaggaattgaaagatgttggccatcgtgatcagatggctgcagctagaggaatcctgcagaagaacgttccgatcctctatactgcatcccaggcatgcctacagcaccctgatgtcgcagcctataaggccaacagggacctgatatacaagcagctcacagcggtacagcattncatgcanccaagccactgcttaaacatcctacanaccaggtggaga

SEQ ID NO: 362225 - DNA, 1010 bp, Homo sapiens
  misc_feature (19)..(19): n is a, c, g, or t
  misc_feature (22)..(22): n is a, c, g, or t
acggctaggtacgaggctnggngttgaatcggccgaggcgtctgcttcgggcctctggaatttagcgctcgcccagctagccgcagaaatgactgctgtccatgcaggcaacataaacttcaagtgggatcctaaaagtctagagatcaggactctggcagttgagagactgttggagcctcttgttacacaggttacaacccttgtaaacaccaatagtaaagggccctctaataagaagagaggtcgttctaagaaggcccatgttttggctgcatctgttgaacaagcaactgagaatttcttggagaagggggataaaattgcgaaggagagccagtttctcaaggaggagcttgtggctgctgtagaagatgttcgaaaacaaggtgatttgatgaaggctgctgcaggagagttcgcagatgatccctgctcttctgtgaagcgaggcaacatggttcgggcagctcgagctttgctctctgctgttacccggttgctgattttggctgacatggcagatgtctacaaattacttgttcagctgaaagttgtaagtatacaggcctatgtctgtaatttgttctatcacaggaagattgctactggccttccttagttcagtattccttaggatttagtttggttttgaatttggtttatctcaatggaccagagatgtttttgtttaatttccacttactcctctattccaagtatatatcatcctggctctgttctgagccagtgttgtcttggctgtaatgaagaacttgtagcaaagatactgttttgactccttccctttttccagtaatgattaaatattttccttgtagagttctggagttgagaaaccaagaatgtgctttgttaaacagatgcttgaaggcagcatgctcgttaagagtcatcaccactccctaatctcaagtacccagggacacaaacactctgcctaggaaaaccagagacctttgttcacttgtttatctgctgaccttccc

SEQ ID NO: 362226 - DNA, 438 bp, Homo sapiens
agcttgtcggcgccattttgtctcggcagcggtggccgtagctccatcgcattttatgtttctggcgagaagggaacggagttttcatcaggtagattggtttttgtgcggccgtcctccaccgtttcctccaggacagcacctagtcgtggccggaggagtctcagagctgtcagaaaggtgagcatttgtacagtgaaacattttgctacacaaaagtgatgtttaggaatactaacaaattattttcaagaataagactgattttatgggaaaattaagcagatgctccagtttgagaaacctggatctgcgatctgtttgtggtctctatgaataaagaaaagcaaatagaatcttatcaggtaccagcatcaagatgatttatggtaataaggtactcagtctttgcttaaaataaattttacgtttatcaaa

SEQ ID NO: 362227 - DNA, 980 bp, Homo sapiens
  misc_feature (3)..(3): n is a, c, g, or t
  misc_feature (26)..(26): n is a, c, g, or t
  misc_feature (33)..(33): n is a, c, g, or t
  misc_feature (85)..(85): n is a, c, g, or t
ggngcctgaattctcagttccccggnggtttangccagaaaattccttgaacccggaagccaggggttccagtgagccaagatcncacttattgcattccatcctgggctacagtagagcgagactccatctcagaaaaaaaaaaagatacaactataaaagatacctcataaagaacacggattcactaggaagaggcgtcattaactgtgcccttttagaatattttgtccattaacttaaatatatttaaaaccaactaattggccgggcatggtggctcacgcctgtaatcccagcactttgggaggccaaggcgggcagatcacaaggtcaggagttcgagaccagcctggctaatatagtgaaaccccatttctactaaaaatgcaaacattagtcaggcatggtggcaggtgcctgtagtcccagctacttgggaggctgaggcaggagactctcttcaacccgtgaggcagaggttgcagtgagtcgagatcatgtcactgcacttcagcttaagcaacagagcgagactccatctcaaaaaaagaaaagcacgtcactcgatgttctttctttcataagagttgaagaactaggtatatctgcttatattatggcatctatagtagcttagctgctcatatttgggtctctttagaaccagtgtctttcaaagagggttttaactatgctggtgtaaattttaagaatagatacattcaaagaagaattcaacattcatgtgacattcatactttggaactttgggaaagtataggaatgaccatagattggcttagggatagtcaatttacctgtctgtaaatggatccaatttagtattgttcctgtatttttctaagaccaacacttgtgtcattcacagttaaatatatgagttgtggccaggcccggtggctcatgcctgtaatttcagcattttaggaggctgaggtgaacagattgctcaagtc

SEQ ID NO: 362228 - DNA, 365 bp, Homo sapiens
agcttgtcggcgccattttgtctcggcagcggtggccgtagctccatcgcattttatgtttctggcgagaagggaacggagttttcatcaggtagattggtttttgtgcggccgtcctccaccgtttcctccaggacagcacctagtcgtggccggaggagtctcagagctgtcagaaagaataagactgattttatgggaaaattaagcagatgctccagtttgagaaacctggatctgcgatctgtttgtggtctctatgaataaagaaaagcaaatagaatcttatcaggtaccagcatcaagatgatttatggtaataaggtactcagtctttgcttaaaataaattttacgtttatcaaa

SEQ ID NO: 362229 - DNA, 451 bp, Homo sapiens
agcttgtcggcgccattttgtctcggcagcggtggccgtagctccatcgcattttatgtttctggcgagaagggaacggagttttcatcaggtagattggtttttgtgcggccgtcctccaccgtttcctccaggacagcacctagtcgtggccggaggagtctcagagctgtcagaaagaataagactgattttatgggaaaattaagcagatgctccagtttgagaaacctggatctgcgatctgtttgtggtctctatgaataaagaaaagcaaatagaatcttatcagataagtgcttttataagtctaaatatattctttggaatctctaaagcaaaacttttaaacttttttttttttttttttttttttaggtaccagcatcaagatgatttatggtaataaggtactcagtctttgcttaaaataaattttacgtttatcaaa

SEQ ID NO: 362230 - DNA, 298 bp, Homo sapiens
tccgggaggcgaaggtcacgagtggtattcagttaagagaacaattatttcgtataagccacatcagagacgactgaagatgaaaaaactaccatccccgtatataactaatttgtgctgtgcaccaacaagaacctgctttaaatttccatggcaatttacaacccccatactgtaccaggcaaggtctctatgaataaagaaaagcaaatagaatcttatcaggtaccagcatcaagatgatttatggtaataaggtactcagtctttgcttaaaataaattttacgtttatcaaa

SEQ ID NO: 362231 - DNA, 201 bp, Homo sapiens
cgtcgacagatgaagtctgtcacccaggctggagttcagtggcacaaatatatagaataagactgattttatgggaaaattaagcagatgctccagtttgagaaacctggatctgcgatctgtttgtggtaccagcatcaagatgatttatggtaataaggtactcagtctttgcttaaaataaattttacgtttatcaaa

SEQ ID NO: 362232 - DNA, 2242 bp, Homo sapiens
aaacagcttcttaggattaatgtaatatatatatgcaaaggtcaaatgaaatatttttgtggatggtaagaaaaatttcaacttacatttttgcaacttctttaacgatatcacggcaggtcatttctttcatctatagaaaataaaatgtatactgttcatcagaagaacattttccacttgtgtaataactattttcacttttatactcagatataaaaccaaggaaaataacctaaagtctgaaaaagaccagaatcgaagtttcctgattcatattttaatgttttgaaatttatactccaggctgggtgcagtggcttgtgcctgtaatcccagcactttgggaggccgaggcggccggattgcctgaagtcagaagttcgagaccagcctgaccaacatggtgaaaccctgtctctacttaaaaatacaaaagagctgggcatggaggtggtgcgcgcctgtaaccctagctactcgggaggctgaggcctaagaatctcttgaacccaggaggcagaggttgtagtgagccgggatcacgccactgcactctagcctgggcgacagagagagagactgtctaaaaaaggaaaagaaaaaaatttatacgccaaaaaagatattctgagataacctgtagttaccactaactttgtgacaaaattataaaaatccacagccatctatgaatctgtaggcagacctgaagtttgaacgactggtgaagacatctgattttctttatagccaagttaggataacaaaatgcaaacaagtcattaatatttactatatgcaagatacagaaagatgaaggaaggagtaagaagttatccttcgtggaactattcaaagcaaaaatgcaaaataccagggaaagctttgaagaaccaagatttgagcaggttcttagaatatagattggattggatttgatttcaagaaagatgaacgtgtaaagcagaagtgggaagccaaaaacttttttccaaattagaattaagcattctttcaatgaacatttggaaatcaaggtagaaaaatatccctagggcctagctgaggagtctgtatgttgttgggttttgatagtaaccagtccaagattttgttattagacgtgggtttctgaatagacaggcatttctgaacagacatgacaggatcaaaacaatgtttgagcaaactgcccttcatctactgtggatatgttgggggatgatggaatatagtgaaagataatgggtgctcatacagcagtctagacttaaggtgattcaactactatatattaaactagattatcttttattttttaattttgaaatctggatgctcaagctctgcctgcacaaccacatgaggaagaaggaacaatgacaacaaaaataacactaaatttaaatttaagagtactacttttaggaaatagacaaaccattatttgggtacaactaaaggcaactggcatggactcaaatattttggggaagaaaaagactaaaagttctaaggaagaaaatgcgaaccttgatagtttgaaatagttaaaaagacagtgtagaaactgtttaggcagtttgattatggactattagatgatacttgggtctgataatggtataaggagaataaagtatttagggatccaatattacgcctgcagctttttccaaatagttcatgggggagggggatgtgtaagtggttaactgaagtctaactagataggtttgttgtaagcttaggatgtttacagttcttcatgttaagttgagcgtgatgggaagggaaagaatgctgatctttaaatttttgtccttagttaagttctgtatttagtgaattaattgcatcctaaaaagtcaaacttgaaaagcacattttaaatggcaaatctattttttacatgtttgtgaagtttttattttttagtaaacagaccatcagaagagaacaatggtacagagcaggggtcagcagatggattttgtaaagcatcaacttgtaaatattttcaagtttattagctgtatggctctggtttctgttccctgttccaaatgttaaagtctactgttgtattctaaaagcagccatggactgaatgtagctgtgttccaataaaacttacacaaaagcaggcagtgggccataatttgcaacacctgattcacagcataattttgtcacaaactgaaagtgttcctcaattaaagtgatttttttttcttga

SEQ ID NO: 362233 - DNA, 2149 bp, Homo sapiens
aaacagcttcttaggattaatgtaatatatatatgcaaaggtcaaatgaaatatttttgtggatggtaagaaaaatttcaacttacatttttgcaacttctttaacgatatcacggcaggtcatttctttcatctatagaaaataaaatgtatactgttcatcagaagaacattttccacttgtgtaataactattttcacttttatactcagatataaaaccaaggaaaataacctaaagtctgaaaaagaccagaatcgaagtttcctgattcatattttaatgttttgaaatttatactccaggctgggtgcagtggcttgtgcctgtaatcccagcactttgggaggccgaggcggccggattgcctgaagtcagaagttcgagaccagcctgaccaacatggtgaaaccctgtctctacttaaaaatacaaaagagctgggcatggaggtggtgcgcgcctgtaaccctagctactcgggaggctgaggcctaagaatctcttgaacccaggaggcagaggttgtagtgagccgggatcacgccactgcactctagcctgggcgacagagagagagactgtctaaaaaaggaaaagaaaaaaatttatacgccaaaaaagatattctgagataacctgtagttaccactaactttgtgacaaaattataaaaatccacagccatctatgaatctgtaggcagacctgaagtttgaacgactggtgaagacatctgattttctttatagccaagttaggataacaaaatgcaaacaagtcattaatatttactatatgcaagatacagaaagatgaaggaaggagtaagaagttatccttcgtggaactattcaaagcaaaaatgcaaaataccagggaaagctttgaagaaccaagatttgagcaggttcttagaatatagattggattggatttgatttcaagaaagatgaacgtgtaaagcagaagtgggaagccaaaaacttttttccaaattagaattaagcattctttcaatgaacatttggaaatcaaggtagaaaaatatccctagggcctagctgaggagtctgtatgttgttgggttttgatagtaaccagtccaagattttgttattagacgtgggtttctgaatagacaggcatttctgaacagacatgacaggatcaaaacaatgtttgagcaaactgcccttcatctactgtggatatgttgggggatgatggaatatagtgaaagataatgggtgctcatacagcagtctagacttaaggtgattcaactactatatattaaactagattatcttttattttttaattttgaaatctggatgctcaagctctgcctgcacaaccacatgaggaagaaggaacaatgacaacaaaaataacactaaatttaaatttaagagtactacttttaggaaatagacaaaccattatttgggtacaactaaaggcaactggcatggactcaaatattttggggaagaaaaagactaaaagttctaaggaagaaaatgcgaaccttgatagtttgaaatagttaaaaagacagtgtagaaactgtttaggcagtttgattatggactattagatgatacttgggtctgataatggtataaggagaataaagtatttagggatccaatattacgcctgcagctttttccaaatagttcatgggggagggggatgtgtaagtggttaactgaagtctaactagataggtttgttgtaagcttaggatgtttacagttcttcatgttaagttgagcgtgatgggaagggaaagaatgctgatctttaaatttttgtccttagttaagttctgtatttagtgaattaattgcatcctaaaaagtcaaacttgaaaagcacattttaaatggcaaatctattttttacatgtttgtgaagtttttattttttagtaaacagaccatcagaagagaacaatggtacagagcaggggtcagcagatggattttgtaaagcatcaacttgtaaatattttcaagtttattagctgtatggctctggtttctgttccctgttccaaatgttaaagtctactgttgtattctaaaagcagccatggactgaatgtagctgtgttccaataaaacttacacaaaagca

SEQ ID NO: 362234 - DNA, 2260 bp, Homo sapiens
agcttgtcggcgccattttgtctcggcagcggtggccgtagctccatcgcattttatgtttctggcgagaagggaacggagttttcatcaggtagattggtttttgtgcggccgtcctccaccgtttcctccaggacagcacctagtcgtggccggaggagtctcagagctgtcagaaagaataagactgattttatgggaaaattaagcagatgctccagtttgagaaacctggatctgcgatctgtttgtggtctctatgaataaagaaaagcaaatagaatcttatcaggtaccagcatcaagatgatttatggtaataaggctgggtgcagtggcttgtgcctgtaatcccagcactttgggaggccgaggcggccggattgcctgaagtcagaagttcgagaccagcctgaccaacatggtgaaaccctgtctctacttaaaaatacaaaagagctgggcatggaggtggtgcgcgcctgtaaccctagctactcgggaggctgaggcctaagaatctcttgaacccaggaggcagaggttgtagtgagccgggatcacgccactgcactctagcctgggcgacagagagagagactgtctaaaaaaggaaaagaaaaaaatttatacgccaaaaaagatattctgagataacctgtagttaccactaactttgtgacaaaattataaaaatccacagccatctatgaatctgtaggcagacctgaagtttgaacgactggtgaagacatctgattttctttatagccaagttaggataacaaaatgcaaacaagtcattaatatttactatatgcaagatacagaaagatgaaggaaggagtaagaagttatccttcgtggaactattcaaagcaaaaatgcaaaataccagggaaagctttgaagaaccaagatttgagcaggttcttagaatatagattggattggatttgatttcaagaaagatgaacgtgtaaagcagaagtgggaagccaaaaacttttttccaaattagaattaagcattctttcaatgaacatttggaaatcaaggtagaaaaatatccctagggcctagctgaggagtctgtatgttgttgggttttgatagtaaccagtccaagattttgttattagacgtgggtttctgaatagacaggcatttctgaacagacatgacaggatcaaaacaatgtttgagcaaactgcccttcatctactgtggatatgttgggggatgatggaatatagtgaaagataatgggtgctcatacagcagtctagacttaaggtgattcaactactatatattaaactagattatcttttattttttaattttgaaatctggatgctcaagctctgcctgcacaaccacatgaggaagaaggaacaatgacaacaaaaataacactaaatttaaatttaagagtactacttttaggaaatagacaaaccattatttgggtacaactaaaggcaactggcatggactcaaatattttggggaagaaaaagactaaaagttctaaggaagaaaatgcgaaccttgatagtttgaaatagttaaaaagacagtgtagaaactgtttaggcagtttgattatggactattagatgatacttgggtctgataatggtataaggagaataaagtatttagggatccaatattacgcctgcagctttttccaaatagttcatgggggagggggatgtgtaagtggttaactgaagtctaactagataggtttgttgtaagcttaggatgtttacagttcttcatgttaagttgagcgtgatgggaagggaaagaatgctgatctttaaatttttgtccttagttaagttctgtatttagtgaattaattgcatcctaaaaagtcaaacttgaaaagcacattttaaatggcaaatctattttttacatgtttgtgaagtttttattttttagtaaacagaccatcagaagagaacaatggtacagagcaggggtcagcagatggattttgtaaagcatcaacttgtaaatattttcaagtttattagctgtatggctctggtttctgttccctgttccaaatgttaaagtctactgttgtattctaaaagcagccatggactgaatgtagctgtgttccaataaaacttacacaaaagcaggcagtgggccataatttgcaacacctgattcacagcataattttgtcacaaactgaaagtgttcctcaattaaagtgatttttttttcttga

SEQ ID NO: 362235 - DNA, 2701 bp, Homo sapiens
tactgccccgccccccccaaaaaatttctggtctgtctttagcttcatttctgaacattttatcctggacctctctttcttcaagtagaaataatcggctgggcgtggtggctcatgcctgtaatctcagcaccttgggaggccgaggcgggtggatcacctgaggtcgagagttcaagaccagcctgaccaacatggagaaaccccgtctctactaaaaatacagaattagccgggcgtggtggcgcatgcctgtaattccagctaattgggaggctgaggcaggagaatcgcttaaacctggaagatggaggttgcggtaagctgagatcgtggaattgcacttcaccctaggcaacaggagcaaaactgtctcaaaaaaaaaaaaaataatcgcagtctttaagttacacataccataaaatatatgagaatttttcttggaccctaggagtgattttttttttccactttttttttttttttcactttaggtgagcatttgtacagtgaaacattttgctacacaaaagtgatgtttaggaatactaacaaattattttcaagaataagactgattttatgggaaaattaagcagatgctccagtttgagaaacctggatctgcgatctgtttgtggtaccagcatcaagatgatttatggtaataagatataaaaccaaggaaaataacctaaagtctgaaaaagaccagaatcgaagtttcctgattcatattttaatgttttgaaatttatactccaggctgggtgcagtggcttgtgcctgtaatcccagcactttgggaggccgaggcggccggattgcctgaagtcagaagttcgagaccagcctgaccaacatggtgaaaccctgtctctacttaaaaatacaaaagagctgggcatggaggtggtgcgcgcctgtaaccctagctactcgggaggctgaggcctaagaatctcttgaacccaggaggcagaggttgtagtgagccgggatcacgccactgcactctagcctgggcgacagagagagagactgtctaaaaaaggaaaagaaaaaaatttatacgccaaaaaagatattctgagataacctgtagttaccactaactttgtgacaaaattataaaaatccacagccatctatgaatctgtaggcagacctgaagtttgaacgactggtgaagacatctgattttctttatagccaagttaggataacaaaatgcaaacaagtcattaatatttactatatgcaagatacagaaagatgaaggaaggagtaagaagttatccttcgtggaactattcaaagcaaaaatgcaaaataccagggaaagctttgaagaaccaagatttgagcaggttcttagaatatagattggattggatttgatttcaagaaagatgaacgtgtaaagcagaagtgggaagccaaaaacttttttccaaattagaattaagcattctttcaatgaacatttggaaatcaaggtagaaaaatatccctagggcctagctgaggagtctgtatgttgttgggttttgatagtaaccagtccaagattttgttattagacgtgggtttctgaatagacaggcatttctgaacagacatgacaggatcaaaacaatgtttgagcaaactgcccttcatctactgtggatatgttgggggatgatggaatatagtgaaagataatgggtgctcatacagcagtctagacttaaggtgattcaactactatatattaaactagattatcttttattttttaattttgaaatctggatgctcaagctctgcctgcacaaccacatgaggaagaaggaacaatgacaacaaaaataacactaaatttaaatttaagagtactacttttaggaaatagacaaaccattatttgggtacaactaaaggcaactggcatggactcaaatattttggggaagaaaaagactaaaagttctaaggaagaaaatgcgaaccttgatagtttgaaatagttaaaaagacagtgtagaaactgtttaggcagtttgattatggactattagatgatacttgggtctgataatggtataaggagaataaagtatttagggatccaatattacgcctgcagctttttccaaatagttcatgggggagggggatgtgtaagtggttaactgaagtctaactagataggtttgttgtaagcttaggatgtttacagttcttcatgttaagttgagcgtgatgggaagggaaagaatgctgatctttaaatttttgtccttagttaagttctgtatttagtgaattaattgcatcctaaaaagtcaaacttgaaaagcacattttaaatggcaaatctattttttacatgtttgtgaagtttttattttttagtaaacagaccatcagaagagaacaatggtacagagcaggggtcagcagatggattttgtaaagcatcaacttgtaaatattttcaagtttattagctgtatggctctggtttctgttccctgttccaaatgttaaagtctactgttgtattctaaaagcagccatggactgaatgtagctgtgttccaataaaacttacacaaaagcaggcagtgggccataatttgcaacacctgattcacagcataattttgtcacaaactgaaagtgttcctcaattaaagtgatttttttttcttga

SEQ ID NO: 362236 - DNA, 2314 bp, Homo sapiens
agcttgtcggcgccattttgtctcggcagcggtggccgtagctccatcgcattttatgtttctggcgagaagggaacggagttttcatcaggtagattggtttttgtgcggccgtcctccaccgtttcctccaggacagcacctagtcgtggccggaggagtctcagagctgtcagaaagaataagactgattttatgggaaaattaagcagatgctccagtttgagaaacctggatctgcgatctgtttgtggtaccagcatcaagatgatttatggtaataagatataaaaccaaggaaaataacctaaagtctgaaaaagaccagaatcgaagtttcctgattcatattttaatgttttgaaatttatactccaggctgggtgcagtggcttgtgcctgtaatcccagcactttgggaggccgaggcggccggattgcctgaagtcagaagttcgagaccagcctgaccaacatggtgaaaccctgtctctacttaaaaatacaaaagagctgggcatggaggtggtgcgcgcctgtaaccctagctactcgggaggctgaggcctaagaatctcttgaacccaggaggcagaggttgtagtgagccgggatcacgccactgcactctagcctgggcgacagagagagagactgtctaaaaaaggaaaagaaaaaaatttatacgccaaaaaagatattctgagataacctgtagttaccactaactttgtgacaaaattataaaaatccacagccatctatgaatctgtaggcagacctgaagtttgaacgactggtgaagacatctgattttctttatagccaagttaggataacaaaatgcaaacaagtcattaatatttactatatgcaagatacagaaagatgaaggaaggagtaagaagttatccttcgtggaactattcaaagcaaaaatgcaaaataccagggaaagctttgaagaaccaagatttgagcaggttcttagaatatagattggattggatttgatttcaagaaagatgaacgtgtaaagcagaagtgggaagccaaaaacttttttccaaattagaattaagcattctttcaatgaacatttggaaatcaaggtagaaaaatatccctagggcctagctgaggagtctgtatgttgttgggttttgatagtaaccagtccaagattttgttattagacgtgggtttctgaatagacaggcatttctgaacagacatgacaggatcaaaacaatgtttgagcaaactgcccttcatctactgtggatatgttgggggatgatggaatatagtgaaagataatgggtgctcatacagcagtctagacttaaggtgattcaactactatatattaaactagattatcttttattttttaattttgaaatctggatgctcaagctctgcctgcacaaccacatgaggaagaaggaacaatgacaacaaaaataacactaaatttaaatttaagagtactacttttaggaaatagacaaaccattatttgggtacaactaaaggcaactggcatggactcaaatattttggggaagaaaaagactaaaagttctaaggaagaaaatgcgaaccttgatagtttgaaatagttaaaaagacagtgtagaaactgtttaggcagtttgattatggactattagatgatacttgggtctgataatggtataaggagaataaagtatttagggatccaatattacgcctgcagctttttccaaatagttcatgggggagggggatgtgtaagtggttaactgaagtctaactagataggtttgttgtaagcttaggatgtttacagttcttcatgttaagttgagcgtgatgggaagggaaagaatgctgatctttaaatttttgtccttagttaagttctgtatttagtgaattaattgcatcctaaaaagtcaaacttgaaaagcacattttaaatggcaaatctattttttacatgtttgtgaagtttttattttttagtaaacagaccatcagaagagaacaatggtacagagcaggggtcagcagatggattttgtaaagcatcaacttgtaaatattttcaagtttattagctgtatggctctggtttctgttccctgttccaaatgttaaagtctactgttgtattctaaaagcagccatggactgaatgtagctgtgttccaataaaacttacacaaaagcaggcagtgggccataatttgcaacacctgattcacagcataattttgtcacaaactgaaagtgttcctcaattaaagtgatttttttttcttga
